United States Patent Application Publication US 2007/0214517 A1 - sequence listing, part 10

SEQ ID NO: 12503 - protein, 336 aa, Zea mays subsp. mays
  peptide (1)..(336): Ceres Seq. ID no. 12411530
  misc_feature (1)..(284): Pfam Name: Protein kinase domain Pfam Description: Protein kinase domain
  misc_feature (1)..(336): Homolog of NCBI NO: 541901 NR Description: protein kinase ASK-alpha (EC 2.7.1.-) - Arabidopsis thaliana >gi|460832|emb|CAA53181.1| shaggy related [Arabidopsis thaliana] >gi|1769889|emb|CAA48538.1| serine
  misc_feature (1)..(336): Homolog of NCBI NO: 21553877 NR Description: shaggy related protein kinase ASK-GAMMA
  misc_feature (1)..(336): Homolog of NCBI NO: 2398519 NR Description: shaggy-like kinase alpha [Arabidopsis thaliana]
  misc_feature (1)..(335): Homolog of NCBI NO: 11182434 NR Description: GLYCOGEN SYNTHASE KINASE-3 HOMOLOG MSK-3
  misc_feature (1)..(336): Homolog of NCBI NO: 11133532 NR Description: Shaggy-related protein kinase NtK-1
  misc_feature (1)..(336): Homolog of NCBI NO: 15230058 NR Description: shaggy related protein kinase, ASK-GAMMA; protein At3g05840.1, supported by cDNA: 17739., supported by cDNA:
  misc_feature (1)..(336): Homolog of NCBI NO: 18421039 NR Description: shaggy-like kinase alpha; protein id: supported by cDNA: gi_15028148, supported by cDNA: gi_16226767
  misc_feature (1)..(335): Homolog of NCBI NO: 481018 NR Description: protein kinase MSK-3 (EC 2.7.1.-) [similarity] -
  misc_feature (1)..(336): Homolog of NCBI NO: 22326813 NR Description: protein kinase MSK-3 - like; protein id: supported by cDNA: gi_18086449 [Arabidopsis thaliana]
  misc_feature (1)..(336): Homolog of NCBI NO: 24637171 NR Description: GSK-3-like protein MsK4 [Medicago sativa]
MAERIVGQGSFGIVFQAKCLETGETVAIKKVLQDKRYKNRELQTMRLLDHPNVVALKHCFFSTTEKDELYLNLVLEYVPETVHRVVKHHNKMNQRMPLIYVKLYMYQICRALAYIHGTIGVCHRDIKPQNLLVNPHTHQLKLCDFGSAKVLVKGEPNISYICSRYYRAPELIFGATEYTTAIDIWSAGCVLAELMLGQPLFPGESGVDQLVEIIKVLGTPTREEIKCMNPNYTEFKFPQIKAHPWHKVFHKRMPPEAVDLVSRLLQYSPNLRCTAMEALVHPFFDELRDPNTRLPNGRFLPPLFNFKPHELKGVPSDIVAKLIPEHAKKQCSYVGL

SEQ ID NO: 12504 - DNA, 1412 bp, Zea mays subsp. mays
  misc_feature (1)..(1412): Ceres Seq. ID no. 12358726
  misc_feature: MA Experiment ID: 108543 Result: Up-regulated in Transcription
  misc_feature: MA Experiment ID: 108559 Result: Down-regulated in Transcription
  misc_feature: MA Experiment 108559 PARAMETER Experiment Name: Zm_5mM_NO_P Parameter: Age (day) Value: 8
  misc_feature: MA Experiment 108559 PARAMETER Experiment Name: Zm_5mM_NO_P Parameter: Organism Value: Zea mays
  misc_feature: MA Experiment 108559 PARAMETER Experiment Name: Zm_5mM_NO_P Parameter: Plant Line Value: 35A19
  misc_feature: MA Experiment 108559 PARAMETER Experiment Name: Zm_5mM_NO_P Parameter: Timepoint (hr) Value: 12
  misc_feature: MA Experiment 108559 PARAMETER Experiment Name: Zm_5mM_NO_P Parameter: Tissue Value: Aerial
  misc_feature: MA Experiment 108559 PARAMETER Experiment Name: Zm_5mM_NO_P Parameter: Treatment Value: 5mM NO vs. No Treatment
  misc_feature: MA Experiment ID: 108687 Result: Down-regulated in Transcription
  misc_feature: MA Experiment 108687 PARAMETER Experiment Name: Zm_Embryos-Flowers__P Parameter: Tissue Value: Embryo vs. Aerial+
  misc_feature: MA Experiment ID: 108689 Result: Up-regulated in Transcription
  misc_feature: MA Experiment 108689 PARAMETER Experiment Name: Zm_Drought_Roots_P Parameter: Age (day) Value: 9
  misc_feature: MA Experiment 108689 PARAMETER Experiment Name: Zm_Drought_Roots_P Parameter: Organism Value: Zea mays
  misc_feature: MA Experiment 108689 PARAMETER Experiment Name: Zm_Drought_Roots_P Parameter: Plant Line Value: 35A19
  misc_feature: MA Experiment 108689 PARAMETER Experiment Name: Zm_Drought_Roots_P Parameter: Timepoint (hr) Value: 24
  misc_feature: MA Experiment 108689 PARAMETER Experiment Name: Zm_Drought_Roots_P Parameter: Tissue Value: Roots
  misc_feature: MA Experiment 108689 PARAMETER Experiment Name: Zm_Drought_Roots_P Parameter: Treatment Value: Drought vs. No Drought
  misc_feature: MA Experiment ID: 20000479 Result: Up-regulated in Transcription
  misc_feature: MA Experiment 20000479 PARAMETER Experiment Name: Zm_Drought_P Parameter: Age (day) Value: 10
  misc_feature: MA Experiment 20000479 PARAMETER Experiment Name: Zm_Drought_P Parameter: Organism Value: Zea mays
  misc_feature: MA Experiment 20000479 PARAMETER Experiment Name: Zm_Drought_P Parameter: Plant Line Value: 35A19
  misc_feature: MA Experiment 20000479 PARAMETER Experiment Name: Zm_Drought_P Parameter: Timepoint (hr) Value: 48
  misc_feature: MA Experiment 20000479 PARAMETER Experiment Name: Zm_Drought_P Parameter: Tissue Value: Aerial
  misc_feature: MA Experiment 20000479 PARAMETER Experiment Name: Zm_Drought_P Parameter: Treatment Value: Drought vs. No Drought
  misc_feature: MA Experiment ID: 20000535 Result: Down-regulated in Transcription
  misc_feature: MA Experiment 20000535 PARAMETER Experiment Name: Zm_Hybrid_Seed_Dev_P Parameter: DAP Value: 30 vs. 12
  misc_feature: MA Experiment 20000535 PARAMETER Experiment Name: Zm_Hybrid_Seed_Dev_P Parameter: Organism Value: Zea mays
  misc_feature: MA Experiment 20000535 PARAMETER Experiment Name: Zm_Hybrid_Seed_Dev_P Parameter: Plant Line Value: 35A19
  misc_feature: MA Experiment 20000535 PARAMETER Experiment Name: Zm_Hybrid_Seed_Dev_P Parameter: Tissue Value: Embryo vs. Unfert Floret
aaacaaatgatgatccatcgatagtggctgaggtgacagctctccaagtttcgtctgttcgctcgtggtggaaattccgctgagcgagcgagcgagcgaatcctcctcttcccagccccggcgtgaggagcgccggcgatgtcgaccggcggcaggaagatgaggacggcgtgcgtgaccggaggaaacgggtatatcgcctcggcgctcatcaaggtgctgctggagaagggctacgccgtcaagacgacggtcaggaaccctgatgacatggagaagaactcccacctcaaggacctgcaggcgctcgggtccttggaggtcttccgcgccgacctggacgaagacggcagcttcgatgacgccgtcgccggctgcgactacgccttcctggtcgccgctccggtgaacctccacacgaagaaccccgaggaagaaatgatcgagccggccgtcaggggaactctgaacgtgatgcggtcgtgcgtgaaggcgggcacggtgaggcgcgtggtcctgacctcgtcggcggccgcggtcaccaccaggccgcagctgcaaggcgatgggcacgtgctggacgaggagtcctggtccgacgtcgagtacctcagagcccacaagcctgcaggcccctgggggtacccggtgtccaaggtgctcctggagaaggaggcgagcaggttcgcggaggagcacggcatcggcctcgtcaccgtctgccccggcctcaccgtgggcgccgcgccgggccccgaccgcccgcaccaggcgtccccaactgcctctcccttctatccggcgacgaagccgcgttcgccgtgctggacgccatcgagagcgccaccgggtgcctgccgctggtccacgtcgacgacgtctgccgcgccgagctgttcgccgccgaggagggcgcggccgcgaggaggtacgtctgctgcggcctcaacacgaccgtcgccgagctcgcgcgtttcctggcggacaagtacccgcagtacggcgtcaaaacgaacctgctctccggcgagcggcttgagaagccgagagtgtgtctgtcgtccgcgaagctggtgaaggaaggtttcgagttcaggtacaggacgttggatgacatatacgacgacatggtcgagtacggcaaggccctgggaatcctgcccgacttgtgatgctgcttcctctgctctcgggccggcgatcaggagttcaggactggactttaaaccgtccgacaaaataagtctatttatgctgctactgtgcccaaccgtaattggaccttaaaaaatgtcattacaaacaatcaactgtgtcaagaaaaattgtctatgttttgctttttttttttggtctactcagaaccgtttgtctgactagtaatttctacctcaatcttccatcggaaaccc

SEQ ID NO: 12505 - protein, 312 aa, Zea mays subsp. mays
  peptide (1)..(312): Ceres Seq. ID no. 12358727
  misc_feature (13)..(154): Pfam Name: 3-beta hydroxysteroid dehydrogenase/isomerase family Pfam Description: 3-beta hydroxysteroid dehydrogenase/isomerase
  misc_feature (1)..(207): Homolog of NCBI NO: 39546249 NR Description: OSJNBa0089N06.19 [Oryza sativa (japonica
  misc_feature (9)..(204): Homolog of NCBI NO: 39546252 NR Description: OSJNBa0089N06.22 [Oryza sativa (japonica
  misc_feature (1)..(206): Homolog of NCBI NO: 39546251 NR Description: OSJNBa0089N06.21 [Oryza sativa (japonica
  misc_feature (43)..(206): Homolog of NCBI NO: 39546254 NR Description: OSJNBa0089N06.24 [Oryza sativa (japonica
  misc_feature (1)..(27): Homolog of NCBI NO: 39546254 NR Description: OSJNBa0089N06.24 [Oryza sativa (japonica
  misc_feature (9)..(209): Homolog of NCBI NO: 27966032 NR Description: anthocyanidin reductase [Medicago truncatula]
  misc_feature (3)..(217): Homolog of NCBI NO: 6689826 NR Description: DFR-like protein [Arabidopsis thaliana]
  misc_feature (3)..(217): Homolog of NCBI NO: 15220598 NR Description: dihydroflavonol 4-reductase, putative; protein At1g61720.1, supported by cDNA: gi_6689825 [Arabidopsis thaliana] Leucoanthocyanidin reductase (LAR) (BANYULS) (Anthocyanin spotted
  misc_feature (1)..(167): Homolog of NCBI NO: 32489686 NR Description: OSJNBa0089N06.26 [Oryza sativa (japonica
  misc_feature (10)..(209): Homolog of NCBI NO: 30230341 NR Description: putative dihydroflavonol 4-reductase [Anthurium
MSTGGRKMRTACVTGGNGYIASALIKVLLEKGYAVKTTVRNPDDMEKNSHLKDLQALGSLEVFRADLDEDGSFDDAVAGCDYAFLVAAPVNLHTKNPEEEMIEPAVRGTLNVMRSCVKAGTVRRVVLTSSAAAVTTRPQLQGDGHVLDEESWSDVEYLRAHKPAGPWGYPVSKVLLEKEASRFAEEHGIGLVTVCPGLTVGAAPGPDRPHQASPTASPFYPATKPRSPCWTPSRAPPGACRWSTSTTSAAPSCSPPRRARPRGGTSAAASTRPSPSSRVSWRTSTRSTASKRTCSPASGLRSRECVCRPRSW

SEQ ID NO: 12506 - protein, 305 aa, Zea mays subsp. mays
  peptide (1)..(305): Ceres Seq. ID no. 12358728
  misc_feature (6)..(147): Pfam Name: 3-beta hydroxysteroid dehydrogenase/isomerase family Pfam Description: 3-beta hydroxysteroid dehydrogenase/isomerase
  misc_feature (1)..(200): Homolog of NCBI NO: 39546249 NR Description: OSJNBa0089N06.19 [Oryza sativa (japonica
  misc_feature (2)..(197): Homolog of NCBI NO: 39546252 NR Description: OSJNBa0089N06.22 [Oryza sativa (japonica
  misc_feature (1)..(199): Homolog of NCBI NO: 39546251 NR Description: OSJNBa0089N06.21 [Oryza sativa (japonica
  misc_feature (36)..(199): Homolog of NCBI NO: 39546254 NR Description: OSJNBa0089N06.24 [Oryza sativa (japonica
  misc_feature (1)..(20): Homolog of NCBI NO: 39546254 NR Description: OSJNBa0089N06.24 [Oryza sativa (japonica
  misc_feature (2)..(202): Homolog of NCBI NO: 27966032 NR Description: anthocyanidin reductase [Medicago truncatula]
  misc_feature (1)..(210): Homolog of NCBI NO: 6689826 NR Description: DFR-like protein [Arabidopsis thaliana]
  misc_feature (1)..(210): Homolog of NCBI NO: 15220598 NR Description: dihydroflavonol 4-reductase, putative; protein At1g61720.1, supported by cDNA: gi_6689825 [Arabidopsis thaliana] Leucoanthocyanidin reductase (LAR) (BANYULS) (Anthocyanin spotted
  misc_feature (1)..(160): Homolog of NCBI NO: 32489686 NR Description: OSJNBa0089N06.26 [Oryza sativa (japonica
  misc_feature (3)..(202): Homolog of NCBI NO: 30230341 NR Description: putative dihydroflavonol 4-reductase [Anthurium
MRTACVTGGNGYIASALIKVLLEKGYAVKTTVRNPDDMEKNSHLKDLQALGSLEVFRADLDEDGSFDDAVAGCDYAFLVAAPVNLHTKNPEEEMIEPAVRGTLNVMRSCVKAGTVRRVVLTSSAAAVTTRPQLQGDGHVLDEESWSDVEYLRAHKPAGPWGYPVSKVLLEKEASRFAEEHGIGLVTVCPGLTVGAAPGPDRPHQASPTASPFYPATKPRSPCWTPSRAPPGACRWSTSTTSAAPSCSPPRRARPRGGTSAAASTRPSPSSRVSWRTSTRSTASKRTCSPASGLRSRECVCRPRSW

SEQ ID NO: 12507 - protein, 268 aa, Zea mays subsp. mays
  peptide (1)..(268): Ceres Seq. ID no. 12358729
  misc_feature (1)..(110): Pfam Name: 3-beta hydroxysteroid dehydrogenase/isomerase family Pfam Description: 3-beta hydroxysteroid dehydrogenase/isomerase
  misc_feature (1)..(163): Homolog of NCBI NO: 39546249 NR Description: OSJNBa0089N06.19 [Oryza sativa (japonica
  misc_feature (1)..(160): Homolog of NCBI NO: 39546252 NR Description: OSJNBa0089N06.22 [Oryza sativa (japonica
  misc_feature (1)..(162): Homolog of NCBI NO: 39546251 NR Description: OSJNBa0089N06.21 [Oryza sativa (japonica
  misc_feature (1)..(162): Homolog of NCBI NO: 39546254 NR Description: OSJNBa0089N06.24 [Oryza sativa (japonica
  misc_feature (1)..(165): Homolog of NCBI NO: 27966032 NR Description: anthocyanidin reductase [Medicago truncatula]
  misc_feature (1)..(173): Homolog of NCBI NO: 6689826 NR Description: DFR-like protein [Arabidopsis thaliana]
  misc_feature (1)..(173): Homolog of NCBI NO: 15220598 NR Description: dihydroflavonol 4-reductase, putative; protein At1g61720.1, supported by cDNA: gi_6689825 [Arabidopsis thaliana] Leucoanthocyanidin reductase (LAR) (BANYULS) (Anthocyanin spotted
  misc_feature (1)..(123): Homolog of NCBI NO: 32489686 NR Description: OSJNBa0089N06.26 [Oryza sativa (japonica
  misc_feature (1)..(165): Homolog of NCBI NO: 30230341 NR Description: putative dihydroflavonol 4-reductase [Anthurium
  misc_feature (1)..(157): Homolog of NCBI NO: 1706374 NR Description: DIHYDROFLAVONOL-4-REDUCTASE (DFR)
MEKNSHLKDLQALGSLEVFRADLDEDGSFDDAVAGCDYAFLVAAPVNLHTKNPEEEMIEPAVRGTLNVMRSCVKAGTVRRVVLTSSAAAVTTRPQLQGDGHVLDEESWSDVEYLRAHKPAGPWGYPVSKVLLEKEASRFAEEHGIGLVTVCPGLTVGAAPGPDRPHQASPTASPFYPATKPRSPCWTPSRAPPGACRWSTSTTSAAPSCSPPRRARPRGGTSAAASTRPSPSSRVSWRTSTRSTASKRTCSPASGLRSRECVCRPRSW

SEQ ID NO: 12508 - DNA, 991 bp, Zea mays subsp. mays
  misc_feature (1)..(991): Ceres Seq. ID no. 12407888
  misc_feature: MA Experiment ID: 108535 Result: Up-regulated in Transcription
  misc_feature: MA Experiment 108535 PARAMETER Experiment Name: Zm_Meristem_P Parameter: Age (day) Value: 8
  misc_feature: MA Experiment 108535 PARAMETER Experiment Name: Zm_Meristem_P Parameter: Organism Value: Zea mays
  misc_feature: MA Experiment 108535 PARAMETER Experiment Name: Zm_Meristem_P Parameter: Plant Line Value: 35A19
  misc_feature: MA Experiment 108535 PARAMETER Experiment Name: Zm_Meristem_P Parameter: Tissue Value: Root Meristem vs. Above Root Meristem
  misc_feature: MA Experiment ID: 108544 Result: Down-regulated in Transcription
  misc_feature: MA Experiment ID: 108556 Result: Down-regulated in Transcription
  misc_feature: MA Experiment 108556 PARAMETER Experiment Name: Zm_Drought_P Parameter: Age (day) Value: 9
  misc_feature: MA Experiment 108556 PARAMETER Experiment Name: Zm_Drought_P Parameter: Organism Value: Zea mays
  misc_feature: MA Experiment 108556 PARAMETER Experiment Name: Zm_Drought_P Parameter: Plant Line Value: 35A19
  misc_feature: MA Experiment 108556 PARAMETER Experiment Name: Zm_Drought_P Parameter: Timepoint (hr) Value: 24
  misc_feature: MA Experiment 108556 PARAMETER Experiment Name: Zm_Drought_P Parameter: Tissue Value: Aerial
  misc_feature: MA Experiment 108556 PARAMETER Experiment Name: Zm_Drought_P Parameter: Treatment Value: Drought vs. No Drought
  misc_feature: MA Experiment ID: 20000478 Result: Down-regulated in Transcription
  misc_feature: MA Experiment 20000478 PARAMETER Experiment Name: Zm_5mM_SA_P Parameter: Age (day) Value: 11
  misc_feature: MA Experiment 20000478 PARAMETER Experiment Name: Zm_5mM_SA_P Parameter: Organism Value: Zea mays
  misc_feature: MA Experiment 20000478 PARAMETER Experiment Name: Zm_5mM_SA_P Parameter: Plant Line Value: 35A19
  misc_feature: MA Experiment 20000478 PARAMETER Experiment Name: Zm_5mM_SA_P Parameter: Timepoint (hr) Value: 72
  misc_feature: MA Experiment 20000478 PARAMETER Experiment Name: Zm_5mM_SA_P Parameter: Tissue Value: Aerial
  misc_feature: MA Experiment 20000478 PARAMETER Experiment Name: Zm_5mM_SA_P Parameter: Treatment Value: 5mM SA vs. No Treatment
  misc_feature: MA Experiment ID: 20000488 Result: Up-regulated in Transcription
  misc_feature: MA Experiment 20000488 PARAMETER Experiment Name: Zm_50mM_NH4NO3_L_to_H_P Parameter: Organism Value: Zea mays
  misc_feature: MA Experiment 20000488 PARAMETER Experiment Name: Zm_50mM_NH4NO3_L_to_H_P Parameter: Timepoint (hr) Value: 8
  misc_feature: MA Experiment 20000488 PARAMETER Experiment Name: Zm_50mM_NH4NO3_L_to_H_P Parameter: Tissue Value: Leaves
  misc_feature: MA Experiment 20000488 PARAMETER Experiment Name: Zm_50mM_NH4NO3_L_to_H_P Parameter: Treatment Value: 50mM NH4NO3 vs. 100mM Mannitol
  misc_feature: MA Experiment ID: 20000492 Result: Up-regulated in Transcription
  misc_feature: MA Experiment 20000492 PARAMETER Experiment Name: Zm_Hybrid_Seed_Dev_P Parameter: DAP Value: 12
  misc_feature: MA Experiment 20000492 PARAMETER Experiment Name: Zm_Hybrid_Seed_Dev_P Parameter: Organism Value: Zea mays
  misc_feature: MA Experiment 20000492 PARAMETER Experiment Name: Zm_Hybrid_Seed_Dev_P Parameter: Plant Line Value: 35A19
  misc_feature: MA Experiment 20000492 PARAMETER Experiment Name: Zm_Hybrid_Seed_Dev_P Parameter: Tissue Value: Fert Kernel vs. Unfert Floret
  misc_feature: MA Experiment ID: 20000535 Result: Up-regulated in Transcription
  misc_feature: MA Experiment 20000535 PARAMETER Experiment Name: Zm_Hybrid_Seed_Dev_P Parameter: DAP Value: 30 vs. 12
  misc_feature: MA Experiment 20000535 PARAMETER Experiment Name: Zm_Hybrid_Seed_Dev_P Parameter: Organism Value: Zea mays
  misc_feature: MA Experiment 20000535 PARAMETER Experiment Name: Zm_Hybrid_Seed_Dev_P Parameter: Plant Line Value: 35A19
  misc_feature: MA Experiment 20000535 PARAMETER Experiment Name: Zm_Hybrid_Seed_Dev_P Parameter: Tissue Value: Embryo vs. Unfert Floret
  misc_feature: MA Experiment ID: 20000632 Result: Down-regulated in Transcription
  misc_feature: MA Experiment 20000632 PARAMETER Experiment Name: Zm_Herbicide-Treatments_P Parameter: Timepoint (hr) Value: 4
  misc_feature: MA Experiment 20000632 PARAMETER Experiment Name: Zm_Herbicide-Treatments_P Parameter: Tissue Value: Aerial
  misc_feature: MA Experiment 20000632 PARAMETER Experiment Name: Zm_Herbicide-Treatments_P Parameter: Treatment Value: Glean vs. No Treatment
  misc_feature: MA Experiment ID: 20000633 Result: Down-regulated in Transcription
  misc_feature: MA Experiment 20000633 PARAMETER Experiment Name: Zm_Herbicide-Treatments_P Parameter: Timepoint (hr) Value: 4
  misc_feature: MA Experiment 20000633 PARAMETER Experiment Name: Zm_Herbicide-Treatments_P Parameter: Tissue Value: Aerial
  misc_feature: MA Experiment 20000633 PARAMETER Experiment Name: Zm_Herbicide-Treatments_P Parameter: Treatment Value: Trimec vs. No Treatment
gtgtccactgttcagtcggctcgagtaacaacagcaatagaatgggtggcggcggcgggagcccggcagcgagcggcgggagcagcagcagcgaggatgacggagacgccgcgtggaaggcagccattgactccatcgcgtccgttgggttcagcgtcccttcgtccaacggcgtggcgaaggcagcctctagcggcagccgcgaggtgaacaaccgcgctgatctggaagagccgcgtgaggggaagccaaagagtcctgggcttaagctgtaccaggtcaaggtaagaaacatgttggatgatatgttagagaaaaatctcgaaatagtcaaagctccgtgcttgaacttagtagaccccatggaaacaggaggaggaataaagttatttaaaaaagcaccacctggtattagcatggattctacggataaatggcacgtgcaactcaagcgaccaagaatcgtgcctggggtagaggtcgatgagaaatcaaagaagttccggcatatgctccggtctgttgttgtcgacggcagtgacatagttgtttctgcaaagaaagcatctgagagatcattggctagattggaagtgagagaagctgcagcaaaggcaaaagccaagagggaggaagaaagggtgcaggaactaaagaaggttaggggagagaaatggcttccttctgttgctagacaaatgaaggaggaaaaggcttgggagctgcgaaggcagagttccttttctaaggtcttaatcaattgtaataaaacgaaatacagtcaggatttttttgtgatttttacttgatctgtgagcgaacactgggtctttcaccttgtcatccaatgggttctgctccttggtgaaatctcccaccagccagtaaagaactgggttgttttcataatatatgcttttgctatgcagcctctgctgttgtaaggaattgcattgttatcttatatcactgtatggtgatgtttaacttt

SEQ ID NO: 12509 - protein, 268 aa, Zea mays subsp. mays
  peptide (1)..(268): Ceres Seq. ID no. 12407889
  misc_feature (24)..(236): Homolog of NCBI NO: 21593080 NR Description: unknown [Arabidopsis thaliana]
  misc_feature (24)..(236): Homolog of NCBI NO: 15229629 NR Description: putative protein; protein id: At3g49890.1, by cDNA: 35969. [Arabidopsis thaliana] >gi|11285662|pir||T46055
VHCSVGSSNNSNRMGGGGGSPAASGGSSSSEDDGDAAWKAAIDSIASVGFSVPSSNGVAKAASSGSREVNNRADLEEPREGKPKSPGLKLYQVKVRNMLDDMLEKNLEIVKAPCLNLVDPMETGGGIKLFKKAPPGISMDSTDKWHVQLKRPRIVPGVEVDEKSKKFRHMLRSVVVDGSDIVVSAKKASERSLARLEVREAAAKAKAKREEERVQELKKVRGEKWLPSVARQMKEEKAWELRRQSSFSKVLINCNKTKYSQDFFVIFT

SEQ ID NO: 12510 - protein, 255 aa, Zea mays subsp. mays
  peptide (1)..(255): Ceres Seq. ID no. 12407890
  misc_feature (11)..(223): Homolog of NCBI NO: 21593080 NR Description: unknown [Arabidopsis thaliana]
  misc_feature (11)..(223): Homolog of NCBI NO: 15229629 NR Description: putative protein; protein id: At3g49890.1, by cDNA: 35969. [Arabidopsis thaliana] >gi|11285662|pir||T46055
MGGGGGSPAASGGSSSSEDDGDAAWKAAIDSIASVGFSVPSSNGVAKAASSGSREVNNRADLEEPREGKPKSPGLKLYQVKVRNMLDDMLEKNLEIVKAPCLNLVDPMETGGGIKLFKKAPPGISMDSTDKWHVQLKRPRIVPGVEVDEKSKKFRHMLRSVVVDGSDIVVSAKKASERSLARLEVREAAAKAKAKREEERVQELKKVRGEKWLPSVARQMKEEKAWELRRQSSFSKVLINCNKTKYSQDFFVIFT

SEQ ID NO: 12511 - protein, 171 aa, Zea mays subsp. mays
  peptide (1)..(171): Ceres Seq. ID no. 12407891
  misc_feature (1)..(139): Homolog of NCBI NO: 21593080 NR Description: unknown [Arabidopsis thaliana]
  misc_feature (1)..(139): Homolog of NCBI NO: 15229629 NR Description: putative protein; protein id: At3g49890.1, by cDNA: 35969. [Arabidopsis thaliana] >gi|11285662|pir||T46055
MLDDMLEKNLEIVKAPCLNLVDPMETGGGIKLFKKAPPGISMDSTDKWHVQLKRPRIVPGVEVDEKSKKFRHMLRSVVVDGSDIVVSAKKASERSLARLEVREAAAKAKAKREEERVQELKKVRGEKWLPSVARQMKEEKAWELRRQSSFSKVLINCNKTKYSQDFFVIFT

SEQ ID NO: 12512 - DNA, 1494 bp, Zea mays subsp. mays
  misc_feature (1)..(1494): Ceres Seq. ID no. 12342482
  misc_feature: MA Experiment ID: 108547 Result: Down-regulated in Transcription
  misc_feature: MA Experiment 108547 PARAMETER Experiment Name: Zm_Imbibed_Seeds_P Parameter: Age (day) Value: 4 vs. 2
  misc_feature: MA Experiment 108547 PARAMETER Experiment Name: Zm_Imbibed_Seeds_P Parameter: Organism Value: Zea mays
  misc_feature: MA Experiment 108547 PARAMETER Experiment Name: Zm_Imbibed_Seeds_P Parameter: Plant Line Value: 35A19
  misc_feature: MA Experiment 108547 PARAMETER Experiment Name: Zm_Imbibed_Seeds_P Parameter: Tissue Value: Aerial vs. Embryo
agcgttgttaaaaccagtgccattagccatcctagccttcaccctcgcggagaagaagaaagaaaccacctcacctcaagaacagctagctgcaaggataaaaaaaaacaaagctgctgatctatatataataattaggctttgcagtgtcttgttttggagagcaaaggatcatcgtcaagtgatggccaagtcaggggcgctagaacttgctcggagcaccggagggtcgcttagcaaggaccaagtcaaatccgccgttgatcagtatgtcaaataccacgacctccatggaggcaaacaagaatcaaggaagtcaaattacaccgatttggcaaacaagtactatgatcttgtcactggcttttacgaatatggatggggcgactcattccatcttgctggcggatatccgggtgagacttcccgtgaagccattaagcggcaccagcattttttggcactacaattggggctcaagaagggtatgaaggttttggatgtgggatgtggaattgggggacctttaatagaaatcgccagattcagctcaacatcgataactggactgaacaacaatgactaccacatctcaaggggcaaggagctcattttttcagcaggtttgagtgagcaatgctgcttcttgaagggggacttcatggacatgccaatatctgataacacctttgatgcggcctatgcaatacagactacatgtcatgcaccagatgcacaaggcgtctatagtgaggtctaccgtgtgctgaaacctgggcagtattttgcactggatgaatggtgcttgaccgaccgatttgatcccaacaacgccaagcatttggccatcaaggctgagattgagctcggtgatggcctacctgacatccgtaccactcgccaatgtgtccaagctatgaaagatgcaggatttgaggtcgtttttgcaaaggatcttgctcaagtttttccttgcccgtggtaccgggtgatggatcccacctacttttcatgggctcacttccaatgcacacgcccaggacggatcgtcacccgtgcaattgtcaatacactagagttcctccgtattgccccagcaggcagcatgggagcctacaacgtcctgatgagtgcctctgatggccttctaaaaggtggccgggaaggtatcttcacagcgaccttcttcgtcctgggccgcaagcctctcaaggaagttgatatagtaagcctctcaagaaagttgatatagtgaacggcggcgtcctttgagctgcaagattagtatggggctgtactcataagagctatgaatcatggccaacgtgttctgtgccgaggtgtgtttactggattgtcttatgggttatggcccttgcgctgtgtgctggcctgctgggtcatgttcccgcagtagcctgtatctgcttgtcagcttgtgtgctgtgtactatgcactatctgaataaaaatgcagttttacgcattgttatt

SEQ ID NO: 12513 - protein, 416 aa, Zea mays subsp. mays
  peptide (1)..(416): Ceres Seq. ID no. 12342483
  misc_feature (124)..(323): Pfam Name: ubiE/COQ5 methyltransferase family Pfam Description: ubiE/COQ5 methyltransferase family
  misc_feature (62)..(405): Homolog of NCBI NO: 7443716 NR Description: sterol 24-C-methyltransferase (EC 2.1.1.41)
  misc_feature (62)..(405): Homolog of NCBI NO: 7443715 NR Description: sterol 24-C-methyltransferase (EC 2.1.1.41) -
  misc_feature (62)..(405): Homolog of NCBI NO: 34393309 NR Description: cycloartenol-C24-methyltransferase [Oryza sativa
  misc_feature (85)..(408): Homolog of NCBI NO: 30103006 NR Description: putative endosperm C-24 sterol methyltransferase
  misc_feature (62)..(405): Homolog of NCBI NO: 3560531 NR Description: cycloartenol-C24-methyltransferase [Oryza sativa
  misc_feature (62)..(405): Homolog of NCBI NO: 3560474 NR Description: S-adenosyl-methionine-sterol-C- methyltransferase
  misc_feature (89)..(405): Homolog of NCBI NO: 7489677 NR Description: probable sterol 24-C-methyltransferase (EC
  misc_feature (89)..(405): Homolog of NCBI NO: 1872473 NR Description: delta-24-sterol methyltransferase [Triticum
  misc_feature (63)..(402): Homolog of NCBI NO: 7443720 NR Description: probable sterol 24-C-methyltransferase (EC
  misc_feature (62)..(405): Homolog of NCBI NO: 7443719 NR Description: sterol 24-C-methyltransferase (EC 2.1.1.41) -
ALLKPVPLAILAFTLAEKKKETTSPQEQLAARIKKNKAADLYIIIRLCSVLFWRAKDHRQVMAKSGALELARSTGGSLSKDQVKSAVDQYVKYHDLHGGKQESRKSNYTDLANKYYDLVTGFYEYGWGDSFHLAGGYPGETSREAIKRHQHFLALQLGLKKGMKVLDVGCGIGGPLIEIARFSSTSITGLNNNDYHISRGKELIFSAGLSEQCCFLKGDFMDMPISDNTFDAAYAIQTTCHAPDAQGVYSEVYRVLKPGQYFALDEWCLTDRFDPNNAKHLAIKAEIELGDGLPDIRTTRQCVQAMKDAGFEVVFAKDLAQVFPCPWYRVMDPTYFSWAHFQCTRPGRIVTRAIVNTLEFLRIAPAGSMGAYNVLMSASDGLLKGGREGIFTATFFVLGRKPLKEVDIVSLSRKLI

SEQ ID NO: 12514 - protein, 355 aa, Zea mays subsp. mays
  peptide (1)..(355): Ceres Seq. ID no. 12342484
  misc_feature (63)..(262): Pfam Name: ubiE/COQ5 methyltransferase family Pfam Description: ubiE/COQ5 methyltransferase family
  misc_feature (1)..(344): Homolog of NCBI NO: 7443716 NR Description: sterol 24-C-methyltransferase (EC 2.1.1.41)
  misc_feature (1)..(344): Homolog of NCBI NO: 7443715 NR Description: sterol 24-C-methyltransferase (EC 2.1.1.41) -
  misc_feature (1)..(344): Homolog of NCBI NO: 34393309 NR Description: cycloartenol-C24-methyltransferase [Oryza sativa
  misc_feature (24)..(347): Homolog of NCBI NO: 30103006 NR Description: putative endosperm C-24 sterol methyltransferase
  misc_feature (1)..(344): Homolog of NCBI NO: 3560531 NR Description: cycloartenol-C24-methyltransferase [Oryza sativa
  misc_feature (1)..(344): Homolog of NCBI NO: 3560474 NR Description: S-adenosyl-methionine-sterol-C- methyltransferase
  misc_feature (28)..(344): Homolog of NCBI NO: 7489677 NR Description: probable sterol 24-C-methyltransferase (EC
  misc_feature (28)..(344): Homolog of NCBI NO: 1872473 NR Description: delta-24-sterol methyltransferase [Triticum
  misc_feature (2)..(341): Homolog of NCBI NO: 7443720 NR Description: probable sterol 24-C-methyltransferase (EC
  misc_feature (1)..(344): Homolog of NCBI NO: 7443719 NR Description: sterol 24-C-methyltransferase (EC 2.1.1.41) -
MAKSGALELARSTGGSLSKDQVKSAVDQYVKYHDLHGGKQESRKSNYTDLANKYYDLVTGFYEYGWGDSFHLAGGYPGETSREAIKRHQHFLALQLGLKKGMKVLDVGCGIGGPLIEIARFSSTSITGLNNNDYHISRGKELIFSAGLSEQCCFLKGDFMDMPISDNTFDAAYAIQTTCHAPDAQGVYSEVYRVLKPGQYFALDEWCLTDRFDPNNAKHLAIKAEIELGDGLPDIRTTRQCVQAMKDAGFEVVFAKDLAQVFPCPWYRVMDPTYFSWAHFQCTRPGRIVTRAIVNTLEFLRIAPAGSMGAYNVLMSASDGLLKGGREGIFTATFFVLGRKPLKEVDIVSLSRKLI

SEQ ID NO: 12515 - protein, 254 aa, Zea mays subsp. mays
  peptide (1)..(254): Ceres Seq. ID no. 12342485
  misc_feature (1)..(161): Pfam Name: ubiE/COQ5 methyltransferase family Pfam Description: ubiE/COQ5 methyltransferase family
  misc_feature (1)..(243): Homolog of NCBI NO: 7443716 NR Description: sterol 24-C-methyltransferase (EC 2.1.1.41)
  misc_feature (1)..(243): Homolog of NCBI NO: 7443715 NR Description: sterol 24-C-methyltransferase (EC 2.1.1.41) -
  misc_feature (1)..(243): Homolog of NCBI NO: 34393309 NR Description: cycloartenol-C24-methyltransferase [Oryza sativa
  misc_feature (1)..(246): Homolog of NCBI NO: 30103006 NR Description: putative endosperm C-24 sterol methyltransferase
  misc_feature (1)..(243): Homolog of NCBI NO: 3560531 NR Description: cycloartenol-C24-methyltransferase [Oryza sativa
  misc_feature (1)..(243): Homolog of NCBI NO: 3560474 NR Description: S-adenosyl-methionine-sterol-C- methyltransferase
  misc_feature (1)..(243): Homolog of NCBI NO: 7489677 NR Description: probable sterol 24-C-methyltransferase (EC
  misc_feature (1)..(243): Homolog of NCBI NO: 1872473 NR Description: delta-24-sterol methyltransferase [Triticum
  misc_feature (1)..(240): Homolog of NCBI NO: 7443720 NR Description: probable sterol 24-C-methyltransferase (EC
  misc_feature (1)..(243): Homolog of NCBI NO: 7443719 NR Description: sterol 24-C-methyltransferase (EC 2.1.1.41) -
MKVLDVGCGIGGPLIEIARFSSTSITGLNNNDYHISRGKELIFSAGLSEQCCFLKGDFMDMPISDNTFDAAYAIQTTCHAPDAQGVYSEVYRVLKPGQYFALDEWCLTDRFDPNNAKHLAIKAEIELGDGLPDIRTTRQCVQAMKDAGFEVVFAKDLAQVFPCPWYRVMDPTYFSWAHFQCTRPGRIVTRAIVNTLEFLRIAPAGSMGAYNVLMSASDGLLKGGREGIFTATFFVLGRKPLKEVDIVSLSRKLI

SEQ ID NO: 12516 - DNA, 729 bp, Zea mays subsp. mays
  misc_feature (1)..(729): Ceres Seq. ID no. 12454766
  misc_feature: MA Experiment ID: 108504 Result: Down-regulated in Transcription
  misc_feature: MA Experiment 108504 PARAMETER Experiment Name: Zm_Drought_P Parameter: Age (day) Value: 8
  misc_feature: MA Experiment 108504 PARAMETER Experiment Name: Zm_Drought_P Parameter: Organism Value: Zea mays
  misc_feature: MA Experiment 108504 PARAMETER Experiment Name: Zm_Drought_P Parameter: Plant Line Value: 35A19
  misc_feature: MA Experiment 108504 PARAMETER Experiment Name: Zm_Drought_P Parameter: Timepoint (hr) Value: 12
  misc_feature: MA Experiment 108504 PARAMETER Experiment Name: Zm_Drought_P Parameter: Tissue Value: Aerial
  misc_feature: MA Experiment 108504 PARAMETER Experiment Name: Zm_Drought_P Parameter: Treatment Value: Drought vs. No Drought
  misc_feature: MA Experiment ID: 108528 Result: Up-regulated in Transcription
  misc_feature: MA Experiment 108528 PARAMETER Experiment Name: Zm_Imbibed_Seeds_P Parameter: Age (day) Value: 5 vs. 2
  misc_feature: MA Experiment 108528 PARAMETER Experiment Name: Zm_Imbibed_Seeds_P Parameter: Organism Value: Zea mays
  misc_feature: MA Experiment 108528 PARAMETER Experiment Name: Zm_Imbibed_Seeds_P Parameter: Plant Line Value: 35A19
  misc_feature: MA Experiment 108528 PARAMETER Experiment Name: Zm_Imbibed_Seeds_P Parameter: Tissue Value: Aerial vs. Embryo
  misc_feature: MA Experiment ID: 108529 Result: Up-regulated in Transcription
  misc_feature: MA Experiment 108529 PARAMETER Experiment Name: Zm_Imbibed_Seeds_P Parameter: Age (day) Value: 5 vs. 2
  misc_feature: MA Experiment 108529 PARAMETER Experiment Name: Zm_Imbibed_Seeds_P Parameter: Organism Value: Zea mays
  misc_feature: MA Experiment 108529 PARAMETER Experiment Name: Zm_Imbibed_Seeds_P Parameter: Plant Line Value: 35A19
  misc_feature: MA Experiment 108529 PARAMETER Experiment Name: Zm_Imbibed_Seeds_P Parameter: Tissue Value: Roots vs. Embryo
  misc_feature: MA Experiment ID: 108530 Result: Up-regulated in Transcription
  misc_feature: MA Experiment 108530 PARAMETER Experiment Name: Zm_Imbibed_Seeds_P Parameter: Age (day) Value: 6 vs. 2
  misc_feature: MA Experiment 108530 PARAMETER Experiment Name: Zm_Imbibed_Seeds_P Parameter: Organism Value: Zea mays
  misc_feature: MA Experiment 108530 PARAMETER Experiment Name: Zm_Imbibed_Seeds_P Parameter: Plant Line Value: 35A19
  misc_feature: MA Experiment 108530 PARAMETER Experiment Name: Zm_Imbibed_Seeds_P Parameter: Tissue Value: Aerial vs. Embryo
  misc_feature: MA Experiment ID: 108535 Result: Down-regulated in Transcription
  misc_feature: MA Experiment 108535 PARAMETER Experiment Name: Zm_Meristem_P Parameter: Age (day) Value: 8
  misc_feature: MA Experiment 108535 PARAMETER Experiment Name: Zm_Meristem_P Parameter: Organism Value: Zea mays
  misc_feature: MA Experiment 108535 PARAMETER Experiment Name: Zm_Meristem_P Parameter: Plant Line Value: 35A19
  misc_feature: MA Experiment 108535 PARAMETER Experiment Name: Zm_Meristem_P Parameter: Tissue Value: Root Meristem vs. Above Root Meristem
  misc_feature: MA Experiment ID: 108543 Result: Up-regulated in Transcription
  misc_feature: MA Experiment ID: 108544 Result: Up-regulated in Transcription
  misc_feature: MA Experiment ID: 108546 Result: Up-regulated in Transcription
  misc_feature: MA Experiment 108546 PARAMETER Experiment Name: Zm_Imbibed_Seeds_P Parameter: Age (day) Value: 3 vs. 2
  misc_feature: MA Experiment 108546 PARAMETER Experiment Name: Zm_Imbibed_Seeds_P Parameter: Organism Value: Zea mays
  misc_feature: MA Experiment 108546 PARAMETER Experiment Name: Zm_Imbibed_Seeds_P Parameter: Plant Line Value: 35A19
  misc_feature: MA Experiment 108546 PARAMETER Experiment Name: Zm_Imbibed_Seeds_P Parameter: Tissue Value: Roots vs. Embryo
  misc_feature: MA Experiment ID: 108547 Result: Up-regulated in Transcription
  misc_feature: MA Experiment 108547 PARAMETER Experiment Name: Zm_Imbibed_Seeds_P Parameter: Age (day) Value: 4 vs. 2
  misc_feature: MA Experiment 108547 PARAMETER Experiment Name: Zm_Imbibed_Seeds_P Parameter: Organism Value: Zea mays
  misc_feature: MA Experiment 108547 PARAMETER Experiment Name: Zm_Imbibed_Seeds_P Parameter: Plant Line Value: 35A19
  misc_feature: MA Experiment 108547 PARAMETER Experiment Name: Zm_Imbibed_Seeds_P Parameter: Tissue Value: Aerial vs. Embryo
  misc_feature: MA Experiment ID: 108556 Result: Down-regulated in Transcription
  misc_feature: MA Experiment 108556 PARAMETER Experiment Name: Zm_Drought_P Parameter: Age (day) Value: 9
  misc_feature: MA Experiment 108556 PARAMETER Experiment Name: Zm_Drought_P Parameter: Organism Value: Zea mays
  misc_feature: MA Experiment 108556 PARAMETER Experiment Name: Zm_Drought_P Parameter: Plant Line Value: 35A19
  misc_feature: MA Experiment 108556 PARAMETER Experiment Name: Zm_Drought_P Parameter: Timepoint (hr) Value: 24
  misc_feature: MA Experiment 108556 PARAMETER Experiment Name: Zm_Drought_P Parameter: Tissue Value: Aerial
  misc_feature: MA Experiment 108556 PARAMETER Experiment Name: Zm_Drought_P Parameter: Treatment Value: Drought vs. No Drought
  misc_feature: MA Experiment ID: 108597 Result: Down-regulated in Transcription
  misc_feature: MA Experiment 108597 PARAMETER Experiment Name: Zm_100uM_ABA_P Parameter: Age (day) Value: 9
  misc_feature: MA Experiment 108597 PARAMETER Experiment Name: Zm_100uM_ABA_P Parameter: Organism Value: Zea mays
  misc_feature: MA Experiment 108597 PARAMETER Experiment Name: Zm_100uM_ABA_P Parameter: Plant Line Value: 35A19
  misc_feature: MA Experiment 108597 PARAMETER Experiment Name: Zm_100uM_ABA_P Parameter: Timepoint (hr) Value: 24
  misc_feature: MA Experiment 108597 PARAMETER Experiment Name: Zm_100uM_ABA_P Parameter: Tissue Value: Aerial
  misc_feature: MA Experiment 108597 PARAMETER Experiment Name: Zm_100uM_ABA_P Parameter: Treatment Value: 100uM ABA vs. No Treatment
  misc_feature: MA Experiment ID: 108687 Result: Down-regulated in Transcription
  misc_feature: MA Experiment 108687 PARAMETER Experiment Name: Zm_Embryos-Flowers__P Parameter: Tissue Value: Embryo vs. Aerial+
  misc_feature: MA Experiment ID: 20000477 Result: Down-regulated in Transcription
  misc_feature: MA Experiment 20000477 PARAMETER Experiment Name: Zm_5mM_SA_P Parameter: Age (day) Value: 10
  misc_feature: MA Experiment 20000477 PARAMETER Experiment Name: Zm_5mM_SA_P Parameter: Organism Value: Zea mays
  misc_feature: MA Experiment 20000477 PARAMETER Experiment Name: Zm_5mM_SA_P Parameter: Plant Line Value: 35A19
  misc_feature: MA Experiment 20000477 PARAMETER Experiment Name: Zm_5mM_SA_P Parameter: Timepoint (hr) Value: 48
  misc_feature: MA Experiment 20000477 PARAMETER Experiment Name: Zm_5mM_SA_P Parameter: Tissue Value: Aerial
  misc_feature: MA Experiment 20000477 PARAMETER Experiment Name: Zm_5mM_SA_P Parameter: Treatment Value: 5mM SA vs. No Treatment
  misc_feature: MA Experiment ID: 20000479 Result: Down-regulated in Transcription
  misc_feature: MA Experiment 20000479 PARAMETER Experiment Name: Zm_Drought_P Parameter: Age (day) Value: 10
  misc_feature: MA Experiment 20000479 PARAMETER Experiment Name: Zm_Drought_P Parameter: Organism Value: Zea mays
  misc_feature: MA Experiment 20000479 PARAMETER Experiment Name: Zm_Drought_P Parameter: Plant Line Value: 35A19
  misc_feature: MA Experiment 20000479 PARAMETER Experiment Name: Zm_Drought_P Parameter: Timepoint (hr) Value: 48
  misc_feature: MA Experiment 20000479 PARAMETER Experiment Name: Zm_Drought_P Parameter: Tissue Value: Aerial
  misc_feature: MA Experiment 20000479 PARAMETER Experiment Name: Zm_Drought_P Parameter: Treatment Value: Drought vs. No Drought
  misc_feature: MA Experiment ID: 20000535 Result: Down-regulated in Transcription
  misc_feature: MA Experiment 20000535 PARAMETER Experiment Name: Zm_Hybrid_Seed_Dev_P Parameter: DAP Value: 30 vs. 12
  misc_feature: MA Experiment 20000535 PARAMETER Experiment Name: Zm_Hybrid_Seed_Dev_P Parameter: Organism Value: Zea mays
  misc_feature: MA Experiment 20000535 PARAMETER Experiment Name: Zm_Hybrid_Seed_Dev_P Parameter: Plant Line Value: 35A19
  misc_feature: MA Experiment 20000535 PARAMETER Experiment Name: Zm_Hybrid_Seed_Dev_P Parameter: Tissue Value: Embryo vs. Unfert Floret
aatctccctcctcctctccgccctcgccccctcgccctcgcccgcctgtttaaacctgactgtctataacttaccgccggtccgcacccgcccaccgtccctgtccccttccccgtctaagcactcggatcctctgccgccgcgatgagctactacggccagcagcagccgcccgtcagcgcgccgccggaagggtttatcccgggaaggacgcgtacccgccgccgggctacccgcccgcgggatatcctccgccggcgcagggctacccaccgcagggctacccgccgcagggctaccctccgcagcaggggtatccgcagcagggatacccgccgcagtactcgcagccgccgccgccgccccgccagcagcagagcagcgggccctctttcatggagggatgcttggccgccctttgttgctgctgcctattggaagcctgcttctgagatctaagctgcgcacaacttgttctagaaacaccacttcaatttgcacggttgatataactggggattggcttgttagcgaagaaccgaagataccatgggttcttatgcaaatcacagttctcctagttctttctatcgttctgattgtccgttgcgatgtttggtgtacctagtagtatcttaattatataccttacactgtttacctatccaatggaattcttggtctagctaacattgtgagattatgtcacttttctcgttctctgtagtg

SEQ ID NO: 12517 - protein, 104 aa, Zea mays subsp. mays
  peptide (1)..(104): Ceres Seq. ID no. 12454767
  misc_feature (20)..(97): Pfam Name: TT viral orf 1 Pfam Description: TT viral orf 1
MSYYGQQQPPVSAPPEGFIPGRTRTRRRATRPRDILRRRRATHRRATRRRATLRSRGIRSRDTRRSTRSRRRRPASSRAAGPLSWRDAWPPFVAAAYWKPASEI

SEQ ID NO: 12518 - protein, 74 aa, Zea mays subsp. mays
  peptide (1)..(74): Ceres Seq. ID no. 12454768
MLGRPLLLLPIGSLLLRSKLRTTCSRNTTSICTVDITGDWLVSEEPKIPWVLMQITVLLVLSIVLIVRCDVWCT

SEQ ID NO: 12519 - DNA, 1228 bp, Zea mays subsp. mays
  misc_feature (1)..(1228): Ceres Seq. ID no. 12353510
  misc_feature: MA Experiment ID: 108535 Result: Down-regulated in Transcription
  misc_feature: MA Experiment 108535 PARAMETER Experiment Name: Zm_Meristem_P Parameter: Age (day) Value: 8
  misc_feature: MA Experiment 108535 PARAMETER Experiment Name: Zm_Meristem_P Parameter: Organism Value: Zea mays
  misc_feature: MA Experiment 108535 PARAMETER Experiment Name: Zm_Meristem_P Parameter: Plant Line Value: 35A19
  misc_feature: MA Experiment 108535 PARAMETER Experiment Name: Zm_Meristem_P Parameter: Tissue Value: Root Meristem vs. Above Root Meristem
gagacttgagacagagacgcaggagcgcggaggaaaaggaggcccagaccaccgacggggaaaaaaacatcacgaacaccgttctccatagcgggagtagtgaggaacgaaagagagggggcggcctagggcttcgattccgcagccatggacgccgctgacgtgtggggccgctcatcgtcctcgtcttcttcgtccgccgccgccgcgaggcgcctgcaggcgcgctacgatctgtacatggggatcgacgacgcggacgccggcttggacgaggtgacggagccgcgcggcggggcggagtcctacaactgccccttctgcggcgaggacttcgactttgtcggcctctgctgtcacatcgacgacgagcatgccgttgaggctaagagcggggcatgccccatctgtgctacaagggtcggaatggacttgataggacatttgactatgcaacatggaagttatttcaagatgcaacgcaggcgcagagtccgaaaagtatcttctgggtcccattctttattatctttgttgagaaaggacttgagaaatggcagtttgcagtcatttctcggtggatcatcctatgtatccaatcctcctgctgcagcaccagatccatttgtgtcatctttaatttgtactttgcctgtggctgaaccatccaaagatttacattccgactcatctgacaataactttttgctaaataaattcccagatgaaaagcctgtagagagggctgaaccatcattgtcggagaaagatcagaaggaaagggttcaaaggagcaaattcgtccgagggcttgtgctctcgacaatatttgatgatgataacttgtaaagggggtcatcaaacttgataacagcatcacaatagttaaggaacacgaagagaatcatcagactctgctgctgttgtcgtgatcacacaagaggcccatctaagttcgtatatgtacggatggaatatttatgcatgtatgtatttatgtttatctccctgcatttacccttagtgcaacagggtggtaggggacggttgtagtattccaaatttatgtatcaaataaatgaggacactgtccttggggtgcaattgtgtatataatataataatagggagctactcgccatgatttaggatattttatttaactgttgtaataatatgcagtgttttgtatgatgaccccatttttttatatataactgttcatttt

SEQ ID NO: 12520 - protein, 233 aa, Zea mays subsp. mays
  peptide (1)..(233): Ceres Seq. ID no. 12353511
  misc_feature (14)..(227): Pfam Name: Drought induced 19 protein (Di19) Pfam Description: Drought induced 19 protein (Di19)
  misc_feature (1)..(230): Homolog of NCBI NO: 25992529 NR Description: fiber protein Fb2 [Gossypium barbadense]
  misc_feature (7)..(231): Homolog of NCBI NO: 18377875 NR Description: AT3g06760/F3E22_10 [Arabidopsis thaliana]
  misc_feature (10)..(230): Homolog of NCBI NO: 28393233 NR Description: unknown protein [Arabidopsis thaliana]
  misc_feature (16)..(230): Homolog of NCBI NO: 13937216 NR Description: AT5g49230/K21P3_11 [Arabidopsis thaliana]
  misc_feature (24)..(230): Homolog of NCBI NO: 15028023 NR Description: unknown protein [Arabidopsis thaliana]
  misc_feature (16)..(230): Homolog of NCBI NO: 15239827 NR Description: drought-induced protein Di19-like protein; id: At5g49230.1, supported by cDNA: gi_13937215 [Arabidopsis
  misc_feature (10)..(230): Homolog of NCBI NO: 15240426 NR Description: drought-induced protein - like; protein id:
  misc_feature (24)..(230): Homolog of NCBI NO: 1076316 NR Description: drought-induced protein Di19 - Arabidopsis
  misc_feature (7)..(231): Homolog of NCBI NO: 15230782 NR Description: unknown protein; protein id: At3g06760.1 thaliana] >gi|7549637|gb|AAF63822.1| unknown protein [Arabidopsis
  misc_feature (24)..(230): Homolog of NCBI NO: 30696095 NR Description: drought-induced protein -related [Arabidopsis
MDAADVWGRSSSSSSSSAAAARRLQARYDLYMGIDDADAGLDEVTEPRGGAESYNCPFCGEDFDFVGLCCHIDDEHAVEAKSGACPICATRVGMDLIGHLTMQHGSYFKMQRRRRVRKVSSGSHSLLSLLRKDLRNGSLQSFLGGSSYVSNPPAAAPDPFVSSLICTLPVAEPSKDLHSDSSDNNFLLNKFPDEKPVERAEPSLSEKDQKERVQRSKFVRGLVLSTIFDDDNL

SEQ ID NO: 12521 - protein, 202 aa, Zea mays subsp. mays
  peptide (1)..(202): Ceres Seq. ID no. 12353512
  misc_feature (1)..(196): Pfam Name: Drought induced 19 protein (Di19) Pfam Description: Drought induced 19 protein (Di19)
  misc_feature (1)..(199): Homolog of NCBI NO: 25992529 NR Description: fiber protein Fb2 [Gossypium barbadense]
  misc_feature (1)..(200): Homolog of NCBI NO: 18377875 NR Description: AT3g06760/F3E22_10 [Arabidopsis thaliana]
  misc_feature (1)..(199): Homolog of NCBI NO: 28393233 NR Description: unknown protein [Arabidopsis thaliana]
  misc_feature (1)..(199): Homolog of NCBI NO: 13937216 NR Description: AT5g49230/K21P3_11 [Arabidopsis thaliana]
  misc_feature (1)..(199): Homolog of NCBI NO: 15028023 NR Description: unknown protein [Arabidopsis thaliana]
  misc_feature (1)..(199): Homolog of NCBI NO: 15239827 NR Description: drought-induced protein Di19-like protein; id: At5g49230.1, supported by cDNA: gi_13937215 [Arabidopsis
  misc_feature (1)..(199): Homolog of NCBI NO: 15240426 NR Description: drought-induced protein - like; protein id:
  misc_feature (1)..(199): Homolog of NCBI NO: 1076316 NR Description: drought-induced protein Di19 - Arabidopsis
  misc_feature (1)..(200): Homolog of NCBI NO: 15230782 NR Description: unknown protein; protein id: At3g06760.1 thaliana] >gi|7549637|gb|AAF63822.1| unknown protein [Arabidopsis
  misc_feature (1)..(199): Homolog of NCBI NO: 30696095 NR Description: drought-induced protein -related [Arabidopsis
MGIDDADAGLDEVTEPRGGAESYNCPFCGEDFDFVGLCCHIDDEHAVEAKSGACPICATRVGMDLIGHLTMQHGSYFKMQRRRRVRKVSSGSHSLLSLLRKDLRNGSLQSFLGGSSYVSNPPAAAPDPFVSSLICTLPVAEPSKDLHSDSSDNNFLLNKFPDEKPVERAEPSLSEKDQKERVQRSKFVRGLVLSTIFDDDNL

SEQ ID NO: 12522 - protein, 140 aa, Zea mays subsp. mays
  peptide (1)..(140): Ceres Seq. ID no. 12353513
  misc_feature (1)..(134): Pfam Name: Drought induced 19 protein (Di19) Pfam Description: Drought induced 19 protein (Di19)
  misc_feature (1)..(137): Homolog of NCBI NO: 25992529 NR Description: fiber protein Fb2 [Gossypium barbadense]
  misc_feature (1)..(138): Homolog of NCBI NO: 18377875 NR Description: AT3g06760/F3E22_10 [Arabidopsis thaliana]
  misc_feature (1)..(137): Homolog of NCBI NO: 28393233 NR Description: unknown protein [Arabidopsis thaliana]
  misc_feature (1)..(137): Homolog of NCBI NO: 13937216 NR Description: AT5g49230/K21P3_11 [Arabidopsis thaliana]
  misc_feature (1)..(137): Homolog of NCBI NO: 15028023 NR Description: unknown protein [Arabidopsis thaliana]
  misc_feature (1)..(137): Homolog of NCBI NO: 15239827 NR Description: drought-induced protein Di19-like protein; id: At5g49230.1, supported by cDNA: gi_13937215 [Arabidopsis
  misc_feature (1)..(137): Homolog of NCBI NO: 15240426 NR Description: drought-induced protein - like; protein id:
  misc_feature (1)..(137): Homolog of NCBI NO: 1076316 NR Description: drought-induced protein Di19 - Arabidopsis
  misc_feature (1)..(138): Homolog of NCBI NO: 15230782 NR Description: unknown protein; protein id: At3g06760.1 thaliana] >gi|7549637|gb|AAF63822.1| unknown protein [Arabidopsis
  misc_feature (1)..(137): Homolog of NCBI NO: 30696095 NR Description: drought-induced protein -related [Arabidopsis
MDLIGHLTMQHGSYFKMQRRRRVRKVSSGSHSLLSLLRKDLRNGSLQSFLGGSSYVSNPPAAAPDPFVSSLICTLPVAEPSKDLHSDSSDNNFLLNKFPDEKPVERAEPSLSEKDQKERVQRSKFVRGLVLSTIFDDDNL

SEQ ID NO: 12523 - DNA, 1292 bp, Zea mays subsp. mays
  misc_feature (1)..(1292): Ceres Seq. ID no. 12408296
  misc_feature: MA Experiment ID: 108515 Result: Up-regulated in Transcription
  misc_feature: MA Experiment 108515 PARAMETER Experiment Name: Zm_2mM_SA_P Parameter: Age (day) Value: 8
  misc_feature: MA Experiment 108515 PARAMETER Experiment Name: Zm_2mM_SA_P Parameter: Organism Value: Zea mays
  misc_feature: MA Experiment 108515 PARAMETER Experiment Name: Zm_2mM_SA_P Parameter: Plant Line Value: 35A19
  misc_feature: MA Experiment 108515 PARAMETER Experiment Name: Zm_2mM_SA_P Parameter: Timepoint (hr) Value: 12
  misc_feature: MA Experiment 108515 PARAMETER Experiment Name: Zm_2mM_SA_P Parameter: Tissue Value: Aerial
  misc_feature: MA Experiment 108515 PARAMETER Experiment Name: Zm_2mM_SA_P Parameter: Treatment Value: 2mM SA vs. No Treatment
  misc_feature: MA Experiment ID: 108522 Result: Up-regulated in Transcription
  misc_feature: MA Experiment 108522 PARAMETER Experiment Name: Zm_42deg_Heat_P Parameter: Age (day) Value: 8
  misc_feature: MA Experiment 108522 PARAMETER Experiment Name: Zm_42deg_Heat_P Parameter: Organism Value: Zea mays
  misc_feature: MA Experiment 108522 PARAMETER Experiment Name: Zm_42deg_Heat_P Parameter: Plant Line Value: 35A19
  misc_feature: MA Experiment 108522 PARAMETER Experiment Name: Zm_42deg_Heat_P Parameter: Temperature (deg C) Value: 42 vs. 22
  misc_feature: MA Experiment 108522 PARAMETER Experiment Name: Zm_42deg_Heat_P Parameter: Timepoint (hr) Value: 1
  misc_feature: MA Experiment 108522 PARAMETER Experiment Name: Zm_42deg_Heat_P Parameter: Tissue Value: Aerial
  misc_feature: MA Experiment ID: 108527 Result: Up-regulated in Transcription
  misc_feature: MA Experiment 108527 PARAMETER Experiment Name: Zm_5mM_NO_P Parameter: Age (day) Value: 8
  misc_feature: MA Experiment 108527 PARAMETER Experiment Name: Zm_5mM_NO_P Parameter: Organism Value: Zea mays
  misc_feature: MA Experiment 108527 PARAMETER Experiment Name: Zm_5mM_NO_P Parameter: Plant Line Value: 35A19
  misc_feature: MA Experiment 108527 PARAMETER Experiment Name: Zm_5mM_NO_P Parameter: Timepoint (hr) Value: 6
  misc_feature: MA Experiment 108527 PARAMETER Experiment Name: Zm_5mM_NO_P Parameter: Tissue Value: Aerial
  misc_feature: MA Experiment 108527 PARAMETER Experiment Name: Zm_5mM_NO_P Parameter: Treatment Value: 5mM NO vs. No Treatment
  misc_feature: MA Experiment ID: 108535 Result: Down-regulated in Transcription
  misc_feature: MA Experiment 108535 PARAMETER Experiment Name: Zm_Meristem_P Parameter: Age (day) Value: 8
  misc_feature: MA Experiment 108535 PARAMETER Experiment Name: Zm_Meristem_P Parameter: Organism Value: Zea mays
  misc_feature: MA Experiment 108535 PARAMETER Experiment Name: Zm_Meristem_P Parameter: Plant Line Value: 35A19
  misc_feature: MA Experiment 108535 PARAMETER Experiment Name: Zm_Meristem_P Parameter: Tissue Value: Root Meristem vs. Above Root Meristem
  misc_feature: MA Experiment ID: 108542 Result: Up-regulated in Transcription
  misc_feature: MA Experiment 108542 PARAMETER Experiment Name: Zm_150mM_NaCl_P Parameter: Age (day) Value: 8
  misc_feature: MA Experiment 108542 PARAMETER Experiment Name: Zm_150mM_NaCl_P Parameter: Organism Value: Zea mays
  misc_feature: MA Experiment 108542 PARAMETER Experiment Name: Zm_150mM_NaCl_P Parameter: Plant Line Value: 35A19
  misc_feature: MA Experiment 108542 PARAMETER Experiment Name: Zm_150mM_NaCl_P Parameter: Timepoint (hr) Value: 6
  misc_feature: MA Experiment 108542 PARAMETER Experiment Name: Zm_150mM_NaCl_P Parameter: Tissue Value: Aerial
  misc_feature: MA Experiment 108542 PARAMETER Experiment Name: Zm_150mM_NaCl_P Parameter: Treatment Value: 150mM NaCl vs. No Treatment
  misc_feature: MA Experiment ID: 108559 Result: Up-regulated in Transcription
  misc_feature: MA Experiment 108559 PARAMETER Experiment Name: Zm_5mM_NO_P Parameter: Age (day) Value: 8
  misc_feature: MA Experiment 108559 PARAMETER Experiment Name: Zm_5mM_NO_P Parameter: Organism Value: Zea mays
  misc_feature: MA Experiment 108559 PARAMETER Experiment Name: Zm_5mM_NO_P Parameter: Plant Line Value: 35A19
  misc_feature: MA Experiment 108559 PARAMETER Experiment Name: Zm_5mM_NO_P Parameter: Timepoint (hr) Value: 12
  misc_feature: MA Experiment 108559 PARAMETER Experiment Name: Zm_5mM_NO_P Parameter: Tissue Value: Aerial
  misc_feature: MA Experiment 108559 PARAMETER Experiment Name: Zm_5mM_NO_P Parameter: Treatment Value: 5mM NO vs. No Treatment
  misc_feature: MA Experiment ID: 20000477 Result: Up-regulated in Transcription
  misc_feature: MA Experiment 20000477 PARAMETER Experiment Name: Zm_5mM_SA_P Parameter: Age (day) Value: 10
  misc_feature: MA Experiment 20000477 PARAMETER Experiment Name: Zm_5mM_SA_P Parameter: Organism Value: Zea mays
  misc_feature: MA Experiment 20000477 PARAMETER Experiment Name: Zm_5mM_SA_P Parameter: Plant Line Value: 35A19
  misc_feature: MA Experiment 20000477 PARAMETER Experiment Name: Zm_5mM_SA_P Parameter: Timepoint (hr) Value: 48
  misc_feature: MA Experiment 20000477 PARAMETER Experiment Name: Zm_5mM_SA_P Parameter: Tissue Value: Aerial
  misc_feature: MA Experiment 20000477 PARAMETER Experiment Name: Zm_5mM_SA_P Parameter: Treatment Value: 5mM SA vs. No Treatment
  misc_feature: MA Experiment ID: 20000478 Result: Up-regulated in Transcription
  misc_feature: MA Experiment 20000478 PARAMETER Experiment Name: Zm_5mM_SA_P Parameter: Age (day) Value: 11
  misc_feature: MA Experiment 20000478 PARAMETER Experiment Name: Zm_5mM_SA_P Parameter: Organism Value: Zea mays
  misc_feature: MA Experiment 20000478 PARAMETER Experiment Name: Zm_5mM_SA_P Parameter: Plant Line Value: 35A19
  misc_feature: MA Experiment 20000478 PARAMETER Experiment Name: Zm_5mM_SA_P Parameter: Timepoint (hr) Value: 72
  misc_feature: MA Experiment 20000478 PARAMETER Experiment Name: Zm_5mM_SA_P Parameter: Tissue Value: Aerial
  misc_feature: MA Experiment 20000478 PARAMETER Experiment Name: Zm_5mM_SA_P Parameter: Treatment Value: 5mM SA vs. No Treatment
  misc_feature: MA Experiment ID: 20000480 Result: Up-regulated in Transcription
  misc_feature: MA Experiment 20000480 PARAMETER Experiment Name: Zm_Drought_P Parameter: Age (day) Value: 11
  misc_feature: MA Experiment 20000480 PARAMETER Experiment Name: Zm_Drought_P Parameter: Organism Value: Zea mays
  misc_feature: MA Experiment 20000480 PARAMETER Experiment Name: Zm_Drought_P Parameter: Plant Line Value: 35A19
  misc_feature: MA Experiment 20000480 PARAMETER Experiment Name: Zm_Drought_P Parameter: Timepoint (hr) Value: 72
  misc_feature: MA Experiment 20000480 PARAMETER Experiment Name: Zm_Drought_P Parameter: Tissue Value: Aerial
  misc_feature: MA Experiment 20000480 PARAMETER Experiment Name: Zm_Drought_P Parameter: Treatment Value: Drought vs. No Drought
  misc_feature: MA Experiment ID: 20000488 Result: Up-regulated in Transcription
  misc_feature: MA Experiment 20000488 PARAMETER Experiment Name: Zm_50mM_NH4NO3_L_to_H_P Parameter: Organism Value: Zea mays
  misc_feature: MA Experiment 20000488 PARAMETER Experiment Name: Zm_50mM_NH4NO3_L_to_H_P Parameter: Timepoint (hr) Value: 8
  misc_feature: MA Experiment 20000488 PARAMETER Experiment Name: Zm_50mM_NH4NO3_L_to_H_P Parameter: Tissue Value: Leaves
  misc_feature: MA Experiment 20000488 PARAMETER Experiment Name: Zm_50mM_NH4NO3_L_to_H_P Parameter: Treatment Value: 50mM NH4NO3 vs. 100mM Mannitol
  misc_feature: MA Experiment ID: 20000492 Result: Down-regulated in Transcription
  misc_feature: MA Experiment 20000492 PARAMETER Experiment Name: Zm_Hybrid_Seed_Dev_P Parameter: DAP Value: 12
  misc_feature: MA Experiment 20000492 PARAMETER Experiment Name: Zm_Hybrid_Seed_Dev_P Parameter: Organism Value: Zea mays
  misc_feature: MA Experiment 20000492 PARAMETER Experiment Name: Zm_Hybrid_Seed_Dev_P Parameter: Plant Line Value: 35A19
  misc_feature: MA Experiment 20000492 PARAMETER Experiment Name: Zm_Hybrid_Seed_Dev_P Parameter: Tissue Value: Fert Kernel vs. Unfert Floret
  misc_feature: MA Experiment ID: 20000533 Result: Up-regulated in Transcription
  misc_feature: MA Experiment 20000533 PARAMETER Experiment Name: Zm_0.001percent_MeJA_P Parameter: Age (day) Value: 11
  misc_feature: MA Experiment 20000533 PARAMETER Experiment Name: Zm_0.001percent_MeJA_P Parameter: Organism Value: Zea mays
  misc_feature: MA Experiment 20000533 PARAMETER Experiment Name: Zm_0.001percent_MeJA_P Parameter: Plant Line Value: 35A19
  misc_feature: MA Experiment 20000533 PARAMETER Experiment Name: Zm_0.001percent_MeJA_P Parameter: Timepoint (hr) Value: 72
  misc_feature: MA Experiment 20000533 PARAMETER Experiment Name: Zm_0.001percent_MeJA_P Parameter: Tissue Value: Aerial
  misc_feature: MA Experiment 20000533 PARAMETER Experiment Name: Zm_0.001percent_MeJA_P Parameter: Treatment Value: 0.001percent MeJA vs. No Treatment
  misc_feature: MA Experiment ID: 20000535 Result: Down-regulated in Transcription
  misc_feature: MA Experiment 20000535 PARAMETER Experiment Name: Zm_Hybrid_Seed_Dev_P Parameter: DAP Value: 30 vs. 12
  misc_feature: MA Experiment 20000535 PARAMETER Experiment Name: Zm_Hybrid_Seed_Dev_P Parameter: Organism Value: Zea mays
  misc_feature: MA Experiment 20000535 PARAMETER Experiment Name: Zm_Hybrid_Seed_Dev_P Parameter: Plant Line Value: 35A19
  misc_feature: MA Experiment 20000535 PARAMETER Experiment Name: Zm_Hybrid_Seed_Dev_P Parameter: Tissue Value: Embryo vs. Unfert Floret
  misc_feature: MA Experiment ID: 20000626 Result: Up-regulated in Transcription
  misc_feature: MA Experiment 20000626 PARAMETER Experiment Name: Zm_Herbicide-Treatments_P Parameter: Timepoint (hr) Value: 12
  misc_feature: MA Experiment 20000626 PARAMETER Experiment Name: Zm_Herbicide-Treatments_P Parameter: Tissue Value: Aerial
  misc_feature: MA Experiment 20000626 PARAMETER Experiment Name: Zm_Herbicide-Treatments_P Parameter: Treatment Value: Roundup vs. No Treatment
ggttcacacatggcttccttgttgcgctggaaggacaagtacgtgaaggagaggctgcagggcctgtcctgctcctcggcggccgccacctccgtcgtcccctccaatggccgcgccatcgaccggcactctccgcacctccgggaccctcaccggcgtctcccgccaccggtgcccaagccacccagacccagctctagtttcagtactaccaaagattcgtcctcctcctcctacaagcagcggcagcagatttgccacttcgacgtcgatggcaaagacaaaaggaagaataagaagaagaagagcacagcagcagcagccgctggtagtggtagctcgccgtcggagcataggagaaacggcaaggagaaggcgctgcagctgcagcaggtgagccccgcgagctcgtcccggttcctgctcaactcctccaggctcatgatgcagtccgacgacgaaaccactgccgtcgactccctgccgccacttccgtccccgcggcggccctccttcgttgacgccgccgccgaggacgacacagacacattccccagcagccacggcgatgccgcgtcgccggctgttccgtcaagaaggcctcagctcgtggcgccggcgccgccactggaattattcgctgagccgtctgcatcaggcgcaggctcctcctcctcttcgtcgtcagagataactggaggccatgtcgtcgccgccgctgacaacactgtcgtggtgagatcatgttccacgagaacagggcagcaccaggtagtggttttgagggtatctctgcactgcaaggggtgcgctggcaaggtgaagaagcacctctccaagatggaaggcgttacttctttcgacatcgacatcgcgacgaagaaggtgacggtggtgggagatgtgacgccgctaggcgtcctcaacagcatctccaaggtcaagagcgcccagttctggcctgactctcgctcctctttctctacgccaccgcgtgcctctgcctccttctgagctgcccactagcttcgtcacaaacttaatggttgggacgccaacacggtggtctttcaaatatatagttccttttttctccatattatcgatcgaggaaaatatatatatttgcacaatccaatcaaaagttcctctaccacaaaagatgcattatacaaaatttaactttaactatatatataggcgtctttttatgttttgaagctcgttgtaataagattatgaaagtataatgtatattttcaattttattaaatacaaaaatagggggaccc

SEQ ID NO: 12524 - protein, 337 aa, Zea mays subsp. mays
  peptide (1)..(337): Ceres Seq. ID no. 12408297
  misc_feature (26)..(322): Homolog of NCBI NO: 11358213 NR Description: hypothetical protein T22P11.190 - Arabidopsis >gi|7413649|emb|CAB85997.1| putative protein [Arabidopsis
  misc_feature (26)..(322): Homolog of NCBI NO: 18413973 NR Description: putative protein; protein id: At5g02600.1, by cDNA: 18843. [Arabidopsis thaliana] unknown [Arabidopsis thaliana] >gi|26449554|dbj|BAC41903.1|
  misc_feature (200)..(337): Homolog of NCBI NO: 34906086 NR Description: P0459B04.21 [Oryza sativa (japonica
  misc_feature (255)..(320): Homolog of NCBI NO: 29124116 NR Description: unknown protein [Oryza sativa (japonica
  misc_feature (210)..(331): Homolog of NCBI NO: 30683975 NR Description: copper-binding protein family [Arabidopsis
  misc_feature (192)..(334): Homolog of NCBI NO: 22331770 NR Description: putative protein; protein id: At3g53530.1, by cDNA: gi_19424069, supported by cDNA: gi_21281174 [Arabidopsis >gi|19424070|gb|AAL87355.1| unknown protein [Arabidopsis
  misc_feature (212)..(320): Homolog of NCBI NO: 23092567 NR Description: hypothetical protein [Arabidopsis thaliana]
  misc_feature (212)..(320): Homolog of NCBI NO: 30687119 NR Description: expressed protein [Arabidopsis thaliana]
  misc_feature (192)..(334): Homolog of NCBI NO: 11280705 NR Description: hypothetical protein F4P12.230 - Arabidopsis >gi|6729504|emb|CAB67660.1| putative protein [Arabidopsis
  misc_feature (263)..(331): Homolog of NCBI NO: 25339461 NR Description: hypothetical protein At2g28660 [imported] - thaliana >gi|4580391|gb|AAD24369.1| unknown protein [Arabidopsis
GSHMASLLRWKDKYVKERLQGLSCSSAAATSVVPSNGRAIDRHSPHLRDPHRRLPPPVPKPPRPSSSFSTTKDSSSSSYKQRQQICHFDVDGKDKRKNKKKKSTAAAAAGSGSSPSEHRRNGKEKALQLQQVSPASSSRFLLNSSRLMMQSDDETTAVDSLPPLPSPRRPSFVDAAAEDDTDTFPSSHGDAASPAVPSRRPQLVAPAPPLELFAEPSASGAGSSSSSSSEITGGHVVAAADNTVVVRSCSTRTGQHQVVVLRVSLHCKGCAGKVKKHLSKMEGVTSFDIDIATKKVTVVGDVTPLGVLNSISKVKSAQFWPDSRSSFSTPPRASASF

SEQ ID NO: 12525 - protein, 334 aa, Zea mays subsp. mays
  peptide (1)..(334): Ceres Seq. ID no. 12408298
  misc_feature (207)..(328): Homolog of NCBI NO: 30683975 NR Description: copper-binding protein family [Arabidopsis
  misc_feature (189)..(331): Homolog of NCBI NO: 22331770 NR Description: putative protein; protein id: At3g53530.1, by cDNA: gi_19424069, supported by cDNA: gi_21281174 [Arabidopsis >gi|19424070|gb|AAL87355.1| unknown protein [Arabidopsis
  misc_feature (209)..(317): Homolog of NCBI NO: 23092567 NR Description: hypothetical protein [Arabidopsis thaliana]
  misc_feature (209)..(317): Homolog of NCBI NO: 30687119 NR Description: expressed protein [Arabidopsis thaliana]
  misc_feature (189)..(331): Homolog of NCBI NO: 11280705 NR Description: hypothetical protein F4P12.230 - Arabidopsis >gi|6729504|emb|CAB67660.1| putative protein [Arabidopsis
  misc_feature (260)..(328): Homolog of NCBI NO: 25339461 NR Description: hypothetical protein At2g28660 [imported] - thaliana >gi|4580391|gb|AAD24369.1| unknown protein [Arabidopsis
  misc_feature (23)..(319): Homolog of NCBI NO: 11358213 NR Description: hypothetical protein T22P11.190 - Arabidopsis >gi|7413649|emb|CAB85997.1| putative protein [Arabidopsis
  misc_feature (23)..(319): Homolog of NCBI NO: 18413973 NR Description: putative protein; protein id: At5g02600.1, by cDNA: 18843. [Arabidopsis thaliana] unknown [Arabidopsis thaliana] >gi|26449554|dbj|BAC41903.1|
  misc_feature (197)..(334): Homolog of NCBI NO: 34906086 NR Description: P0459B04.21 [Oryza sativa (japonica
  misc_feature (252)..(317): Homolog of NCBI NO: 29124116 NR Description: unknown protein [Oryza sativa (japonica
MASLLRWKDKYVKERLQGLSCSSAAATSVVPSNGRAIDRHSPHLRDPHRRLPPPVPKPPRPSSSFSTTKDSSSSSYKQRQQICHFDVDGKDKRKNKKKKSTAAAAAGSGSSPSEHRRNGKEKALQLQQVSPASSSRFLLNSSRLMMQSDDETTAVDSLPPLPSPRRPSFVDAAAEDDTDTFPSSHGDAASPAVPSRRPQLVAPAPPLELFAEPSASGAGSSSSSSSEITGGHVVAAADNTVVVRSCSTRTGQHQVVVLRVSLHCKGCAGKVKKHLSKMEGVTSFDIDIATKKVTVVGDVTPLGVLNSISKVKSAQFWPDSRSSFSTPPRASASF

SEQ ID NO: 12526 - protein, 190 aa, Zea mays subsp. mays
  peptide (1)..(190): Ceres Seq. ID no. 12408299
  misc_feature (1)..(175): Homolog of NCBI NO: 11358213 NR Description: hypothetical protein T22P11.190 - Arabidopsis >gi|7413649|emb|CAB85997.1| putative protein [Arabidopsis
  misc_feature (1)..(175): Homolog of NCBI NO: 18413973 NR Description: putative protein; protein id: At5g02600.1, by cDNA: 18843. [Arabidopsis thaliana] unknown [Arabidopsis thaliana] >gi|26449554|dbj|BAC41903.1|
  misc_feature (53)..(190): Homolog of NCBI NO: 34906086 NR Description: P0459B04.21 [Oryza sativa (japonica
  misc_feature (108)..(173): Homolog of NCBI NO: 29124116 NR Description: unknown protein [Oryza sativa (japonica
  misc_feature (63)..(184): Homolog of NCBI NO: 30683975 NR Description: copper-binding protein family [Arabidopsis
  misc_feature (45)..(187): Homolog of NCBI NO: 22331770 NR Description: putative protein; protein id: At3g53530.1, by cDNA: gi_19424069, supported by cDNA: gi_21281174 [Arabidopsis >gi|19424070|gb|AAL87355.1| unknown protein [Arabidopsis
  misc_feature (65)..(173): Homolog of NCBI NO: 23092567 NR Description: hypothetical protein [Arabidopsis thaliana]
  misc_feature (65)..(173): Homolog of NCBI NO: 30687119 NR Description: expressed protein [Arabidopsis thaliana]
  misc_feature (45)..(187): Homolog of NCBI NO: 11280705 NR Description: hypothetical protein F4P12.230 - Arabidopsis >gi|6729504|emb|CAB67660.1| putative protein [Arabidopsis
  misc_feature (116)..(184): Homolog of NCBI NO: 25339461 NR Description: hypothetical protein At2g28660 [imported] - thaliana >gi|4580391|gb|AAD24369.1| unknown protein [Arabidopsis
MMQSDDETTAVDSLPPLPSPRRPSFVDAAAEDDTDTFPSSHGDAASPAVPSRRPQLVAPAPPLELFAEPSASGAGSSSSSSSEITGGHVVAAADNTVVVRSCSTRTGQHQVVVLRVSLHCKGCAGKVKKHLSKMEGVTSFDIDIATKKVTVVGDVTPLGVLNSISKVKSAQFWPDSRSSFSTPPRASASF

SEQ ID NO: 12527 - DNA, 1013 bp, Zea mays subsp. mays
  misc_feature (1)..(1013): Ceres Seq. ID no. 12342385
  misc_feature: MA Experiment ID: 108529 Result: Up-regulated in Transcription
  misc_feature: MA Experiment 108529 PARAMETER Experiment Name: Zm_Imbibed_Seeds_P Parameter: Age (day) Value: 5 vs. 2
  misc_feature: MA Experiment 108529 PARAMETER Experiment Name: Zm_Imbibed_Seeds_P Parameter: Organism Value: Zea mays
  misc_feature: MA Experiment 108529 PARAMETER Experiment Name: Zm_Imbibed_Seeds_P Parameter: Plant Line Value: 35A19
  misc_feature: MA Experiment 108529 PARAMETER Experiment Name: Zm_Imbibed_Seeds_P Parameter: Tissue Value: Roots vs. Embryo
  misc_feature: MA Experiment ID: 108535 Result: Down-regulated in Transcription
  misc_feature: MA Experiment 108535 PARAMETER Experiment Name: Zm_Meristem_P Parameter: Age (day) Value: 8
  misc_feature: MA Experiment 108535 PARAMETER Experiment Name: Zm_Meristem_P Parameter: Organism Value: Zea mays
  misc_feature: MA Experiment 108535 PARAMETER Experiment Name: Zm_Meristem_P Parameter: Plant Line Value: 35A19
  misc_feature: MA Experiment 108535 PARAMETER Experiment Name: Zm_Meristem_P Parameter: Tissue Value: Root Meristem vs. Above Root Meristem
  misc_feature: MA Experiment ID: 108546 Result: Up-regulated in Transcription
  misc_feature: MA Experiment 108546 PARAMETER Experiment Name: Zm_Imbibed_Seeds_P Parameter: Age (day) Value: 3 vs. 2
  misc_feature: MA Experiment 108546 PARAMETER Experiment Name: Zm_Imbibed_Seeds_P Parameter: Organism Value: Zea mays
  misc_feature: MA Experiment 108546 PARAMETER Experiment Name: Zm_Imbibed_Seeds_P Parameter: Plant Line Value: 35A19
  misc_feature: MA Experiment 108546 PARAMETER Experiment Name: Zm_Imbibed_Seeds_P Parameter: Tissue Value: Roots vs. Embryo
  misc_feature: MA Experiment ID: 20000535 Result: Down-regulated in Transcription
  misc_feature: MA Experiment 20000535 PARAMETER Experiment Name: Zm_Hybrid_Seed_Dev_P Parameter: DAP Value: 30 vs. 12
  misc_feature: MA Experiment 20000535 PARAMETER Experiment Name: Zm_Hybrid_Seed_Dev_P Parameter: Organism Value: Zea mays
  misc_feature: MA Experiment 20000535 PARAMETER Experiment Name: Zm_Hybrid_Seed_Dev_P Parameter: Plant Line Value: 35A19
  misc_feature: MA Experiment 20000535 PARAMETER Experiment Name: Zm_Hybrid_Seed_Dev_P Parameter: Tissue Value: Embryo vs. Unfert Floret
aaagtaactaaccatattggccgtgcgtccgtggctttgcatctgcaaccccgcccgatcaatcttcctcgttccgccgctccctcgcctccggcagcgaggtgaggccaccgatcggaccttccctagcggcggcgcctaccaacctcaaggagcgatggctctgtctgcgacgctacggatttctcttagcgtcgcgttctttggggttctggcgttcgtgcttggtgtcatcgccgaaaacaaaaagcctgcttccgggactcctatcctaggaaaggatgtcgtcatctgcacgtttccaagtgatccgactcttgcgatggggagcctgtccattgtggcacttgtggtagctgccatcgtaggccatgttgccatcttctttccatactcgggcaagtcagttcctcgtggagcgctgtttcaaagcaccagcttgacagtgttctttgttgttgctgagcttgtctcagccctggctcttgcaatgtcgctgtgggcaactgtcaccgagggtcttcaccgcagcaagaacatccaccacgacatggactaccagtgccctactgccaagaccggcctgttcggcggcgccgctttcctcgcccttgacgctgctctcttctggcttgtttgccagatgctggccctcaatgcaagggctgactaccttgacgaggatgacggcaagggagaatatggccagatttatgctgctcaagtcgatgatggctcgaaggtctgagcctatgtggtcatgctcggcagggttctatgattagtgtcatttggctacattatgccatcaacaaagtcgctttagctctcagtaaatttgtatataagttgcaaagtcttacataaggctggtggttattgcactttcgtgtttcagtgtgatcgataaacagtatctcagtacaatcggtttgctatgccccttggcgaacttgtccttgagttttctggtgtctgaatggcactataatataatatactccctctgtttc

SEQ ID NO: 12528 - protein, 196 aa, Zea mays subsp. mays
  peptide (1)..(196): Ceres Seq. ID no. 12342386
  misc_feature (1)..(195): Homolog of NCBI NO: 8099143 NR Description: hypothetical protein [Oryza sativa]
  misc_feature (1)..(191): Homolog of NCBI NO: 15235839 NR Description: putative protein; protein id: At4g31130.1, by cDNA: 8077. [Arabidopsis thaliana] >gi|7451948|pir||T10667
MALSATLRISLSVAFFGVLAFVLGVIAENKKPASGTPILGKDVVICTFPSDPTLAMGSLSIVALVVAAIVGHVAIFFPYSGKSVPRGALFQSTSLTVFFVVAELVSALALAMSLWATVTEGLHRSKNIHHDMDYQCPTAKTGLFGGAAFLALDAALFWLVCQMLALNARADYLDEDDGKGEYGQIYAAQVDDGSKV

SEQ ID NO: 12529 - protein, 141 aa, Zea mays subsp. mays
  peptide (1)..(141): Ceres Seq. ID no. 12342387
  misc_feature (1)..(140): Homolog of NCBI NO: 8099143 NR Description: hypothetical protein [Oryza sativa]
  misc_feature (1)..(136): Homolog of NCBI NO: 15235839 NR Description: putative protein; protein id: At4g31130.1, by cDNA: 8077. [Arabidopsis thaliana] >gi|7451948|pir||T10667
MGSLSIVALVVAAIVGHVAIFFPYSGKSVPRGALFQSTSLTVFFVVAELVSALALAMSLWATVTEGLHRSKNIHHDMDYQCPTAKTGLFGGAAFLALDAALFWLVCQMLALNARADYLDEDDGKGEYGQIYAAQVDDGSKV

SEQ ID NO: 12530 - DNA, 1376 bp, Zea mays subsp. mays
  misc_feature (1)..(1376): Ceres Seq. ID no. 12404602
  misc_feature: MA Experiment ID: 108535 Result: Down-regulated in Transcription
  misc_feature: MA Experiment 108535 PARAMETER Experiment Name: Zm_Meristem_P Parameter: Age (day) Value: 8
  misc_feature: MA Experiment 108535 PARAMETER Experiment Name: Zm_Meristem_P Parameter: Organism Value: Zea mays
  misc_feature: MA Experiment 108535 PARAMETER Experiment Name: Zm_Meristem_P Parameter: Plant Line Value: 35A19
  misc_feature: MA Experiment 108535 PARAMETER Experiment Name: Zm_Meristem_P Parameter: Tissue Value: Root Meristem vs. Above Root Meristem
aaaatcaactcgagcaaagcagctagctagctagcgctagtaccatcgtgcgagtgtgagcaagctactgagagatctcggaacgtttgcttgacagcttgagtaggtaaataatctatggcgcgccgacagtggagcagcggcggcctcgcggtcgcggtgctcgccgtgctgtcgtccgtgctcatctgctcatggggccacccggtgccgggcgggcacggcggcgggctccccctgcagccgcacttctacggccacgcgtgcccgcagatggaggccatcgtggggtccctcgtggcgaaggcgcacgcggaggacccgcgcatggcggcgtccctgctgcggatgcacttccacgactgcttcgtgcaggggctgcgacgcctccgtgctgctggacgccgacggcagcggcaggttcgtcaccgagaagcggtccaaccccaacaaggactcgctccgggggttcgaggtcatcgacgagatcaaggccgcgctggagcacgcctgcccgcacaccgtctcctgcgccgacatcgtcgccgtcgccgccagggactccgtcgtcctgaccggcggacctggctgggaggtgccactggggaggagggactcgctgacggccagcctgagcggctccaacaacctcatccctgctcccaacgactccctccccaccatcatcggcaagttcgccaaccaaggcctcgacatcgtcgacctcgtcgcactctcaggggggcacaccatcggcgactcgcggtgcgtgagcttccggcagcggctgtacggccagaacaacaacgggcaggtggaccggacgctgaacccggcgtacgcggcggagctgcggggccggtgcccgccggtcgggcggcgaccagaacctgttcgcgctggacctggtgacccagttccggttcgacaaccagtactaccacaacatcctggccatgaacgggctgctcagctccgacgagatcctgctcacgcagagccgcgagaccatggacctcgtccaccgctacgccgccgaccagggcctcttcttcgaccacttcgccaagtccatggtcaagatgggcaacatctcgccgctcaccgggagcgccggcgagatcaggcacaactgcaggagggtcaaccacttctagcttccatggagtggccatccgtgcagtggtgttcttgctttggtttcatttctggatgcatgcgtcatctttcatacttggatttaagtgtgcagtagtcgtaaatgattggaatttctgttttagtttggtgcccattcgatctcgagtcgattttcactcatgtaatttgcaaatcttgtacgaagaaatgatccaataaaattcagcatttgtgtc

SEQ ID NO: 12531 - protein, 264 aa, Zea mays subsp. mays
  peptide (1)..(264): Ceres Seq. ID no. 12404603
  misc_feature (12)..(87): Homolog of NCBI NO: 34913714 NR Description: putative peroxidase [Oryza sativa (japonica >gi|20146478|dbj|BAB89258.1| putative peroxidase [Oryza sativa
  misc_feature (15)..(87): Homolog of NCBI NO: 7453853 NR Description: peroxidase prx14 precursor [Spinacia oleracea]
  misc_feature (11)..(87): Homolog of NCBI NO: 7453855 NR Description: peroxidase prx15 precursor [Spinacia oleracea]
  misc_feature (41)..(87): Homolog of NCBI NO: 7658147 NR Description: peroxidase [Asparagus officinalis]
  misc_feature (15)..(87): Homolog of NCBI NO: 34903044 NR Description: unnamed protein product [Oryza sativa (japonica group)] >gi|7242902|dbj|BAA92500.1| unnamed protein product
  misc_feature (11)..(87): Homolog of NCBI NO: 25044849 NR Description: peroxidase [Ananas comosus]
  misc_feature (11)..(87): Homolog of NCBI NO: 15239370 NR Description: peroxidase, putative; protein id: At5g66390.1 thaliana] >gi|26397792|sp|Q9FJZ9|PE72_ARATH Peroxidase 72 (Atperox P72) (PRXR8) (ATP6a) >gi|10177520|dbj|BAB10915.1|
  misc_feature (11)..(87): Homolog of NCBI NO: 1402918 NR Description: peroxidase [Arabidopsis thaliana]
  misc_feature (37)..(87): Homolog of NCBI NO: 7453851 NR Description: peroxidase prx13 precursor [Spinacia oleracea]
  misc_feature (37)..(87): Homolog of NCBI NO: 15234394 NR Description: peroxidase, putative; protein id: At4g36430.1, by cDNA: gi_17530561, supported by cDNA: gi_18377685 [Arabidopsis
  misc_feature (12)..(87): Homolog of NCBI NO: 34913714 NR Description: putative peroxidase [Oryza sativa (japonica >gi|20146478|dbj|BAB89258.1| putative peroxidase [Oryza sativa
  misc_feature (15)..(87): Homolog of NCBI NO: 7453853 NR Description: peroxidase prx14 precursor [Spinacia oleracea]
  misc_feature (11)..(87): Homolog of NCBI NO: 7453855 NR Description: peroxidase prx15 precursor [Spinacia oleracea]
  misc_feature (41)..(87): Homolog of NCBI NO: 7658147 NR Description: peroxidase [Asparagus officinalis]
  misc_feature (15)..(87): Homolog of NCBI NO: 34903044 NR Description: unnamed protein product [Oryza sativa (japonica group)] >gi|7242902|dbj|BAA92500.1| unnamed protein product
  misc_feature (11)..(87): Homolog of NCBI NO: 25044849 NR Description: peroxidase [Ananas comosus]
  misc_feature (11)..(87): Homolog of NCBI NO: 15239370 NR Description: peroxidase, putative; protein id: At5g66390.1 thaliana] >gi|26397792|sp|Q9FJZ9|PE72_ARATH Peroxidase 72 (Atperox P72) (PRXR8) (ATP6a) >gi|10177520|dbj|BAB10915.1|
  misc_feature (11)..(87): Homolog of NCBI NO: 1402918 NR Description: peroxidase [Arabidopsis thaliana]
  misc_feature (37)..(87): Homolog of NCBI NO: 7453851 NR Description: peroxidase prx13 precursor [Spinacia oleracea]
  misc_feature (37)..(87): Homolog of NCBI NO: 15234394 NR Description: peroxidase, putative; protein id: At4g36430.1, by cDNA: gi_17530561, supported by cDNA: gi_18377685 [Arabidopsis
MARRQWSSGGLAVAVLAVLSSVLICSWGHPVPGGHGGGLPLQPHFYGHACPQMEAIVGSLVAKAHAEDPRMAASLLRMHFHDCFVQGLRRLRAAGRRRQRQVRHREAVQPQQGLAPGVRGHRRDQGRAGARLPAHRLLRRHRRRRRQGLRRPDRRTWLGGATGEEGLADGQPERLQQPHPCSQRLPPHHHRQVRQPRPRHRRPRRTLRGAHHRRLAVRELPAAAVRPEQQRAGGPDAEPGVRGGAAGPVPAGRAATRTCSRWTW

SEQ ID NO: 12532 - protein, 212 aa, Zea mays subsp. mays
  peptide (1)..(212): Ceres Seq. ID no. 12404604
  misc_feature (1)..(35): Homolog of NCBI NO: 34913714 NR Description: putative peroxidase [Oryza sativa (japonica >gi|20146478|dbj|BAB89258.1| putative peroxidase [Oryza sativa
  misc_feature (1)..(35): Homolog of NCBI NO: 7453853 NR Description: peroxidase prx14 precursor [Spinacia oleracea]
  misc_feature (1)..(35): Homolog of NCBI NO: 7453855 NR Description: peroxidase prx15 precursor [Spinacia oleracea]
  misc_feature (1)..(35): Homolog of NCBI NO: 7658147 NR Description: peroxidase [Asparagus officinalis]
  misc_feature (1)..(35): Homolog of NCBI NO: 34903044 NR Description: unnamed protein product [Oryza sativa (japonica group)] >gi|7242902|dbj|BAA92500.1| unnamed protein product
  misc_feature (1)..(35): Homolog of NCBI NO: 25044849 NR Description: peroxidase [Ananas comosus]
  misc_feature (1)..(35): Homolog of NCBI NO: 15239370 NR Description: peroxidase, putative; protein id: At5g66390.1 thaliana] >gi|26397792|sp|Q9FJZ9|PE72_ARATH Peroxidase 72 (Atperox P72) (PRXR8) (ATP6a) >gi|10177520|dbj|BAB10915.1|
  misc_feature (1)..(35): Homolog of NCBI NO: 1402918 NR Description: peroxidase [Arabidopsis thaliana]
  misc_feature (1)..(35): Homolog of NCBI NO: 7453851 NR Description: peroxidase prx13 precursor [Spinacia oleracea]
  misc_feature (1)..(35): Homolog of NCBI NO: 15234394 NR Description: peroxidase, putative; protein id: At4g36430.1, by cDNA: gi_17530561, supported by cDNA: gi_18377685 [Arabidopsis
  misc_feature (1)..(35): Homolog of NCBI NO: 34913714 NR Description: putative peroxidase [Oryza sativa (japonica >gi|20146478|dbj|BAB89258.1| putative peroxidase [Oryza sativa
  misc_feature (1)..(35): Homolog of NCBI NO: 7453853 NR Description: peroxidase prx14 precursor [Spinacia oleracea]
  misc_feature (1)..(35): Homolog of NCBI NO: 7453855 NR Description: peroxidase prx15 precursor [Spinacia oleracea]
  misc_feature (1)..(35): Homolog of NCBI NO: 7658147 NR Description: peroxidase [Asparagus officinalis]
  misc_feature (1)..(35): Homolog of NCBI NO: 34903044 NR Description: unnamed protein product [Oryza sativa (japonica group)] >gi|7242902|dbj|BAA92500.1| unnamed protein product
  misc_feature (1)..(35): Homolog of NCBI NO: 25044849 NR Description: peroxidase [Ananas comosus]
  misc_feature (1)..(35): Homolog of NCBI NO: 15239370 NR Description: peroxidase, putative; protein id: At5g66390.1 thaliana] >gi|26397792|sp|Q9FJZ9|PE72_ARATH Peroxidase 72 (Atperox P72) (PRXR8) (ATP6a) >gi|10177520|dbj|BAB10915.1|
  misc_feature (1)..(35): Homolog of NCBI NO: 1402918 NR Description: peroxidase [Arabidopsis thaliana]
  misc_feature (1)..(35): Homolog of NCBI NO: 7453851 NR Description: peroxidase prx13 precursor [Spinacia oleracea]
  misc_feature (1)..(35): Homolog of NCBI NO: 15234394 NR Description: peroxidase, putative; protein id: At4g36430.1, by cDNA: gi_17530561, supported by cDNA: gi_18377685 [Arabidopsis
MEAIVGSLVAKAHAEDPRMAASLLRMHFHDCFVQGLRRLRAAGRRRQRQVRHREAVQPQQGLAPGVRGHRRDQGRAGARLPAHRLLRRHRRRRRQGLRRPDRRTWLGGATGEEGLADGQPERLQQPHPCSQRLPPHHHRQVRQPRPRHRRPRRTLRGAHHRRLAVRELPAAAVRPEQQRAGGPDAEPGVRGGAAGPVPAGRAATRTCSRWTW

SEQ ID NO: 12533 - protein, 194 aa, Zea mays subsp. mays
  peptide (1)..(194): Ceres Seq. ID no. 12404605
  misc_feature (1)..(17): Homolog of NCBI NO: 34913714 NR Description: putative peroxidase [Oryza sativa (japonica >gi|20146478|dbj|BAB89258.1| putative peroxidase [Oryza sativa
  misc_feature (1)..(17): Homolog of NCBI NO: 7453853 NR Description: peroxidase prx14 precursor [Spinacia oleracea]
  misc_feature (1)..(17): Homolog of NCBI NO: 7453855 NR Description: peroxidase prx15 precursor [Spinacia oleracea]
  misc_feature (1)..(17): Homolog of NCBI NO: 7658147 NR Description: peroxidase [Asparagus officinalis]
  misc_feature (1)..(17): Homolog of NCBI NO: 34903044 NR Description: unnamed protein product [Oryza sativa (japonica group)] >gi|7242902|dbj|BAA92500.1| unnamed protein product
  misc_feature (1)..(17): Homolog of NCBI NO: 25044849 NR Description: peroxidase [Ananas comosus]
  misc_feature (1)..(17): Homolog of NCBI NO: 15239370 NR Description: peroxidase, putative; protein id: At5g66390.1 thaliana] >gi|26397792|sp|Q9FJZ9|PE72_ARATH Peroxidase 72 (Atperox P72) (PRXR8) (ATP6a) >gi|10177520|dbj|BAB10915.1|
  misc_feature (1)..(17): Homolog of NCBI NO: 1402918 NR Description: peroxidase [Arabidopsis thaliana]
  misc_feature (1)..(17): Homolog of NCBI NO: 7453851 NR Description: peroxidase prx13 precursor [Spinacia oleracea]
  misc_feature (1)..(17): Homolog of NCBI NO: 15234394 NR Description: peroxidase, putative; protein id: At4g36430.1, by cDNA: gi_17530561, supported by cDNA: gi_18377685 [Arabidopsis
  misc_feature (1)..(17): Homolog of NCBI NO: 34913714 NR Description: putative peroxidase [Oryza sativa (japonica >gi|20146478|dbj|BAB89258.1| putative peroxidase [Oryza sativa
  misc_feature (1)..(17): Homolog of NCBI NO: 7453853 NR Description: peroxidase prx14 precursor [Spinacia oleracea]
  misc_feature (1)..(17): Homolog of NCBI NO: 7453855 NR Description: peroxidase prx15 precursor [Spinacia oleracea]
  misc_feature (1)..(17): Homolog of NCBI NO: 7658147 NR Description: peroxidase [Asparagus officinalis]
  misc_feature (1)..(17): Homolog of NCBI NO: 34903044 NR Description: unnamed protein product [Oryza sativa (japonica group)] >gi|7242902|dbj|BAA92500.1| unnamed protein product
  misc_feature (1)..(17): Homolog of NCBI NO: 25044849 NR Description: peroxidase [Ananas comosus]
  misc_feature (1)..(17): Homolog of NCBI NO: 15239370 NR Description: peroxidase, putative; protein id: At5g66390.1 thaliana] >gi|26397792|sp|Q9FJZ9|PE72_ARATH Peroxidase 72 (Atperox P72) (PRXR8) (ATP6a) >gi|10177520|dbj|BAB10915.1|
  misc_feature (1)..(17): Homolog of NCBI NO: 1402918 NR Description: peroxidase [Arabidopsis thaliana]
  misc_feature (1)..(17): Homolog of NCBI NO: 7453851 NR Description: peroxidase prx13 precursor [Spinacia oleracea]
  misc_feature (1)..(17): Homolog of NCBI NO: 15234394 NR Description: peroxidase, putative; protein id: At4g36430.1, by cDNA: gi_17530561, supported by cDNA: gi_18377685 [Arabidopsis
MAASLLRMHFHDCFVQGLRRLRAAGRRRQRQVRHREAVQPQQGLAPGVRGHRRDQGRAGARLPAHRLLRRHRRRRRQGLRRPDRRTWLGGATGEEGLADGQPERLQQPHPCSQRLPPHHHRQVRQPRPRHRRPRRTLRGAHHRRLAVRELPAAAVRPEQQRAGGPDAEPGVRGGAAGPVPAGRAATRTCSRWTW

SEQ ID NO: 12534 - DNA, 978 bp, Zea mays subsp. mays
  misc_feature (1)..(978): Ceres Seq. ID no. 12579117
  misc_feature: MA Experiment ID: 108523 Result: Up-regulated in Transcription
  misc_feature: MA Experiment 108523 PARAMETER Experiment Name: Zm_42deg_Heat_P Parameter: Age (day) Value: 8
  misc_feature: MA Experiment 108523 PARAMETER Experiment Name: Zm_42deg_Heat_P Parameter: Organism Value: Zea mays
  misc_feature: MA Experiment 108523 PARAMETER Experiment Name: Zm_42deg_Heat_P Parameter: Plant Line Value: 35A19
  misc_feature: MA Experiment 108523 PARAMETER Experiment Name: Zm_42deg_Heat_P Parameter: Temperature (deg C) Value: 42 vs. 22
  misc_feature: MA Experiment 108523 PARAMETER Experiment Name: Zm_42deg_Heat_P Parameter: Timepoint (hr) Value: 6
  misc_feature: MA Experiment 108523 PARAMETER Experiment Name: Zm_42deg_Heat_P Parameter: Tissue Value: Aerial
  misc_feature: MA Experiment ID: 108535 Result: Up-regulated in Transcription
  misc_feature: MA Experiment 108535 PARAMETER Experiment Name: Zm_Meristem_P Parameter: Age (day) Value: 8
  misc_feature: MA Experiment 108535 PARAMETER Experiment Name: Zm_Meristem_P Parameter: Organism Value: Zea mays
  misc_feature: MA Experiment 108535 PARAMETER Experiment Name: Zm_Meristem_P Parameter: Plant Line Value: 35A19
  misc_feature: MA Experiment 108535 PARAMETER Experiment Name: Zm_Meristem_P Parameter: Tissue Value: Root Meristem vs. Above Root Meristem
  misc_feature: MA Experiment ID: 20000492 Result: Up-regulated in Transcription
  misc_feature: MA Experiment 20000492 PARAMETER Experiment Name: Zm_Hybrid_Seed_Dev_P Parameter: DAP Value: 12
  misc_feature: MA Experiment 20000492 PARAMETER Experiment Name: Zm_Hybrid_Seed_Dev_P Parameter: Organism Value: Zea mays
  misc_feature: MA Experiment 20000492 PARAMETER Experiment Name: Zm_Hybrid_Seed_Dev_P Parameter: Plant Line Value: 35A19
  misc_feature: MA Experiment 20000492 PARAMETER Experiment Name: Zm_Hybrid_Seed_Dev_P Parameter: Tissue Value: Fert Kernel vs. Unfert Floret
aattgacagatcccgcaatactcacagggccctcttctctcatctctcactccctcgctccgtctaccagtaccaccacgtccctcctcgtcgacgatctcgtagcggcggcgcacatggcgagcgacggcgcggcggctacgccagcgaaggttaccccaaagaaggccaatctcctcgacccgcactccatcaagcaccttctcgacgagaccatctccgaggtcgtgaagagtaagggctacaccgaggacacgcggctgggcaactggaagctggggatcggagccgccgtgattgctgtcgccctcctcgctcagttttaccccaagaagttcccgcagaaccgcgatttcctccttggctgcatcgccctgtatgtggtgctgaatgtggtgctgctgatccttagctacaccaaggagaaggatgccatcctattcacgcaccctcctatgggttctttcagcagcactggcctcactatttcttctaaattaccaagattctcggacatgtacactctcacaatagcaagtgcggatccacagtctatctctgcaaacaagccagttcatttcactaagagcgtaacaaagtggtttacaaaggaaggagttcttgtggagggcctgttctggaaggatgtcgagaagctgattgatgactacaacagtgagcgcaagagtaaatgaattggtagctcgtgtctctggccatctggggagacatcgctgtctagagaaatccgtcaaagtttagcttaatctgaacaggcatttttgctatactgtaccggttgaccagtgaatgaatgatgttctagacattaactttggttccaagctttctgtcgtgtccatggataactatccgtccgaatcctagaaacgtggtccgtgcttgtaacctgtttgttctggtgcttccatacgccggagcagattttgaagagaaatgaaacaaatcgttaaatcg

SEQ ID NO: 12535 - protein, 230 aa, Zea mays subsp. mays
  peptide (1)..(230): Ceres Seq. ID no. 12579118
  misc_feature (39)..(230): Homolog of NCBI NO: 38344552 NR Description: OSJNBa0027P08.20 [Oryza sativa (japonica
  misc_feature (54)..(230): Homolog of NCBI NO: 30688096 NR Description: expressed protein [Arabidopsis thaliana] Probable microsomal signal peptidase 25 kDa subunit (SPase 25 kDa (SPC25) >gi|17528956|gb|AAL38688.1| unknown protein [Arabidopsis
  misc_feature (54)..(230): Homolog of NCBI NO: 34365647 NR Description: At4g04200 [Arabidopsis thaliana]
  misc_feature (153)..(230): Homolog of NCBI NO: 15233420 NR Description: hypothetical protein; protein id: At4g04200.1
  misc_feature (54)..(84): Homolog of NCBI NO: 15233420 NR Description: hypothetical protein; protein id: At4g04200.1
  misc_feature (54)..(126): Homolog of NCBI NO: 25408649 NR Description: hypothetical protein At2g39960 [imported] - thaliana >gi|2088649|gb|AAB95281.1| unknown protein [Arabidopsis
  misc_feature (48)..(230): Homolog of NCBI NO: 31240525 NR Description: ENSANGP00000021231 [Anopheles gambiae]
LTDPAILTGPSSLISHSLAPSTSTTTSLLVDDLVAAAHMASDGAAATPAKVTPKKANLLDPHSIKHLLDETISEVVKSKGYTEDTRLGNWKLGIGAAVIAVALLAQFYPKKFPQNRDFLLGCIALYVVLNVVLLILSYTKEKDAILFTHPPMGSFSSTGLTISSKLPRFSDMYTLTIASADPQSISANKPVHFTKSVTKWFTKEGVLVEGLFWKDVEKLIDDYNSERKSK

SEQ ID NO: 12536 - protein, 192 aa, Zea mays subsp. mays
  peptide (1)..(192): Ceres Seq. ID no. 12579119
  misc_feature (1)..(192): Homolog of NCBI NO: 38344552 NR Description: OSJNBa0027P08.20 [Oryza sativa (japonica
  misc_feature (16)..(192): Homolog of NCBI NO: 30688096 NR Description: expressed protein [Arabidopsis thaliana] Probable microsomal signal peptidase 25 kDa subunit (SPase 25 kDa (SPC25) >gi|17528956|gb|AAL38688.1| unknown protein [Arabidopsis
  misc_feature (16)..(192): Homolog of NCBI NO: 34365647 NR Description: At4g04200 [Arabidopsis thaliana]
  misc_feature (115)..(192): Homolog of NCBI NO: 15233420 NR Description: hypothetical protein; protein id: At4g04200.1
  misc_feature (16)..(46): Homolog of NCBI NO: 15233420 NR Description: hypothetical protein; protein id: At4g04200.1
  misc_feature (16)..(88): Homolog of NCBI NO: 25408649 NR Description: hypothetical protein At2g39960 [imported] - thaliana >gi|2088649|gb|AAB95281.1| unknown protein [Arabidopsis
  misc_feature (10)..(192): Homolog of NCBI NO: 31240525 NR Description: ENSANGP00000021231 [Anopheles gambiae]
MASDGAAATPAKVTPKKANLLDPHSIKHLLDETISEVVKSKGYTEDTRLGNWKLGIGAAVIAVALLAQFYPKKFPQNRDFLLGCIALYVVLNVVLLILSYTKEKDAILFTHPPMGSFSSTGLTISSKLPRFSDMYTLTIASADPQSISANKPVHFTKSVTKWFTKEGVLVEGLFWKDVEKLIDDYNSERKSK

SEQ ID NO: 12537 - DNA, 766 bp, Zea mays subsp. mays
  misc_feature (1)..(766): Ceres Seq. ID no. 12345783
  misc_feature: MA Experiment ID: 108528 Result: Down-regulated in Transcription
  misc_feature: MA Experiment 108528 PARAMETER Experiment Name: Zm_Imbibed_Seeds_P Parameter: Age (day) Value: 5 vs. 2
  misc_feature: MA Experiment 108528 PARAMETER Experiment Name: Zm_Imbibed_Seeds_P Parameter: Organism Value: Zea mays
  misc_feature: MA Experiment 108528 PARAMETER Experiment Name: Zm_Imbibed_Seeds_P Parameter: Plant Line Value: 35A19
  misc_feature: MA Experiment 108528 PARAMETER Experiment Name: Zm_Imbibed_Seeds_P Parameter: Tissue Value: Aerial vs. Embryo
  misc_feature: MA Experiment ID: 108530 Result: Down-regulated in Transcription
  misc_feature: MA Experiment 108530 PARAMETER Experiment Name: Zm_Imbibed_Seeds_P Parameter: Age (day) Value: 6 vs. 2
  misc_feature: MA Experiment 108530 PARAMETER Experiment Name: Zm_Imbibed_Seeds_P Parameter: Organism Value: Zea mays
  misc_feature: MA Experiment 108530 PARAMETER Experiment Name: Zm_Imbibed_Seeds_P Parameter: Plant Line Value: 35A19
  misc_feature: MA Experiment 108530 PARAMETER Experiment Name: Zm_Imbibed_Seeds_P Parameter: Tissue Value: Aerial vs. Embryo
  misc_feature: MA Experiment ID: 108535 Result: Up-regulated in Transcription
  misc_feature: MA Experiment 108535 PARAMETER Experiment Name: Zm_Meristem_P Parameter: Age (day) Value: 8
  misc_feature: MA Experiment 108535 PARAMETER Experiment Name: Zm_Meristem_P Parameter: Organism Value: Zea mays
  misc_feature: MA Experiment 108535 PARAMETER Experiment Name: Zm_Meristem_P Parameter: Plant Line Value: 35A19
  misc_feature: MA Experiment 108535 PARAMETER Experiment Name: Zm_Meristem_P Parameter: Tissue Value: Root Meristem vs. Above Root Meristem
  misc_feature: MA Experiment ID: 20000488 Result: Up-regulated in Transcription
  misc_feature: MA Experiment 20000488 PARAMETER Experiment Name: Zm_50mM_NH4NO3_L_to_H_P Parameter: Organism Value: Zea mays
  misc_feature: MA Experiment 20000488 PARAMETER Experiment Name: Zm_50mM_NH4NO3_L_to_H_P Parameter: Timepoint (hr) Value: 8
  misc_feature: MA Experiment 20000488 PARAMETER Experiment Name: Zm_50mM_NH4NO3_L_to_H_P Parameter: Tissue Value: Leaves
  misc_feature: MA Experiment 20000488 PARAMETER Experiment Name: Zm_50mM_NH4NO3_L_to_H_P Parameter: Treatment Value: 50mM NH4NO3 vs. 100mM Mannitol
  misc_feature: MA Experiment ID: 20001606 Result: Up-regulated in Transcription
  misc_feature: MA Experiment 20001606 PARAMETER Experiment Name: Zm_50ppm_KNO3_L-to-H_P Parameter: Age (day) Value: 19
  misc_feature: MA Experiment 20001606 PARAMETER Experiment Name: Zm_50ppm_KNO3_L-to-H_P Parameter: Organism Value: Zea mays
  misc_feature: MA Experiment 20001606 PARAMETER Experiment Name: Zm_50ppm_KNO3_L-to-H_P Parameter: Plant Line Value: 35A19
  misc_feature: MA Experiment 20001606 PARAMETER Experiment Name: Zm_50ppm_KNO3_L-to-H_P Parameter: Timepoint (hr) Value: 8
  misc_feature: MA Experiment 20001606 PARAMETER Experiment Name: Zm_50ppm_KNO3_L-to-H_P Parameter: Tissue Value: Shoots
  misc_feature: MA Experiment 20001606 PARAMETER Experiment Name: Zm_50ppm_KNO3_L-to-H_P Parameter: Treatment Value: 50ppm KNO3 vs. 50ppm KCl
  misc_feature: MA Experiment ID: 20001612 Result: Up-regulated in Transcription
  misc_feature: MA Experiment 20001612 PARAMETER Experiment Name: Zm_50ppm_KNO3_L-to-H_P Parameter: Age (day) Value: 19
  misc_feature: MA Experiment 20001612 PARAMETER Experiment Name: Zm_50ppm_KNO3_L-to-H_P Parameter: Organism Value: Zea mays
  misc_feature: MA Experiment 20001612 PARAMETER Experiment Name: Zm_50ppm_KNO3_L-to-H_P Parameter: Plant Line Value: 35A19
  misc_feature: MA Experiment 20001612 PARAMETER Experiment Name: Zm_50ppm_KNO3_L-to-H_P Parameter: Timepoint (hr) Value: 8
  misc_feature: MA Experiment 20001612 PARAMETER Experiment Name: Zm_50ppm_KNO3_L-to-H_P Parameter: Tissue Value: Roots
  misc_feature: MA Experiment 20001612 PARAMETER Experiment Name: Zm_50ppm_KNO3_L-to-H_P Parameter: Treatment Value: 50ppm KNO3 vs. 50ppm KCl
acagtcgcctccttcctgcgccgccgccgccgccgccgctaccaccgcctcgcggccgcctgcggctccgcgtttccgcacggatttggtgaaggtttcttgaggctgagaacatggtgctgaagacggaactttgccgcttcagcggccagaagatttatcctgggaaaggcattagatttatccgtgctgattctcaggtcttcctttttgccaactcgaaatgcaagcgctacttccacaaccgcctgaagcctgcaaagcttacctggacagcaatgtacaggaagcagcacaagaaggatatccatgctgaagcggtaaagaagaggcgccgcgccaccaagaagccatactccaggtcaattgtgggtgcttccttggaagtaatccagaagaagagagctgagaagccagaggtccgcgatgctgctagagaagctgctcttcgtgagatcaaggagcgcatcaagaagaccaaggatgagaagaaagcgaagaaggcggaggtgagcaagtcccagaagacgcagacaaagggtgcggtccagaagggttccaagggccccaagttgggcggcggtggtgggaagcgctgaaagaacttagtgtcgtttctcgacattgcagtcgttccttagccaaagccactttcgtagaacctgtgttgaatttgcaagacttattcaagcgttgcttgtgcgtgctaaataccatggcaagagaacggatttatatttatgcctgaaaaaaaatgaccgttcat

SEQ ID NO: 12538 - protein, 161 aa, Zea mays subsp. mays; identical to SEQ ID NO: 1700
  peptide (1)..(161): Ceres Seq. ID no. 12345784
  misc_feature (3)..(73): Pfam Name: Ribosomal protein L24e Pfam Description: Ribosomal protein L24e
  misc_feature (1)..(161): Homolog of NCBI NO: 1710521 NR Description: 60S RIBOSOMAL PROTEIN L24 >gi|7440778|pir||T06178
  misc_feature (4)..(161): Homolog of NCBI NO: 34900364 NR Description: putative 60S ribosomal protein L24 [Oryza sativa
  misc_feature (1)..(160): Homolog of NCBI NO: 6094040 NR Description: 60S ribosomal protein L24
  misc_feature (1)..(156): Homolog of NCBI NO: 10180025 NR Description: 60S ribosomal protein L24 [Prunus avium]
  misc_feature (1)..(161): Homolog of NCBI NO: 18404176 NR Description: 60S ribosomal protein L24; protein id: supported by cDNA: 14564., supported by cDNA: gi_16604375, by cDNA: gi_18252830 [Arabidopsis thaliana]
  misc_feature (1)..(161): Homolog of NCBI NO: 15231730 NR Description: 60S ribosomal protein - like; protein id: supported by cDNA: gi_16648705, supported by cDNA: gi_20260561 thaliana] >gi|26454659|sp|P38666|RL24_ARATH 60S ribosomal protein
  misc_feature (5)..(161): Homolog of NCBI NO: 25295112 NR Description: 60S ribosomal protein L24 [imported] -
  misc_feature (3)..(150): Homolog of NCBI NO: 19075214 NR Description: 60s ribosomal protein L24 [Schizosaccharomyces
  misc_feature (3)..(150): Homolog of NCBI NO: 19115030 NR Description: 60S ribosomal protein L24 [Schizosaccharomyces
  misc_feature (10)..(154): Homolog of NCBI NO: 40741063 NR Description: conserved hypothetical protein [Aspergillus

SEQ ID NO: 12539 - protein, 106 aa, Zea mays subsp. mays; identical to SEQ ID NO: 1701
  peptide (1)..(106): Ceres Seq. ID no. 12345785
  misc_feature (1)..(106): Homolog of NCBI NO: 1710521 NR Description: 60S RIBOSOMAL PROTEIN L24 >gi|7440778|pir||T06178
  misc_feature (1)..(106): Homolog of NCBI NO: 34900364 NR Description: putative 60S ribosomal protein L24 [Oryza sativa
  misc_feature (1)..(105): Homolog of NCBI NO: 6094040 NR Description: 60S ribosomal protein L24
  misc_feature (1)..(101): Homolog of NCBI NO: 10180025 NR Description: 60S ribosomal protein L24 [Prunus avium]
  misc_feature (1)..(106): Homolog of NCBI NO: 18404176 NR Description: 60S ribosomal protein L24; protein id: supported by cDNA: 14564., supported by cDNA: gi_16604375, by cDNA: gi_18252830 [Arabidopsis thaliana]
  misc_feature (1)..(106): Homolog of NCBI NO: 15231730 NR Description: 60S ribosomal protein - like; protein id: supported by cDNA: gi_16648705, supported by cDNA: gi_20260561 thaliana] >gi|26454659|sp|P38666|RL24_ARATH 60S ribosomal protein
  misc_feature (1)..(106): Homolog of NCBI NO: 25295112 NR Description: 60S ribosomal protein L24 [imported] -
  misc_feature (1)..(95): Homolog of NCBI NO: 19075214 NR Description: 60s ribosomal protein L24 [Schizosaccharomyces
  misc_feature (1)..(95): Homolog of NCBI NO: 19115030 NR Description: 60S ribosomal protein L24 [Schizosaccharomyces
  misc_feature (1)..(99): Homolog of NCBI NO: 40741063 NR Description: conserved hypothetical protein [Aspergillus

SEQ ID NO: 12540 - DNA, 733 bp, Zea mays subsp. mays
  misc_feature (1)..(733): Ceres Seq. ID no. 12404215
  misc_feature: MA Experiment ID: 108535 Result: Down-regulated in Transcription
  misc_feature: MA Experiment 108535 PARAMETER Experiment Name: Zm_Meristem_P Parameter: Age (day) Value: 8
  misc_feature: MA Experiment 108535 PARAMETER Experiment Name: Zm_Meristem_P Parameter: Organism Value: Zea mays
  misc_feature: MA Experiment 108535 PARAMETER Experiment Name: Zm_Meristem_P Parameter: Plant Line Value: 35A19
  misc_feature: MA Experiment 108535 PARAMETER Experiment Name: Zm_Meristem_P Parameter: Tissue Value: Root Meristem vs. Above Root Meristem
agatcccgccgcgcgtctccttccgcgacacgctctcagtctcacgccacagctcgtcgcgttcgtcaacggtcgacccatcgcctatggaaggaaggcgcgaaccggaggcggacggcggaaaggccgggggcctcccgccgtcggagccgccgcacctgcagggccagccgccgcaggagtacgggtacggcacgttccagggccctcgacatcctcccgtcgggttcccgcagcctgccccgcctcccgggctcggcggcggcggctatcacaaccagcagcagccgtacgcgcctgcggagacgtactacgcccaggggtaccaggccgtaccaggctatggtcctgttgctgaaggaagacctgtgagaatgagggcgtctcccatgttgtggcctcggcttaggctggtgtctgttcataaccgggtttttcttggctgccattccatggttcattggagctttcgttcttatatgtgtgcgggtacatgaccaacgagagaaaccaggatacgttgcttgcacaattgctgccgttgttgctgccgttgccatcctcctgggggtaactaaaggaacgcacgtgtggtgaattgcctccagagaaggcaatcaatgtgtatttgcgttgtatatctgtgtgtgctaaaaagtgtggagcaacatccatgtgaatgtgatcttatgtccatatatattctactttgcaatgaaatttgaaatgtagt

SEQ ID NO: 12541 - protein, 164 aa, Zea mays subsp. mays
  peptide (1)..(164): Ceres Seq. ID no. 12404216
  misc_feature (59)..(129): Homolog of NCBI NO: 18394436 NR Description: expressed protein; protein id: At1g17080.1, by cDNA: gi_15010587, supported by cDNA: gi_20453322 [Arabidopsis
  misc_feature (41)..(129): Homolog of NCBI NO: 21554011 NR Description: unknown [Arabidopsis thaliana]
  misc_feature (41)..(129): Homolog of NCBI NO: 18404524 NR Description: expressed protein; protein id: At1g53560.1, by cDNA: 19263., supported by cDNA: gi_20466665 [Arabidopsis >gi|25372875|pir||F96575 hypothetical protein F22G10.10
IPPRVSFRDTLSVSRHSSSRSSTVDPSPMEGRREPEADGGKAGGLPPSEPPHLQGQPPQEYGYGTFQGPRHPPVGFPQPAPPPGLGGGGYHNQQQPYAPAETYYAQGYQAVPGYGPVAEGRPVRMRASPMLWPRLRLVSVHNRVFLGCHSMVHWSFRSYMCAGT

SEQ ID NO: 12542 - protein, 136 aa, Zea mays subsp. mays
  peptide (1)..(136): Ceres Seq. ID no. 12404217
  misc_feature (31)..(101): Homolog of NCBI NO: 18394436 NR Description: expressed protein; protein id: At1g17080.1, by cDNA: gi_15010587, supported by cDNA: gi_20453322 [Arabidopsis
  misc_feature (13)..(101): Homolog of NCBI NO: 21554011 NR Description: unknown [Arabidopsis thaliana]
  misc_feature (13)..(101): Homolog of NCBI NO: 18404524 NR Description: expressed protein; protein id: At1g53560.1, by cDNA: 19263., supported by cDNA: gi_20466665 [Arabidopsis >gi|25372875|pir||F96575 hypothetical protein F22G10.10
MEGRREPEADGGKAGGLPPSEPPHLQGQPPQEYGYGTFQGPRHPPVGFPQPAPPPGLGGGGYHNQQQPYAPAETYYAQGYQAVPGYGPVAEGRPVRMRASPMLWPRLRLVSVHNRVFLGCHSMVHWSFRSYMCAGT

SEQ ID NO: 12543 - protein, 123 aa, Zea mays subsp. mays
  peptide (1)..(123): Ceres Seq. ID no. 12404218
  misc_feature (106)..(123): Homolog of NCBI NO: 18400450 NR Description: Expressed protein; protein id: At3g14595.1,
  misc_feature (106)..(123): Homolog of NCBI NO: 21554784 NR Description: unknown [Arabidopsis thaliana]
RSRRASPSATRSQSHATARRVRQRSTHRLWKEGANRRRTAERPGASRRRSRRTCRASRRRSTGTARSRALDILPSGSRSLPRLPGSAAAAITTSSSRTRLRRRTTPRGTRPYQAMVLLLKEDL

SEQ ID NO: 12544 - DNA, 792 bp, Zea mays subsp. mays
  misc_feature (1)..(792): Ceres Seq. ID no. 12372540
  misc_feature: MA Experiment ID: 108535 Result: Up-regulated in Transcription
  misc_feature: MA Experiment 108535 PARAMETER Experiment Name: Zm_Meristem_P Parameter: Age (day) Value: 8
  misc_feature: MA Experiment 108535 PARAMETER Experiment Name: Zm_Meristem_P Parameter: Organism Value: Zea mays
  misc_feature: MA Experiment 108535 PARAMETER Experiment Name: Zm_Meristem_P Parameter: Plant Line Value: 35A19
  misc_feature: MA Experiment 108535 PARAMETER Experiment Name: Zm_Meristem_P Parameter: Tissue Value: Root Meristem vs. Above Root Meristem
  misc_feature: MA Experiment ID: 108543 Result: Up-regulated in Transcription
  misc_feature: MA Experiment ID: 20000478 Result: Down-regulated in Transcription
  misc_feature: MA Experiment 20000478 PARAMETER Experiment Name: Zm_5mM_SA_P Parameter: Age (day) Value: 11
  misc_feature: MA Experiment 20000478 PARAMETER Experiment Name: Zm_5mM_SA_P Parameter: Organism Value: Zea mays
  misc_feature: MA Experiment 20000478 PARAMETER Experiment Name: Zm_5mM_SA_P Parameter: Plant Line Value: 35A19
  misc_feature: MA Experiment 20000478 PARAMETER Experiment Name: Zm_5mM_SA_P Parameter: Timepoint (hr) Value: 72
  misc_feature: MA Experiment 20000478 PARAMETER Experiment Name: Zm_5mM_SA_P Parameter: Tissue Value: Aerial
  misc_feature: MA Experiment 20000478 PARAMETER Experiment Name: Zm_5mM_SA_P Parameter: Treatment Value: 5mM SA vs. No Treatment
  misc_feature: MA Experiment ID: 20000535 Result: Up-regulated in Transcription
  misc_feature: MA Experiment 20000535 PARAMETER Experiment Name: Zm_Hybrid_Seed_Dev_P Parameter: DAP Value: 30 vs. 12
  misc_feature: MA Experiment 20000535 PARAMETER Experiment Name: Zm_Hybrid_Seed_Dev_P Parameter: Organism Value: Zea mays
  misc_feature: MA Experiment 20000535 PARAMETER Experiment Name: Zm_Hybrid_Seed_Dev_P Parameter: Plant Line Value: 35A19
  misc_feature: MA Experiment 20000535 PARAMETER Experiment Name: Zm_Hybrid_Seed_Dev_P Parameter: Tissue Value: Embryo vs. Unfert Floret
  misc_feature: MA Experiment ID: 20000632 Result: Down-regulated in Transcription
  misc_feature: MA Experiment 20000632 PARAMETER Experiment Name: Zm_Herbicide-Treatments_P Parameter: Timepoint (hr) Value: 4
  misc_feature: MA Experiment 20000632 PARAMETER Experiment Name: Zm_Herbicide-Treatments_P Parameter: Tissue Value: Aerial
  misc_feature: MA Experiment 20000632 PARAMETER Experiment Name: Zm_Herbicide-Treatments_P Parameter: Treatment Value: Glean vs. No Treatment
  misc_feature: MA Experiment ID: 20000633 Result: Down-regulated in Transcription
  misc_feature: MA Experiment 20000633 PARAMETER Experiment Name: Zm_Herbicide-Treatments_P Parameter: Timepoint (hr) Value: 4
  misc_feature: MA Experiment 20000633 PARAMETER Experiment Name: Zm_Herbicide-Treatments_P Parameter: Tissue Value: Aerial
  misc_feature: MA Experiment 20000633 PARAMETER Experiment Name: Zm_Herbicide-Treatments_P Parameter: Treatment Value: Trimec vs. No Treatment
  misc_feature: MA Experiment ID: 20001614 Result: Up-regulated in Transcription
  misc_feature: MA Experiment 20001614 PARAMETER Experiment Name: Zm_50ppm_KNO3_L-to-H_P Parameter: Age (day) Value: 21
  misc_feature: MA Experiment 20001614 PARAMETER Experiment Name: Zm_50ppm_KNO3_L-to-H_P Parameter: Organism Value: Zea mays
  misc_feature: MA Experiment 20001614 PARAMETER Experiment Name: Zm_50ppm_KNO3_L-to-H_P Parameter: Plant Line Value: 35A19
  misc_feature: MA Experiment 20001614 PARAMETER Experiment Name: Zm_50ppm_KNO3_L-to-H_P Parameter: Timepoint (hr) Value: 48
  misc_feature: MA Experiment 20001614 PARAMETER Experiment Name: Zm_50ppm_KNO3_L-to-H_P Parameter: Tissue Value: Roots
  misc_feature: MA Experiment 20001614 PARAMETER Experiment Name: Zm_50ppm_KNO3_L-to-H_P Parameter: Treatment Value: 50ppm KNO3 vs. 50ppm KCl
atatccgttgtggcagcagccttcgtgcaggcatggcgagctcatcttgtgcactgctgggtctggcctgcttcgtgctcctggcggcggcagccggcgccacgcagtacaaggtcggcggcgacaatggctgggccgtgccggacgccaccgccgagtcgttcaacacctgggcggagaagaccagcttccagatcgggcgacagcctcttgttcgtgtaccccaaggacaaggactcggtgctgctggtggagccggccgactacaacgcctgcaacacctcctcctacgacaagcagttcgacgacggcagcacgtccgtggcgctggaccgcgccggcgccttcttcttcatcagcggcgtcgaggccaactgccgcgccaacgagaagctcatcgtcatggtcgccggcgcgggcgcgccggcgccggccccggaccggcagggctccggctcttcctcctccccgtcgacgtccgcgccggtaccctccaagggtggcggcgccccggtgccgccgtcctcgcctaaggcccccgccgccaagaactccacggccaagggcgcgcctcccgccgccggcaccgacaggaacggcgctggtgctggactcgccgtggcaggcctcgtcgcctcggttgcaggatgcgtcgcccacgccatgcttgctctctgaaaccgaaaactgctggatgcagtgcagtcgccgtgtagtgtaacaaaccgtgtgggattgtgaacagagtgtatctttcgtgttcgttgcgattcagcgggaaaaaacaaattt

SEQ ID NO: 12545 - protein, 239 aa, Zea mays subsp. mays
  peptide (1)..(239): Ceres Seq. ID no. 12372541
  misc_feature (85)..(212): Pfam Name: Glycoprotein GG/GX Pfam Description: Glycoprotein GG/GX
  misc_feature (87)..(221): Homolog of NCBI NO: 7441829 NR Description: proline-rich cell wall protein - upland cotton
  misc_feature (88)..(219): Homolog of NCBI NO: 22330504 NR Description: arabinogalactan-protein, putative (AGP19); This structure is inaccurate, likely due to discrepancies within bac sequences. This will be resolved asap. In the meantime, an
  misc_feature (87)..(227): Homolog of NCBI NO: 7441829 NR Description: proline-rich cell wall protein - upland cotton
  misc_feature (85)..(221): Homolog of NCBI NO: 6523547 NR Description: hydroxyproline-rich glycoprotein DZ-HRGP [Volvox
  misc_feature (12)..(221): Homolog of NCBI NO: 25989119 NR Description: unknown [Streptomyces aureofaciens]
  misc_feature (63)..(218): Homolog of NCBI NO: 11095327 NR Description: unknown [Paracoccus pantotrophus]
  misc_feature (75)..(199): Homolog of NCBI NO: 22330504 NR Description: arabinogalactan-protein, putative (AGP19); This structure is inaccurate, likely due to discrepancies within bac sequences. This will be resolved asap. In the meantime, an
  misc_feature (87)..(221): Homolog of NCBI NO: 27375632 NR Description: blr0521 [Bradyrhizobium japonicum]
  misc_feature (91)..(196): Homolog of NCBI NO: 81286 NR Description: extensin - Volvox carteri (fragment)
  misc_feature (87)..(221): Homolog of NCBI NO: 15221470 NR Description: protein kinase, putative; protein id: supported by cDNA: gi_21280864 [Arabidopsis thaliana]
YPLWQQPSCRHGELILCTAGSGLLRAPGGGSRRHAVQGRRRQWLGRAGRHRRVVQHLGGEDQLPDRATASCSCTPRTRTRCCWWSRPTTTPATPPPTTSSSTTAARPWRWTAPAPSSSSAASRPTAAPTRSSSSWSPARARRRRPRTGRAPALPPPRRRPRRYPPRVAAPRCRRPRLRPPPPRTPRPRARLPPPAPTGTALVLDSPWQASSPRLQDASPTPCLLSETENCWMQCSRRVV

SEQ ID NO: 12546 - protein, 225 aa, Zea mays subsp. mays
  peptide (1)..(225): Ceres Seq. ID no. 12372542
  misc_feature (67)..(130): Pfam Name: Plastocyanin-like domain Pfam Description: Plastocyanin-like domain
  misc_feature (67)..(208): Homolog of NCBI NO: 15234789 NR Description: putative protein; protein id: At4g30590.1, by cDNA: 5104. [Arabidopsis thaliana] >gi|25407664|pir||H85357
  misc_feature (67)..(223): Homolog of NCBI NO: 14140127 NR Description: uclacyanin 3-like protein [Oryza sativa]
  misc_feature (67)..(208): Homolog of NCBI NO: 18402674 NR Description: expressed protein; protein id: At3g20570.1, by cDNA: 9965. [Arabidopsis thaliana] contains similarity to nodulin~gene_id:K10D20.11 [Arabidopsis
  misc_feature (67)..(197): Homolog of NCBI NO: 8515096 NR Description: phytocyanin homolog [Pinus taeda]
  misc_feature (44)..(201): Homolog of NCBI NO: 15234164 NR Description: putative protein; protein id: At4g27520.1, by cDNA: 33380., supported by cDNA: gi_13358224 [Arabidopsis
  misc_feature (44)..(201): Homolog of NCBI NO: 21592865 NR Description: unknown [Arabidopsis thaliana]
  misc_feature (65)..(210): Homolog of NCBI NO: 34908784 NR Description: P0415A04.29 [Oryza sativa (japonica
  misc_feature (67)..(208): Homolog of NCBI NO: 21618177 NR Description: unknown [Arabidopsis thaliana]
  misc_feature (67)..(216): Homolog of NCBI NO: 15224081 NR Description: nodulin-like protein; protein id: At2g23990.1
  misc_feature (67)..(186): Homolog of NCBI NO: 7670832 NR Description: dicyanin [Lycopersicon esculentum]
ISVVAAAFVQAWRAHLVHCWVWPASCSWRRQPAPRSTRSAATMAGPCRTPPPSRSTPGRRRPASRSGDSLLFVYPKDKDSVLLVEPADYNACNTSSYDKQFDDGSTSVALDRAGAFFFISGVEANCRANEKLIVMVAGAGAPAPAPDRQGSGSSSSPSTSAPVPSKGGGAPVPPSSPKAPAAKNSTAKGAPPAAGTDRNGAGAGLAVAGLVASVAGCVAHAMLAL

SEQ ID NO: 12547 - protein, 183 aa, Zea mays subsp. mays
  peptide (1)..(183): Ceres Seq. ID no. 12372543
  misc_feature (25)..(88): Pfam Name: Plastocyanin-like domain Pfam Description: Plastocyanin-like domain
  misc_feature (25)..(166): Homolog of NCBI NO: 18402674 NR Description: expressed protein; protein id: At3g20570.1, by cDNA: 9965. [Arabidopsis thaliana] contains similarity to nodulin~gene_id:K10D20.11 [Arabidopsis
  misc_feature (25)..(166): Homolog of NCBI NO: 21618177 NR Description: unknown [Arabidopsis thaliana]
  misc_feature (25)..(155): Homolog of NCBI NO: 8515096 NR Description: phytocyanin homolog [Pinus taeda]
  misc_feature (23)..(168): Homolog of NCBI NO: 34908784 NR Description: P0415A04.29 [Oryza sativa (japonica
  misc_feature (2)..(159): Homolog of NCBI NO: 15234164 NR Description: putative protein; protein id: At4g27520.1, by cDNA: 33380., supported by cDNA: gi_13358224 [Arabidopsis
  misc_feature (2)..(159): Homolog of NCBI NO: 21592865 NR Description: unknown [Arabidopsis thaliana]
  misc_feature (25)..(166): Homolog of NCBI NO: 15234789 NR Description: putative protein; protein id: At4g30590.1, by cDNA: 5104. [Arabidopsis thaliana] >gi|25407664|pir||H85357
  misc_feature (25)..(181): Homolog of NCBI NO: 14140127 NR Description: uclacyanin 3-like protein [Oryza sativa]
  misc_feature (25)..(174): Homolog of NCBI NO: 15224081 NR Description: nodulin-like protein; protein id: At2g23990.1
  misc_feature (25)..(144): Homolog of NCBI NO: 7670832 NR Description: dicyanin [Lycopersicon esculentum]
MAGPCRTPPPSRSTPGRRRPASRSGDSLLFVYPKDKDSVLLVEPADYNACNTSSYDKQFDDGSTSVALDRAGAFFFISGVEANCRANEKLIVMVAGAGAPAPAPDRQGSGSSSSPSTSAPVPSKGGGAPVPPSSPKAPAAKNSTAKGAPPAAGTDRNGAGAGLAVAGLVASVAGCVAHAMLAL

SEQ ID NO: 12548 - DNA, 646 bp, Zea mays subsp. mays
  misc_feature (1)..(646): Ceres Seq. ID no. 12483995
  misc_feature: MA Experiment ID: 108515 Result: Down-regulated in Transcription
  misc_feature: MA Experiment 108515 PARAMETER Experiment Name: Zm_2mM_SA_P Parameter: Age (day) Value: 8
  misc_feature: MA Experiment 108515 PARAMETER Experiment Name: Zm_2mM_SA_P Parameter: Organism Value: Zea mays
  misc_feature: MA Experiment 108515 PARAMETER Experiment Name: Zm_2mM_SA_P Parameter: Plant Line Value: 35A19
  misc_feature: MA Experiment 108515 PARAMETER Experiment Name: Zm_2mM_SA_P Parameter: Timepoint (hr) Value: 12
  misc_feature: MA Experiment 108515 PARAMETER Experiment Name: Zm_2mM_SA_P Parameter: Tissue Value: Aerial
  misc_feature: MA Experiment 108515 PARAMETER Experiment Name: Zm_2mM_SA_P Parameter: Treatment Value: 2mM SA vs. No Treatment
  misc_feature: MA Experiment ID: 108523 Result: Down-regulated in Transcription
  misc_feature: MA Experiment 108523 PARAMETER Experiment Name: Zm_42deg_Heat_P Parameter: Age (day) Value: 8
  misc_feature: MA Experiment 108523 PARAMETER Experiment Name: Zm_42deg_Heat_P Parameter: Organism Value: Zea mays
  misc_feature: MA Experiment 108523 PARAMETER Experiment Name: Zm_42deg_Heat_P Parameter: Plant Line Value: 35A19
  misc_feature: MA Experiment 108523 PARAMETER Experiment Name: Zm_42deg_Heat_P Parameter: Temperature (deg C) Value: 42 vs. 22
  misc_feature: MA Experiment 108523 PARAMETER Experiment Name: Zm_42deg_Heat_P Parameter: Timepoint (hr) Value: 6
  misc_feature: MA Experiment 108523 PARAMETER Experiment Name: Zm_42deg_Heat_P Parameter: Tissue Value: Aerial
  misc_feature: MA Experiment ID: 108535 Result: Up-regulated in Transcription
  misc_feature: MA Experiment 108535 PARAMETER Experiment Name: Zm_Meristem_P Parameter: Age (day) Value: 8
  misc_feature: MA Experiment 108535 PARAMETER Experiment Name: Zm_Meristem_P Parameter: Organism Value: Zea mays
  misc_feature: MA Experiment 108535 PARAMETER Experiment Name: Zm_Meristem_P Parameter: Plant Line Value: 35A19
  misc_feature: MA Experiment 108535 PARAMETER Experiment Name: Zm_Meristem_P Parameter: Tissue Value: Root Meristem vs. Above Root Meristem
  misc_feature: MA Experiment ID: 108544 Result: Down-regulated in Transcription
  misc_feature: MA Experiment ID: 108597 Result: Down-regulated in Transcription
  misc_feature: MA Experiment 108597 PARAMETER Experiment Name: Zm_100uM_ABA_P Parameter: Age (day) Value: 9
  misc_feature: MA Experiment 108597 PARAMETER Experiment Name: Zm_100uM_ABA_P Parameter: Organism Value: Zea mays
  misc_feature: MA Experiment 108597 PARAMETER Experiment Name: Zm_100uM_ABA_P Parameter: Plant Line Value: 35A19
  misc_feature: MA Experiment 108597 PARAMETER Experiment Name: Zm_100uM_ABA_P Parameter: Timepoint (hr) Value: 24
  misc_feature: MA Experiment 108597 PARAMETER Experiment Name: Zm_100uM_ABA_P Parameter: Tissue Value: Aerial
  misc_feature: MA Experiment 108597 PARAMETER Experiment Name: Zm_100uM_ABA_P Parameter: Treatment Value: 100uM ABA vs. No Treatment
  misc_feature: MA Experiment ID: 20000477 Result: Down-regulated in Transcription
  misc_feature: MA Experiment 20000477 PARAMETER Experiment Name: Zm_5mM_SA_P Parameter: Age (day) Value: 10
  misc_feature: MA Experiment 20000477 PARAMETER Experiment Name: Zm_5mM_SA_P Parameter: Organism Value: Zea mays
  misc_feature: MA Experiment 20000477 PARAMETER Experiment Name: Zm_5mM_SA_P Parameter: Plant Line Value: 35A19
  misc_feature: MA Experiment 20000477 PARAMETER Experiment Name: Zm_5mM_SA_P Parameter: Timepoint (hr) Value: 48
  misc_feature: MA Experiment 20000477 PARAMETER Experiment Name: Zm_5mM_SA_P Parameter: Tissue Value: Aerial
  misc_feature: MA Experiment 20000477 PARAMETER Experiment Name: Zm_5mM_SA_P Parameter: Treatment Value: 5mM SA vs. No Treatment
  misc_feature: MA Experiment ID: 20000478 Result: Down-regulated in Transcription
  misc_feature: MA Experiment 20000478 PARAMETER Experiment Name: Zm_5mM_SA_P Parameter: Age (day) Value: 11
  misc_feature: MA Experiment 20000478 PARAMETER Experiment Name: Zm_5mM_SA_P Parameter: Organism Value: Zea mays
  misc_feature: MA Experiment 20000478 PARAMETER Experiment Name: Zm_5mM_SA_P Parameter: Plant Line Value: 35A19
  misc_feature: MA Experiment 20000478 PARAMETER Experiment Name: Zm_5mM_SA_P Parameter: Timepoint (hr) Value: 72
  misc_feature: MA Experiment 20000478 PARAMETER Experiment Name: Zm_5mM_SA_P Parameter: Tissue Value: Aerial
  misc_feature: MA Experiment 20000478 PARAMETER Experiment Name: Zm_5mM_SA_P Parameter: Treatment Value: 5mM SA vs. No Treatment
  misc_feature: MA Experiment ID: 20000479 Result: Down-regulated in Transcription
  misc_feature: MA Experiment 20000479 PARAMETER Experiment Name: Zm_Drought_P Parameter: Age (day) Value: 10
  misc_feature: MA Experiment 20000479 PARAMETER Experiment Name: Zm_Drought_P Parameter: Organism Value: Zea mays
  misc_feature: MA Experiment 20000479 PARAMETER Experiment Name: Zm_Drought_P Parameter: Plant Line Value: 35A19
  misc_feature: MA Experiment 20000479 PARAMETER Experiment Name: Zm_Drought_P Parameter: Timepoint (hr) Value: 48
  misc_feature: MA Experiment 20000479 PARAMETER Experiment Name: Zm_Drought_P Parameter: Tissue Value: Aerial
  misc_feature: MA Experiment 20000479 PARAMETER Experiment Name: Zm_Drought_P Parameter: Treatment Value: Drought vs. No Drought
  misc_feature: MA Experiment ID: 20000632 Result: Down-regulated in Transcription
  misc_feature: MA Experiment 20000632 PARAMETER Experiment Name: Zm_Herbicide-Treatments_P Parameter: Timepoint (hr) Value: 4
  misc_feature: MA Experiment 20000632 PARAMETER Experiment Name: Zm_Herbicide-Treatments_P Parameter: Tissue Value: Aerial
  misc_feature: MA Experiment 20000632 PARAMETER Experiment Name: Zm_Herbicide-Treatments_P Parameter: Treatment Value: Glean vs. No Treatment
  misc_feature: MA Experiment ID: 20000633 Result: Down-regulated in Transcription
  misc_feature: MA Experiment 20000633 PARAMETER Experiment Name: Zm_Herbicide-Treatments_P Parameter: Timepoint (hr) Value: 4
  misc_feature: MA Experiment 20000633 PARAMETER Experiment Name: Zm_Herbicide-Treatments_P Parameter: Tissue Value: Aerial
  misc_feature: MA Experiment 20000633 PARAMETER Experiment Name: Zm_Herbicide-Treatments_P Parameter: Treatment Value: Trimec vs. No Treatment
ctacgcaacctcccactgcattctcgaattccgattcccaatccagcaaaccctaccagccttttgcaaactcagagagggacccgatggcacccaaggcggagaagaagccggcggcgaagaagcccgcagaggaggagcccgcggccccggcggagaaggctcccgctgggaagaagccgaaggcggagaagcggctcccggcgggaaaatccgccggcaaggaaggcggtgttgacaagaaggggcggaagaaggccaagaagagcgtggagacgtacaagatctacatcttcaaggtgctgaagcaggtgcacccggacatcggcatctcctccaaggccatgtccatcatgaactccttcatcaacgacatcttcgagaagctcgccggcgaggcggccaagctcgcccgttacaacaagaagcccaccatcacctcccgggagatccagacctccgtccgcctcgttctacccggcgagctcgccaagcacgccgtctcggagggcaccaaggccgtcaccaagttcacctcgtcctaagctcctttcgagtaggtccttaagcgccgtggcgccttttgactgtatggaatgtttgtcatctgaaagttgatctgagcagtgcaatatataattctggc

SEQ ID NO: 12549 - protein, 180 aa, Zea mays subsp. mays
  peptide (1)..(180): Ceres Seq. ID no. 12483996
  misc_feature (51)..(180): Pfam Name: Core histone H2A/H2B/H3/H4 Pfam Description: Core histone H2A/H2B/H3/H4
  misc_feature (29)..(180): Homolog of NCBI NO: 1708107 NR Description: Histone H2B >gi|7439752|pir||T02077 histone H2B -
  misc_feature (29)..(180): Homolog of NCBI NO: 122022 NR Description: Histone H2B >gi|283025|pir||S22323 histone H2B -
  misc_feature (29)..(180): Homolog of NCBI NO: 3913804 NR Description: Histone H2B.3 >gi|577825|emb|CAA49584.1| H2B
  misc_feature (29)..(180): Homolog of NCBI NO: 399854 NR Description: Histone H2B.2 >gi|283042|pir||S28049 histone H2B
  misc_feature (29)..(180): Homolog of NCBI NO: 399853 NR Description: Histone H2B.1 >gi|283041|pir||S28048 histone H2B
  misc_feature (29)..(180): Homolog of NCBI NO: 34895838 NR Description: putative histone H2B [Oryza sativa (japonica group)] >gi|13872901|dbj|BAB44008.1| putative histone H2B [Oryza
  misc_feature (15)..(180): Homolog of NCBI NO: 34876159 NR Description: similar to Histone H2B 291B [Rattus norvegicus]
  misc_feature (25)..(177): Homolog of NCBI NO: 15223150 NR Description: histone H2B, putative; protein id: At1g08170.1 thaliana] >gi|6579213|gb|AAF18256.1|AC011438_18 T23G18.3 thaliana] >gi|8778831|gb|AAF79830.1|AC026875_10 T6D22.26
TQPPTAFSNSDSQSSKPYQPFANSERDPMAPKAEKKPAAKKPAEEEPAAPAEKAPAGKKPKAEKRLPAGKSAGKEGGVDKKGRKKAKKSVETYKIYIFKVLKQVHPDIGISSKAMSIMNSFINDIFEKLAGEAAKLARYNKKPTITSREIQTSVRLVLPGELAKHAVSEGTKAVTKFTSS

SEQ ID NO: 12550 - protein, 152 aa, Zea mays subsp. mays
  peptide (1)..(152): Ceres Seq. ID no. 12483997
  misc_feature (23)..(152): Pfam Name: Core histone H2A/H2B/H3/H4 Pfam Description: Core histone H2A/H2B/H3/H4
  misc_feature (1)..(152): Homolog of NCBI NO: 1708107 NR Description: Histone H2B >gi|7439752|pir||T02077 histone H2B -
  misc_feature (1)..(152): Homolog of NCBI NO: 122022 NR Description: Histone H2B >gi|283025|pir||S22323 histone H2B -
  misc_feature (1)..(152): Homolog of NCBI NO: 3913804 NR Description: Histone H2B.3 >gi|577825|emb|CAA49584.1| H2B
  misc_feature (1)..(152): Homolog of NCBI NO: 399854 NR Description: Histone H2B.2 >gi|283042|pir||S28049 histone H2B
  misc_feature (1)..(152): Homolog of NCBI NO: 399853 NR Description: Histone H2B.1 >gi|283041|pir||S28048 histone H2B
  misc_feature (1)..(152): Homolog of NCBI NO: 34895838 NR Description: putative histone H2B [Oryza sativa (japonica group)] >gi|13872901|dbj|BAB44008.1| putative histone H2B [Oryza
  misc_feature (1)..(152): Homolog of NCBI NO: 34876159 NR Description: similar to Histone H2B 291B [Rattus norvegicus]
  misc_feature (1)..(149): Homolog of NCBI NO: 15223150 NR Description: histone H2B, putative; protein id: At1g08170.1 thaliana] >gi|6579213|gb|AAF18256.1|AC011438_18 T23G18.3 thaliana] >gi|8778831|gb|AAF79830.1|AC026875_10 T6D22.26
MAPKAEKKPAAKKPAEEEPAAPAEKAPAGKKPKAEKRLPAGKSAGKEGGVDKKGRKKAKKSVETYKIYIFKVLKQVHPDIGISSKAMSIMNSFINDIFEKLAGEAAKLARYNKKPTITSREIQTSVRLVLPGELAKHAVSEGTKAVTKFTSS

SEQ ID NO: 12551 - protein, 101 aa, Zea mays subsp. mays
  peptide (1)..(101): Ceres Seq. ID no. 12483998
  misc_feature (31)..(86): Pfam Name: Protamine P1 Pfam Description: Protamine P1
  misc_feature (33)..(101): Homolog of NCBI NO: 25143299 NR Description: pre-mRNA splicing SR protein related RSR-1 (68.2
  misc_feature (8)..(101): Homolog of NCBI NO: 9843651 NR Description: SRM102 [Arabidopsis thaliana]
  misc_feature (8)..(101): Homolog of NCBI NO: 30684163 NR Description: proline-rich protein -related [Arabidopsis >gi|21928131|gb|AAM78093.1| At2g29210/F16P2.41 [Arabidopsis >gi|23308459|gb|AAN18199.1| At2g29210/F16P2.41 [Arabidopsis
  misc_feature (2)..(101): Homolog of NCBI NO: 25143299 NR Description: pre-mRNA splicing SR protein related RSR-1 (68.2
  misc_feature (38)..(101): Homolog of NCBI NO: 25143299 NR Description: pre-mRNA splicing SR protein related RSR-1 (68.2
  misc_feature (9)..(101): Homolog of NCBI NO: 9843651 NR Description: SRM102 [Arabidopsis thaliana]
  misc_feature (9)..(101): Homolog of NCBI NO: 30684163 NR Description: proline-rich protein -related [Arabidopsis >gi|21928131|gb|AAM78093.1| At2g29210/F16P2.41 [Arabidopsis >gi|23308459|gb|AAN18199.1| At2g29210/F16P2.41 [Arabidopsis
  misc_feature (9)..(101): Homolog of NCBI NO: 25408026 NR Description: probable proline-rich protein [imported] -
  misc_feature (11)..(101): Homolog of NCBI NO: 2429362 NR Description: proline rich protein [Santalum album]
  misc_feature (9)..(101): Homolog of NCBI NO: 9843653 NR Description: splicing factor SC35 [Arabidopsis thaliana]
LRNLPLHSRIPIPNPANPTSLLQTQRGTRWHPRRRRSRRRRSPQRRSPRPRRRRLPLGRSRRRRSGSRRENPPARKAVLTRRGGRRPRRAWRRTRSTSSRC

SEQ ID NO: 12552 - DNA, 1486 bp, Zea mays subsp. mays
  misc_feature (1)..(1486): Ceres Seq. ID no. 12411515
  misc_feature: MA Experiment ID: 108535 Result: Up-regulated in Transcription
  misc_feature: MA Experiment 108535 PARAMETER Experiment Name: Zm_Meristem_P Parameter: Age (day) Value: 8
  misc_feature: MA Experiment 108535 PARAMETER Experiment Name: Zm_Meristem_P Parameter: Organism Value: Zea mays
  misc_feature: MA Experiment 108535 PARAMETER Experiment Name: Zm_Meristem_P Parameter: Plant Line Value: 35A19
  misc_feature: MA Experiment 108535 PARAMETER Experiment Name: Zm_Meristem_P Parameter: Tissue Value: Root Meristem vs. Above Root Meristem
  misc_feature: MA Experiment ID: 20000487 Result: Up-regulated in Transcription
  misc_feature: MA Experiment 20000487 PARAMETER Experiment Name: Zm_50mM_NH4NO3_L_to_H_P Parameter: Organism Value: Zea mays
  misc_feature: MA Experiment 20000487 PARAMETER Experiment Name: Zm_50mM_NH4NO3_L_to_H_P Parameter: Timepoint (hr) Value: 4
  misc_feature: MA Experiment 20000487 PARAMETER Experiment Name: Zm_50mM_NH4NO3_L_to_H_P Parameter: Tissue Value: Leaves
  misc_feature: MA Experiment 20000487 PARAMETER Experiment Name: Zm_50mM_NH4NO3_L_to_H_P Parameter: Treatment Value: 50mM NH4NO3 vs. 100mM Mannitol
  misc_feature: MA Experiment ID: 20000488 Result: Up-regulated in Transcription
  misc_feature: MA Experiment 20000488 PARAMETER Experiment Name: Zm_50mM_NH4NO3_L_to_H_P Parameter: Organism Value: Zea mays
  misc_feature: MA Experiment 20000488 PARAMETER Experiment Name: Zm_50mM_NH4NO3_L_to_H_P Parameter: Timepoint (hr) Value: 8
  misc_feature: MA Experiment 20000488 PARAMETER Experiment Name: Zm_50mM_NH4NO3_L_to_H_P Parameter: Tissue Value: Leaves
  misc_feature: MA Experiment 20000488 PARAMETER Experiment Name: Zm_50mM_NH4NO3_L_to_H_P Parameter: Treatment Value: 50mM NH4NO3 vs. 100mM Mannitol
  misc_feature: MA Experiment ID: 20000535 Result: Up-regulated in Transcription
  misc_feature: MA Experiment 20000535 PARAMETER Experiment Name: Zm_Hybrid_Seed_Dev_P Parameter: DAP Value: 30 vs. 12
  misc_feature: MA Experiment 20000535 PARAMETER Experiment Name: Zm_Hybrid_Seed_Dev_P Parameter: Organism Value: Zea mays
  misc_feature: MA Experiment 20000535 PARAMETER Experiment Name: Zm_Hybrid_Seed_Dev_P Parameter: Plant Line Value: 35A19
  misc_feature: MA Experiment 20000535 PARAMETER Experiment Name: Zm_Hybrid_Seed_Dev_P Parameter: Tissue Value: Embryo vs. Unfert Floret
  misc_feature: MA Experiment ID: 20001606 Result: Up-regulated in Transcription
  misc_feature: MA Experiment 20001606 PARAMETER Experiment Name: Zm_50ppm_KNO3_L-to-H_P Parameter: Age (day) Value: 19
  misc_feature: MA Experiment 20001606 PARAMETER Experiment Name: Zm_50ppm_KNO3_L-to-H_P Parameter: Organism Value: Zea mays
  misc_feature: MA Experiment 20001606 PARAMETER Experiment Name: Zm_50ppm_KNO3_L-to-H_P Parameter: Plant Line Value: 35A19
  misc_feature: MA Experiment 20001606 PARAMETER Experiment Name: Zm_50ppm_KNO3_L-to-H_P Parameter: Timepoint (hr) Value: 8
  misc_feature: MA Experiment 20001606 PARAMETER Experiment Name: Zm_50ppm_KNO3_L-to-H_P Parameter: Tissue Value: Shoots
  misc_feature: MA Experiment 20001606 PARAMETER Experiment Name: Zm_50ppm_KNO3_L-to-H_P Parameter: Treatment Value: 50ppm KNO3 vs. 50ppm KCl
  misc_feature: MA Experiment ID: 20001612 Result: Up-regulated in Transcription
  misc_feature: MA Experiment 20001612 PARAMETER Experiment Name: Zm_50ppm_KNO3_L-to-H_P Parameter: Age (day) Value: 19
  misc_feature: MA Experiment 20001612 PARAMETER Experiment Name: Zm_50ppm_KNO3_L-to-H_P Parameter: Organism Value: Zea mays
  misc_feature: MA Experiment 20001612 PARAMETER Experiment Name: Zm_50ppm_KNO3_L-to-H_P Parameter: Plant Line Value: 35A19
  misc_feature: MA Experiment 20001612 PARAMETER Experiment Name: Zm_50ppm_KNO3_L-to-H_P Parameter: Timepoint (hr) Value: 8
  misc_feature: MA Experiment 20001612 PARAMETER Experiment Name: Zm_50ppm_KNO3_L-to-H_P Parameter: Tissue Value: Roots
  misc_feature: MA Experiment 20001612 PARAMETER Experiment Name: Zm_50ppm_KNO3_L-to-H_P Parameter: Treatment Value: 50ppm KNO3 vs. 50ppm KCl
atccgctttcggcgccgtcgccactcgccaccatctccaccgcctcctctcgacaagcatcccctcccatacccatggcaactgaccgtctcctccaccttctccgagcgccgacaggctctccggctgccgccgccaccacccgcgcggcttgttggggtcgtccacggacgcagcgcgtcgacgtctggcagggtgctgcggggattcgccgcgcgtccgtgtcctgctcgagcactagctctggcgggcaggggggactaacatataaggatgcaggcgtggacatagacgccggcgccgagctcgtgcgccgcatcgccaggatggcacccgggattggcggcttcggcggtctctttccctacaatgacgattatcttgttgctagcaccgatggggtggggacaaagctgaagcttgctttcgaaactggtattcatgatacaatcggcattgacctggtggcaatgagcgtcaatgacattgtaactctaggtgcaaaaccattgttcttcctagattactatgcaacgagcaagcttgatgttgatcttgcagagaaggttatcaaggggattagggatgggtgcgaacaatcagattgtgctctcctaggaggggagacagcagaaatgcctggtttctatgcagagggtgaatatgatctaagtggttttgctgtgggtgttgtgaagaagaataaagtcattgatggaaaaagcattgttaagggagatgtacttataggtcttccttccagtggtgttcattctaacgggttctctcttgttagaagagtactggagaaaagtggactttctttggatgatcagctcccaagaaatgatggcataacaactacggttggtgaagctctaatggcaccaaccttcatctatgttaagcaggtgcttgagattattagcaaaggtggtgtgaaaggactagcccacatcactggtggtggctttactgacaatatcccaagagtattcccctctggatgcggggcaaaaatttttactgggtcatgggaaatacctccaatcttcagttggcttcaacaggctggaaacattgatgatgcagagatgcggcgaacattcaatatgggcattggaatggttcttgtggtaagtcgagagtcagcagacagaattattgaagacacccatggatccagtcctgcttatcgcattggagaggtgattgagggtgatggggttcagtatgtctgacctcgtatgccttttatagtggcttgagacttgttggtctgctctgcaaagcagcagagtttatgtaacaacataatcttgtggtgttaagttctgcaccactactcccgctagaaagtgaagggtaaccaaataattatttgattggatccacgggaacttctctaaaggcttaccagaggaggccattagggggaaatacagttgttgagaatttttcatggagagcggtattgttttcgttg

SEQ ID NO: 12553 - protein, 412 aa, Zea mays subsp. mays
  peptide (1)..(412): Ceres Seq. ID no. 12411516
  misc_feature (87)..(232): Pfam Name: AIR synthase related protein, N-terminal domain Pfam Description: AIR synthase related protein, N-terminal domain
  misc_feature (26)..(412): Homolog of NCBI NO: 34897250 NR Description: putative 5'-phosphoribosyl-5-aminoimidazole
  misc_feature (87)..(411): Homolog of NCBI NO: 15233161 NR Description: phosphoribosylformylglycinamidine cyclo-ligase protein id: At3g55010.1, supported by cDNA: gi_16974614
  misc_feature (65)..(411): Homolog of NCBI NO: 1709925 NR Description: Phosphoribosylformylglycinamidine cyclo-ligase,
  misc_feature (87)..(368): Homolog of NCBI NO: 541885 NR Description: phosphoribosylformylglycinamidine cyclo-ligase
  misc_feature (78)..(412): Homolog of NCBI NO: 23029993 NR Description: hypothetical protein [Microbulbifer degradans
  misc_feature (87)..(408): Homolog of NCBI NO: 20807085 NR Description: Phosphoribosylaminoimidazol (AIR) synthetase tengcongensis] >gi|20515576|gb|AAM23860.1|
  misc_feature (87)..(411): Homolog of NCBI NO: 34499070 NR Description: phosphoribosylformylglycinamidine cyclo-ligase
  misc_feature (77)..(405): Homolog of NCBI NO: 22976704 NR Description: hypothetical protein [Ralstonia metallidurans]
  misc_feature (87)..(411): Homolog of NCBI NO: 15794333 NR Description: putative phosphoribosylformylglycinamidine
  misc_feature (87)..(409): Homolog of NCBI NO: 33591483 NR Description: phosphoribosylformylglycinamidine cyclo-ligase pertussis] >gi|33603034|ref|NP_890594.1|
PLSAPSPLATISTASSRQASPPIPMATDRLLHLLRAPTGSPAAAATTRAACWGRPRTQRVDVWQGAAGIRRASVSCSSTSSGGQGGLTYKDAGVDIDAGAELVRRIARMAPGIGGFGGLFPYNDDYLVASTDGVGTKLKLAFETGIHDTIGIDLVAMSVNDIVTLGAKPLFFLDYYATSKLDVDLAEKVIKGIRDGCEQSDCALLGGETAEMPGFYAEGEYDLSGFAVGVVKKNKVIDGKSIVKGDVLIGLPSSGVHSNGFSLVRRVLEKSGLSLDDQLPRNDGITTTVGEALMAPTFIYVKQVLEIISKGGVKGLAHITGGGFTDNIPRVFPSGCGAKIFTGSWEIPPIFSWLQQAGNIDDAEMRRTFNMGIGMVLVVSRESADRIIEDTHGSSPAYRIGEVIEGDGVQYV

SEQ ID NO: 12554 - protein, 388 aa, Zea mays subsp. mays
  peptide (1)..(388): Ceres Seq. ID no. 12411517
  misc_feature (63)..(208): Pfam Name: AIR synthase related protein, N-terminal domain Pfam Description: AIR synthase related protein, N-terminal domain
  misc_feature (2)..(388): Homolog of NCBI NO: 34897250 NR Description: putative 5'-phosphoribosyl-5-aminoimidazole
  misc_feature (63)..(387): Homolog of NCBI NO: 15233161 NR Description: phosphoribosylformylglycinamidine cyclo-ligase protein id: At3g55010.1, supported by cDNA: gi_16974614
  misc_feature (41)..(387): Homolog of NCBI NO: 1709925 NR Description: Phosphoribosylformylglycinamidine cyclo-ligase,
  misc_feature (63)..(344): Homolog of NCBI NO: 541885 NR Description: phosphoribosylformylglycinamidine cyclo-ligase
  misc_feature (54)..(388): Homolog of NCBI NO: 23029993 NR Description: hypothetical protein [Microbulbifer degradans
  misc_feature (63)..(384): Homolog of NCBI NO: 20807085 NR Description: Phosphoribosylaminoimidazol (AIR) synthetase tengcongensis] >gi|20515576|gb|AAM23860.1|
  misc_feature (63)..(387): Homolog of NCBI NO: 34499070 NR Description: phosphoribosylformylglycinamidine cyclo-ligase
  misc_feature (53)..(381): Homolog of NCBI NO: 22976704 NR Description: hypothetical protein [Ralstonia metallidurans]
  misc_feature (63)..(387): Homolog of NCBI NO: 15794333 NR Description: putative phosphoribosylformylglycinamidine
  misc_feature (63)..(385): Homolog of NCBI NO: 33591483 NR Description: phosphoribosylformylglycinamidine cyclo-ligase pertussis] >gi|33603034|ref|NP_890594.1|
MATDRLLHLLRAPTGSPAAAATTRAACWGRPRTQRVDVWQGAAGIRRASVSCSSTSSGGQGGLTYKDAGVDIDAGAELVRRIARMAPGIGGFGGLFPYNDDYLVASTDGVGTKLKLAFETGIHDTIGIDLVAMSVNDIVTLGAKPLFFLDYYATSKLDVDLAEKVIKGIRDGCEQSDCALLGGETAEMPGFYAEGEYDLSGFAVGVVKKNKVIDGKSIVKGDVLIGLPSSGVHSNGFSLVRRVLEKSGLSLDDQLPRNDGITTTVGEALMAPTFIYVKQVLEIISKGGVKGLAHITGGGFTDNIPRVFPSGCGAKIFTGSWEIPPIFSWLQQAGNIDDAEMRRTFNMGIGMVLVVSRESADRIIEDTHGSSPAYRIGEVIEGDGVQYV

SEQ ID NO: 12555 - protein, 304 aa, Zea mays subsp. mays
  peptide (1)..(304): Ceres Seq. ID no. 12411518
  misc_feature (1)..(124): Pfam Name: AIR synthase related protein, N-terminal domain Pfam Description: AIR synthase related protein, N-terminal domain
  misc_feature (1)..(304): Homolog of NCBI NO: 34897250 NR Description: putative 5'-phosphoribosyl-5-aminoimidazole
  misc_feature (1)..(303): Homolog of NCBI NO: 15233161 NR Description: phosphoribosylformylglycinamidine cyclo-ligase protein id: At3g55010.1, supported by cDNA: gi_16974614
  misc_feature (1)..(303): Homolog of NCBI NO: 1709925 NR Description: Phosphoribosylformylglycinamidine cyclo-ligase,
  misc_feature (1)..(260): Homolog of NCBI NO: 541885 NR Description: phosphoribosylformylglycinamidine cyclo-ligase
  misc_feature (1)..(304): Homolog of NCBI NO: 23029993 NR Description: hypothetical protein [Microbulbifer degradans
  misc_feature (1)..(300): Homolog of NCBI NO: 20807085 NR Description: Phosphoribosylaminoimidazol (AIR) synthetase tengcongensis] >gi|20515576|gb|AAM23860.1|
  misc_feature (1)..(303): Homolog of NCBI NO: 34499070 NR Description: phosphoribosylformylglycinamidine cyclo-ligase
  misc_feature (1)..(297): Homolog of NCBI NO: 22976704 NR Description: hypothetical protein [Ralstonia metallidurans]
  misc_feature (1)..(303): Homolog of NCBI NO: 15794333 NR Description: putative phosphoribosylformylglycinamidine
  misc_feature (1)..(301): Homolog of NCBI NO: 33591483 NR Description: phosphoribosylformylglycinamidine cyclo-ligase pertussis] >gi|33603034|ref|NP_890594.1|
MAPGIGGFGGLFPYNDDYLVASTDGVGTKLKLAFETGIHDTIGIDLVAMSVNDIVTLGAKPLFFLDYYATSKLDVDLAEKVIKGIRDGCEQSDCALLGGETAEMPGFYAEGEYDLSGFAVGVVKKNKVIDGKSIVKGDVLIGLPSSGVHSNGFSLVRRVLEKSGLSLDDQLPRNDGITTTVGEALMAPTFIYVKQVLEIISKGGVKGLAHITGGGFTDNIPRVFPSGCGAKIFTGSWEIPPIFSWLQQAGNIDDAEMRRTFNMGIGMVLVVSRESADRIIEDTHGSSPAYRIGEVIEGDGVQYV

SEQ ID NO: 12556 - DNA, 1971 bp, Zea mays subsp. mays
  misc_feature (1)..(1971): Ceres Seq. ID no. 13492793
  misc_feature: MA Experiment ID: 108527 Result: Down-regulated in Transcription
  misc_feature: MA Experiment 108527 PARAMETER Experiment Name: Zm_5mM_NO_P Parameter: Age (day) Value: 8
  misc_feature: MA Experiment 108527 PARAMETER Experiment Name: Zm_5mM_NO_P Parameter: Organism Value: Zea mays
  misc_feature: MA Experiment 108527 PARAMETER Experiment Name: Zm_5mM_NO_P Parameter: Plant Line Value: 35A19
  misc_feature: MA Experiment 108527 PARAMETER Experiment Name: Zm_5mM_NO_P Parameter: Timepoint (hr) Value: 6
  misc_feature: MA Experiment 108527 PARAMETER Experiment Name: Zm_5mM_NO_P Parameter: Tissue Value: Aerial
  misc_feature: MA Experiment 108527 PARAMETER Experiment Name: Zm_5mM_NO_P Parameter: Treatment Value: 5mM NO vs. No Treatment
  misc_feature: MA Experiment ID: 108544 Result: Down-regulated in Transcription
  misc_feature: MA Experiment ID: 108556 Result: Down-regulated in Transcription
  misc_feature: MA Experiment 108556 PARAMETER Experiment Name: Zm_Drought_P Parameter: Age (day) Value: 9
  misc_feature: MA Experiment 108556 PARAMETER Experiment Name: Zm_Drought_P Parameter: Organism Value: Zea mays
  misc_feature: MA Experiment 108556 PARAMETER Experiment Name: Zm_Drought_P Parameter: Plant Line Value: 35A19
  misc_feature: MA Experiment 108556 PARAMETER Experiment Name: Zm_Drought_P Parameter: Timepoint (hr) Value: 24
  misc_feature: MA Experiment 108556 PARAMETER Experiment Name: Zm_Drought_P Parameter: Tissue Value: Aerial
  misc_feature: MA Experiment 108556 PARAMETER Experiment Name: Zm_Drought_P Parameter: Treatment Value: Drought vs. No Drought
  misc_feature: MA Experiment ID: 108687 Result: Down-regulated in Transcription
  misc_feature: MA Experiment 108687 PARAMETER Experiment Name: Zm_Embryos-Flowers__P Parameter: Tissue Value: Embryo vs. Aerial+
  misc_feature: MA Experiment ID: 20000478 Result: Down-regulated in Transcription
  misc_feature: MA Experiment 20000478 PARAMETER Experiment Name: Zm_5mM_SA_P Parameter: Age (day) Value: 11
  misc_feature: MA Experiment 20000478 PARAMETER Experiment Name: Zm_5mM_SA_P Parameter: Organism Value: Zea mays
  misc_feature: MA Experiment 20000478 PARAMETER Experiment Name: Zm_5mM_SA_P Parameter: Plant Line Value: 35A19
  misc_feature: MA Experiment 20000478 PARAMETER Experiment Name: Zm_5mM_SA_P Parameter: Timepoint (hr) Value: 72
  misc_feature: MA Experiment 20000478 PARAMETER Experiment Name: Zm_5mM_SA_P Parameter: Tissue Value: Aerial
  misc_feature: MA Experiment 20000478 PARAMETER Experiment Name: Zm_5mM_SA_P Parameter: Treatment Value: 5mM SA vs. No Treatment
  misc_feature: MA Experiment ID: 20000480 Result: Down-regulated in Transcription
  misc_feature: MA Experiment 20000480 PARAMETER Experiment Name: Zm_Drought_P Parameter: Age (day) Value: 11
  misc_feature: MA Experiment 20000480 PARAMETER Experiment Name: Zm_Drought_P Parameter: Organism Value: Zea mays
  misc_feature: MA Experiment 20000480 PARAMETER Experiment Name: Zm_Drought_P Parameter: Plant Line Value: 35A19
  misc_feature: MA Experiment 20000480 PARAMETER Experiment Name: Zm_Drought_P Parameter: Timepoint (hr) Value: 72
  misc_feature: MA Experiment 20000480 PARAMETER Experiment Name: Zm_Drought_P Parameter: Tissue Value: Aerial
  misc_feature: MA Experiment 20000480 PARAMETER Experiment Name: Zm_Drought_P Parameter: Treatment Value: Drought vs. No Drought
  misc_feature: MA Experiment ID: 20000535 Result: Up-regulated in Transcription
  misc_feature: MA Experiment 20000535 PARAMETER Experiment Name: Zm_Hybrid_Seed_Dev_P Parameter: DAP Value: 30 vs. 12
  misc_feature: MA Experiment 20000535 PARAMETER Experiment Name: Zm_Hybrid_Seed_Dev_P Parameter: Organism Value: Zea mays
  misc_feature: MA Experiment 20000535 PARAMETER Experiment Name: Zm_Hybrid_Seed_Dev_P Parameter: Plant Line Value: 35A19
  misc_feature: MA Experiment 20000535 PARAMETER Experiment Name: Zm_Hybrid_Seed_Dev_P Parameter: Tissue Value: Embryo vs. Unfert Floret
  misc_feature: MA Experiment ID: 20000626 Result: Down-regulated in Transcription
  misc_feature: MA Experiment 20000626 PARAMETER Experiment Name: Zm_Herbicide-Treatments_P Parameter: Timepoint (hr) Value: 12
  misc_feature: MA Experiment 20000626 PARAMETER Experiment Name: Zm_Herbicide-Treatments_P Parameter: Tissue Value: Aerial
  misc_feature: MA Experiment 20000626 PARAMETER Experiment Name: Zm_Herbicide-Treatments_P Parameter: Treatment Value: Roundup vs. No Treatment
attccacactaccccgcgctggactggagtcgagttgagctcacgctctcgcacactcgcactcccattcccactggccagattgatcttgcttcgctaatcatcctagatctccattcccgcccatgggatgcttccagtcgaaggtggcggggcccctgccgcccaacgacgccgccgctctccccgccgacaagcctgcagatcctgaggcggcgaatggcggcgccgacggggaaggcgacggtgacgacaaggaggctgtgaagcgcgcggtgccggtgttcagggagtttgctctggccgagctgcgcgccgccaccaagggattcagcgccgacctcatcgtctccgagagcggcgagaaggcgcccaacgccgtctaccgcggccgcctcgacggcgggcggctcatcgccgtcaagcgcttctcgcgcctctcctggcctgacccgcagcagttcctcgcggaggcggcgggcgttgggaaggtgcggcacaagcgcctcgtcaacctcattggctgctgcgccgagggtgacgagaggctgcttgtcgccgagtacatgcccaacgacaccctgtccaagcatctcttccactgggataagcagccgttaccatgggaaatgaggctgagggttgcatatttcattgcgcaagctctcgaccattgcaatgctgagaacaggaaaatctatcatgatttgaatgcttatagggtactttttgatgaggaaggtgatccccgcttgtcaagttttggattaatgaagaacagccgtgatgggaaaagttatagcactaacctggcttacactccaccagagtttctacgaactggcagagtaattccggagagtgtgatctatagctatggaactgtcctgttggatcttttgagcggaaaacacattcctcctagtcatgccctagatttaataaggggaaagaatatactgttgctgatggattcctccttagaagggcagtatgctaatgaagatgcttcgaaattggttgatcttgcatcaaagtgtctgcaatttgaatctagggatagaccgaacataaagtatcttctgtcttctgttggtcctcttcagaatcaaaaggaggttgcatcacatgtgttcatgggtattacaaaagccacatcagtactgccaaccatttgttctccactcagaaaggcctgcactggtatggatctttcagcggtgcatgatattttgctcaaaacaggttataaagatgatgagggtgcagaaaacgagctatcctttcaagaatggacccagcaagtgcaagagatgctgaacacaaagaagtttggtgacattgcatttagagacaaggattttaagactgcaattgactactactccaagctagttgcgatgatgtcgacgccttcagctacggtttttgtcaggcgcagtttttcctacttgatgaatgggcaagcagagctcgctctacgggacgcaatgcaagcccaggtctgcatgcccgagtggcctacggccttctacctccaggccctggctctttcaaagctcggcatggaaaccgatgcccaggacatgctcaacgatggcgccacgtttgaggccaagaagcagaacggctggcgcagttaggagccgacgacgaacaaagtctctcttccaacgactccgtgccgttgccctttgagagaagaaggtacaatggcgagtctcctccaaatcagttcactgggacacgcctgttgcactactagtagtgggattgaaacgcactgttttatcgtgcaatctcctctcgaatgtcggtaacgagtgatgatcatgatcaggggtggaaaaataggtcagggcctttgaacgcatagcgtactcttccgtgggttgcgctttgtgttgctggcgatggtggcaggatctgcctgattgttgcaactgcagttgtaattaaagggatgctctc

SEQ ID NO: 12557 - protein, 505 aa, Zea mays subsp. mays
  peptide (1)..(505): Ceres Seq. ID no. 13492794
  misc_feature (86)..(323): Pfam Name: Protein kinase domain Pfam Description: Protein kinase domain
  misc_feature (1)..(504): Homolog of NCBI NO: 37537032 NR Description: putative protein kinase [Oryza sativa (japonica group)] >gi|19225015|gb|AAL86491.1| putative protein kinase
  misc_feature (1)..(504): Homolog of NCBI NO: 15237465 NR Description: protein kinase family [Arabidopsis thaliana]
  misc_feature (1)..(504): Homolog of NCBI NO: 28393210 NR Description: putative protein kinase [Arabidopsis thaliana]
  misc_feature (1)..(504): Homolog of NCBI NO: 18418600 NR Description: protein kinase family [Arabidopsis thaliana] AT4g35230/F23E12_210 [Arabidopsis thaliana]
  misc_feature (1)..(504): Homolog of NCBI NO: 7486022 NR Description: hypothetical protein F23E12.210 - Arabidopsis >gi|3080427|emb|CAA18746.1| putative protein [Arabidopsis >gi|7270475|emb|CAB80240.1| putative protein [Arabidopsis
  misc_feature (40)..(501): Homolog of NCBI NO: 15232406 NR Description: protein kinase family [Arabidopsis thaliana]
  misc_feature (40)..(501): Homolog of NCBI NO: 21553556 NR Description: protein kinase-like protein [Arabidopsis thaliana]
  misc_feature (51)..(501): Homolog of NCBI NO: 22327962 NR Description: protein kinase - related [Arabidopsis thaliana]
  misc_feature (1)..(499): Homolog of NCBI NO: 15237604 NR Description: protein kinase family [Arabidopsis thaliana]
  misc_feature (113)..(326): Homolog of NCBI NO: 6633851 NR Description: F2K11.13 [Arabidopsis thaliana]
MGCFQSKVAGPLPPNDAAALPADKPADPEAANGGADGEGDGDDKEAVKRAVPVFREFALAELRAATKGFSADLIVSESGEKAPNAVYRGRLDGGRLIAVKRFSRLSWPDPQQFLAEAAGVGKVRHKRLVNLIGCCAEGDERLLVAEYMPNDTLSKHLFHWDKQPLPWEMRLRVAYFIAQALDHCNAENRKIYHDLNAYRVLFDEEGDPRLSSFGLMKNSRDGKSYSTNLAYTPPEFLRTGRVIPESVIYSYGTVLLDLLSGKHIPPSHALDLIRGKNILLLMDSSLEGQYANEDASKLVDLASKCLQFESRDRPNIKYLLSSVGPLQNQKEVASHVFMGITKATSVLPTICSPLRKACTGMDLSAVHDILLKTGYKDDEGAENELSFQEWTQQVQEMLNTKKFGDIAFRDKDFKTAIDYYSKLVAMMSTPSATVFVRRSFSYLMNGQAELALRDAMQAQVCMPEWPTAFYLQALALSKLGMETDAQDMLNDGATFEAKKQNGWRS

SEQ ID NO: 12558 - protein, 358 aa, Zea mays subsp. mays
  peptide (1)..(358): Ceres Seq. ID no. 13492795
  misc_feature (1)..(176): Pfam Name: Protein kinase domain Pfam Description: Protein kinase domain
  misc_feature (1)..(357): Homolog of NCBI NO: 37537032 NR Description: putative protein kinase [Oryza sativa (japonica group)] >gi|19225015|gb|AAL86491.1| putative protein kinase
  misc_feature (1)..(357): Homolog of NCBI NO: 15237465 NR Description: protein kinase family [Arabidopsis thaliana]
  misc_feature (1)..(357): Homolog of NCBI NO: 28393210 NR Description: putative protein kinase [Arabidopsis thaliana]
  misc_feature (1)..(357): Homolog of NCBI NO: 18418600 NR Description: protein kinase family [Arabidopsis thaliana] AT4g35230/F23E12_210 [Arabidopsis thaliana]
  misc_feature (1)..(357): Homolog of NCBI NO: 7486022 NR Description: hypothetical protein F23E12.210 - Arabidopsis >gi|3080427|emb|CAA18746.1| putative protein [Arabidopsis >gi|7270475|emb|CAB80240.1| putative protein [Arabidopsis
  misc_feature (1)..(354): Homolog of NCBI NO: 15232406 NR Description: protein kinase family [Arabidopsis thaliana]
  misc_feature (1)..(354): Homolog of NCBI NO: 21553556 NR Description: protein kinase-like protein [Arabidopsis thaliana]
  misc_feature (1)..(354): Homolog of NCBI NO: 22327962 NR Description: protein kinase - related [Arabidopsis thaliana]
  misc_feature (1)..(352): Homolog of NCBI NO: 15237604 NR Description: protein kinase family [Arabidopsis thaliana]
  misc_feature (1)..(179): Homolog of NCBI NO: 6633851 NR Description: F2K11.13 [Arabidopsis thaliana]
MPNDTLSKHLFHWDKQPLPWEMRLRVAYFIAQALDHCNAENRKIYHDLNAYRVLFDEEGDPRLSSFGLMKNSRDGKSYSTNLAYTPPEFLRTGRVIPESVIYSYGTVLLDLLSGKHIPPSHALDLIRGKNILLLMDSSLEGQYANEDASKLVDLASKCLQFESRDRPNIKYLLSSVGPLQNQKEVASHVFMGITKATSVLPTICSPLRKACTGMDLSAVHDILLKTGYKDDEGAENELSFQEWTQQVQEMLNTKKFGDIAFRDKDFKTAIDYYSKLVAMMSTPSATVFVRRSFSYLMNGQAELALRDAMQAQVCMPEWPTAFYLQALALSKLGMETDAQDMLNDGATFEAKKQNGWRS

SEQ ID NO: 12559 - protein, 337 aa, Zea mays subsp. mays
  peptide (1)..(337): Ceres Seq. ID no. 13492796
  misc_feature (1)..(155): Pfam Name: Protein kinase domain Pfam Description: Protein kinase domain
  misc_feature (1)..(336): Homolog of NCBI NO: 37537032 NR Description: putative protein kinase [Oryza sativa (japonica group)] >gi|19225015|gb|AAL86491.1| putative protein kinase
  misc_feature (1)..(336): Homolog of NCBI NO: 15237465 NR Description: protein kinase family [Arabidopsis thaliana]
  misc_feature (1)..(336): Homolog of NCBI NO: 28393210 NR Description: putative protein kinase [Arabidopsis thaliana]
  misc_feature (1)..(336): Homolog of NCBI NO: 18418600 NR Description: protein kinase family [Arabidopsis thaliana] AT4g35230/F23E12_210 [Arabidopsis thaliana]
  misc_feature (1)..(336): Homolog of NCBI NO: 7486022 NR Description: hypothetical protein F23E12.210 - Arabidopsis >gi|3080427|emb|CAA18746.1| putative protein [Arabidopsis >gi|7270475|emb|CAB80240.1| putative protein [Arabidopsis
  misc_feature (1)..(333): Homolog of NCBI NO: 15232406 NR Description: protein kinase family [Arabidopsis thaliana]
  misc_feature (1)..(333): Homolog of NCBI NO: 21553556 NR Description: protein kinase-like protein [Arabidopsis thaliana]
  misc_feature (1)..(333): Homolog of NCBI NO: 22327962 NR Description: protein kinase - related [Arabidopsis thaliana]
  misc_feature (1)..(331): Homolog of NCBI NO: 15237604 NR Description: protein kinase family [Arabidopsis thaliana]
  misc_feature (1)..(158): Homolog of NCBI NO: 6633851 NR Description: F2K11.13 [Arabidopsis thaliana]
MRLRVAYFIAQALDHCNAENRKIYHDLNAYRVLFDEEGDPRLSSFGLMKNSRDGKSYSTNLAYTPPEFLRTGRVIPESVIYSYGTVLLDLLSGKHIPPSHALDLIRGKNILLLMDSSLEGQYANEDASKLVDLASKCLQFESRDRPNIKYLLSSVGPLQNQKEVASHVFMGITKATSVLPTICSPLRKACTGMDLSAVHDILLKTGYKDDEGAENELSFQEWTQQVQEMLNTKKFGDIAFRDKDFKTAIDYYSKLVAMMSTPSATVFVRRSFSYLMNGQAELALRDAMQAQVCMPEWPTAFYLQALALSKLGMETDAQDMLNDGATFEAKKQNGWRS

SEQ ID NO: 12560 - DNA, 1277 bp, Zea mays subsp. mays
  misc_feature (1)..(1277): Ceres Seq. ID no. 12411507
  misc_feature: MA Experiment ID: 20000108 Result: Down-regulated in Transcription
  misc_feature: MA Experiment 20000108 PARAMETER Experiment Name: Zm_Root-Tips_P Parameter: Age (day) Value: 12
  misc_feature: MA Experiment 20000108 PARAMETER Experiment Name: Zm_Root-Tips_P Parameter: Organism Value: Zea mays
  misc_feature: MA Experiment 20000108 PARAMETER Experiment Name: Zm_Root-Tips_P Parameter: Tissue Value: Root tips vs. Root mid region    35
  misc_feature: MA Experiment 20000108 PARAMETER Experiment Name: Zm_Root-Tips_P Parameter: Tissue Value: Root tips vs. Root mid region   Sequence Listing-Misc Features (4)
  misc_feature: MA Experiment ID: 20000480 Result: Up-regulated in Transcription
  misc_feature: MA Experiment 20000480 PARAMETER Experiment Name: Zm_Drought_P Parameter: Age (day) Value: 11
  misc_feature: MA Experiment 20000480 PARAMETER Experiment Name: Zm_Drought_P Parameter: Organism Value: Zea mays
  misc_feature: MA Experiment 20000480 PARAMETER Experiment Name: Zm_Drought_P Parameter: Plant Line Value: 35A19
  misc_feature: MA Experiment 20000480 PARAMETER Experiment Name: Zm_Drought_P Parameter: Timepoint (hr) Value: 72
  misc_feature: MA Experiment 20000480 PARAMETER Experiment Name: Zm_Drought_P Parameter: Tissue Value: Aerial
  misc_feature: MA Experiment 20000480 PARAMETER Experiment Name: Zm_Drought_P Parameter: Treatment Value: Drought vs. No Drought
aatcgaaagggattgatatgttgtgtgaggcttgaaaagataagcatgggatgtcatcttggacttgggatagagataacagagtctgttagagggagaatcacggcgagagcgtgctcgtgggcacccctctccgtcaactggggtgcgcgatcgatcgatcgaaatatcgaactgcagttgccaaaaccccaatccggtcttctatttccgatcgagccgcaaaggaggcaggaagaaggccggcgcaggcgcaggcgcggatggcgatgggagcgacggttcgcgcggcggccgcggacgccgtggtgacgttcctgtgggtgctgtgcgcctccgcgctcggtgcctccacagcagccgtcacgtcgtacctgggggtgcaggagggcgccggccactacgcgctcctcgtcaccacgtccctcctctcggtgctcctcttcaccttcgatctcctctgcggtgcgctcggcggcgccagcttcaaccccaccgacttcgccgcctcctatgccgccggactcgacagcccctccctcttctcggttgcgctccgcttcccggcgcaggccgccggcgctgtgggcggcgccctggccatctcggagctgatgccggcgcagtataagcacacgctcgcgggcccctcactcaaggtggatccccacaccggtgccctagccgaaggggtgctcaccttcgtcatcaccctgaccgtgctctgggtcatcgtcaagggcccccgcaacgtcatcctcaagaccttgctgctctcaacctccatcgtctccgtcatcctcgcaggcgcagagtacacggggccgtctatgaacccagctaatgcatttggctgggcatatgttaacaattggcacaacacatgggagcagctgtatgtgtactggatatgcccctttattggggccatgcttgctggatggatatttagggtggtgttcctaccaccggcacctaagcccaagaccaagaaagcatgattactcgtttatggatgctggtttagaagaaataagaaatagaggaaggtcacataagctcatgtgttgtacttgatttcctcaacttcccacaaactgggtgttgtgctctgttacttatttctcatcaataatttatgtttacttgtaattttgggctagtcaggatgtgtttttgtccttttatttagtttttgtatgttttctttatgagtacagtaaaatcattgatctcaattgagatggaaatgagctgaggtcggctcggcttgctcc

SEQ ID NO: 12561 - protein, 245 aa, Zea mays subsp. mays
  peptide (1)..(245): Ceres Seq. ID no. 12411508
  misc_feature (1)..(229): Pfam Name: Major intrinsic protein Pfam Description: Major intrinsic protein
  misc_feature (7)..(240): Homolog of NCBI NO: 34904332 NR Description: unnamed protein product [Oryza sativa (japonica group)] >gi|7340919|dbj|BAA92991.1| unnamed protein product
  misc_feature (74)..(240): Homolog of NCBI NO: 15811692 NR Description: aquaporin [Pyrocoelia rufa]
  misc_feature (1)..(245): Homolog of NCBI NO: 34906220 NR Description: P0666G04.16 [Oryza sativa (japonica
  misc_feature (3)..(245): Homolog of NCBI NO: 15229225 NR Description: hypothetical protein; protein id: At3g04090.1 thaliana] >gi|6721176|gb|AAF26804.1|AC016829_28 hypothetical
  misc_feature (3)..(243): Homolog of NCBI NO: 15230175 NR Description: putative protein; protein id: At3g56950.1, by cDNA: 32275., supported by cDNA: gi_14423565 [Arabidopsis
  misc_feature (13)..(244): Homolog of NCBI NO: 13447817 NR Description: small basic membrane integral protein ZmSIP2-1
  misc_feature (5)..(245): Homolog of NCBI NO: 15238785 NR Description: putative protein; protein id: At5g18290.1 thaliana] >gi|9758911|dbj|BAB09487.1| to unknown protein [Arabidopsis thaliana]
  misc_feature (1)..(245): Homolog of NCBI NO: 13447815 NR Description: small basic membrane integral protein ZmSIP1-2
  misc_feature (1)..(245): Homolog of NCBI NO: 13447813 NR Description: small basic membrane integral protein ZmSIP1-1
  misc_feature (1)..(234): Homolog of NCBI NO: 1514977 NR Description: VM23 [Raphanus sativus]
MAMGATVRAAAADAVVTFLWVLCASALGASTAAVTSYLGVQEGAGHYALLVTTSLLSVLLFTFDLLCGALGGASFNPTDFAASYAAGLDSPSLFSVALRFPAQAAGAVGGALAISELMPAQYKHTLAGPSLKVDPHTGALAEGVLTFVITLTVLWVIVKGPRNVILKTLLLSTSIVSVILAGAEYTGPSMNPANAFGWAYVNNWHNTWEQLYVYWICPFIGAMLAGWIFRVVFLPPAPKPKTKKA

SEQ ID NO: 12562 - protein, 243 aa, Zea mays subsp. mays
  peptide (1)..(243): Ceres Seq. ID no. 12411509
  misc_feature (1)..(227): Pfam Name: Major intrinsic protein Pfam Description: Major intrinsic protein
  misc_feature (1)..(243): Homolog of NCBI NO: 13447813 NR Description: small basic membrane integral protein ZmSIP1-1
  misc_feature (1)..(243): Homolog of NCBI NO: 34906220 NR Description: P0666G04.16 [Oryza sativa (japonica
  misc_feature (1)..(243): Homolog of NCBI NO: 13447815 NR Description: small basic membrane integral protein ZmSIP1-2
  misc_feature (1)..(243): Homolog of NCBI NO: 15229225 NR Description: hypothetical protein; protein id: At3g04090.1 thaliana] >gi|6721176|gb|AAF26804.1|AC016829_28 hypothetical
  misc_feature (3)..(243): Homolog of NCBI NO: 15238785 NR Description: putative protein; protein id: At5g18290.1 thaliana] >gi|9758911|dbj|BAB09487.1| to unknown protein [Arabidopsis thaliana]
  misc_feature (1)..(241): Homolog of NCBI NO: 15230175 NR Description: putative protein; protein id: At3g56950.1, by cDNA: 32275., supported by cDNA: gi_14423565 [Arabidopsis
  misc_feature (11)..(242): Homolog of NCBI NO: 13447817 NR Description: small basic membrane integral protein ZmSIP2-1
  misc_feature (5)..(238): Homolog of NCBI NO: 34904332 NR Description: unnamed protein product [Oryza sativa (japonica group)] >gi|7340919|dbj|BAA92991.1| unnamed protein product
  misc_feature (72)..(238): Homolog of NCBI NO: 15811692 NR Description: aquaporin [Pyrocoelia rufa]
  misc_feature (1)..(232): Homolog of NCBI NO: 1514977 NR Description: VM23 [Raphanus sativus]
MGATVRAAAADAVVTFLWVLCASALGASTAAVTSYLGVQEGAGHYALLVTTSLLSVLLFTFDLLCGALGGASFNPTDFAASYAAGLDSPSLFSVALRFPAQAAGAVGGALAISELMPAQYKHTLAGPSLKVDPHTGALAEGVLTFVITLTVLWVIVKGPRNVILKTLLLSTSIVSVILAGAEYTGPSMNPANAFGWAYVNNWHNTWEQLYVYWICPFIGAMLAGWIFRVVFLPPAPKPKTKKA

SEQ ID NO: 12563 - protein, 128 aa, Zea mays subsp. mays
  peptide (1)..(128): Ceres Seq. ID no. 12411510
  misc_feature (1)..(112): Pfam Name: Major intrinsic protein Pfam Description: Major intrinsic protein
  misc_feature (1)..(128): Homolog of NCBI NO: 13447813 NR Description: small basic membrane integral protein ZmSIP1-1
  misc_feature (1)..(128): Homolog of NCBI NO: 34906220 NR Description: P0666G04.16 [Oryza sativa (japonica
  misc_feature (1)..(128): Homolog of NCBI NO: 13447815 NR Description: small basic membrane integral protein ZmSIP1-2
  misc_feature (1)..(128): Homolog of NCBI NO: 15229225 NR Description: hypothetical protein; protein id: At3g04090.1 thaliana] >gi|6721176|gb|AAF26804.1|AC016829_28 hypothetical
  misc_feature (1)..(128): Homolog of NCBI NO: 15238785 NR Description: putative protein; protein id: At5g18290.1 thaliana] >gi|9758911|dbj|BAB09487.1| to unknown protein [Arabidopsis thaliana]
  misc_feature (1)..(126): Homolog of NCBI NO: 15230175 NR Description: putative protein; protein id: At3g56950.1, by cDNA: 32275., supported by cDNA: gi_14423565 [Arabidopsis
  misc_feature (1)..(127): Homolog of NCBI NO: 13447817 NR Description: small basic membrane integral protein ZmSIP2-1
  misc_feature (1)..(123): Homolog of NCBI NO: 34904332 NR Description: unnamed protein product [Oryza sativa (japonica group)] >gi|7340919|dbj|BAA92991.1| unnamed protein product
  misc_feature (1)..(123): Homolog of NCBI NO: 15811692 NR Description: aquaporin [Pyrocoelia rufa]
  misc_feature (1)..(117): Homolog of NCBI NO: 1514977 NR Description: VM23 [Raphanus sativus]
MPAQYKHTLAGPSLKVDPHTGALAEGVLTFVITLTVLWVIVKGPRNVILKTLLLSTSIVSVILAGAEYTGPSMNPANAFGWAYVNNWHNTWEQLYVYWICPFIGAMLAGWIFRVVFLPPAPKPKTKKA

SEQ ID NO: 12564 - DNA, 1217 bp, Zea mays subsp. mays
  misc_feature (1)..(1217): Ceres Seq. ID no. 12374035
  misc_feature: MA Experiment ID: 108515 Result: Down-regulated in Transcription
  misc_feature: MA Experiment 108515 PARAMETER Experiment Name: Zm_2mM_SA_P Parameter: Age (day) Value: 8
  misc_feature: MA Experiment 108515 PARAMETER Experiment Name: Zm_2mM_SA_P Parameter: Organism Value: Zea mays
  misc_feature: MA Experiment 108515 PARAMETER Experiment Name: Zm_2mM_SA_P Parameter: Plant Line Value: 35A19
  misc_feature: MA Experiment 108515 PARAMETER Experiment Name: Zm_2mM_SA_P Parameter: Timepoint (hr) Value: 12
  misc_feature: MA Experiment 108515 PARAMETER Experiment Name: Zm_2mM_SA_P Parameter: Tissue Value: Aerial
  misc_feature: MA Experiment 108515 PARAMETER Experiment Name: Zm_2mM_SA_P Parameter: Treatment Value: 2mM SA vs. No Treatment
  misc_feature: MA Experiment ID: 108523 Result: Down-regulated in Transcription
  misc_feature: MA Experiment 108523 PARAMETER Experiment Name: Zm_42deg_Heat_P Parameter: Age (day) Value: 8
  misc_feature: MA Experiment 108523 PARAMETER Experiment Name: Zm_42deg_Heat_P Parameter: Organism Value: Zea mays
  misc_feature: MA Experiment 108523 PARAMETER Experiment Name: Zm_42deg_Heat_P Parameter: Plant Line Value: 35A19
  misc_feature: MA Experiment 108523 PARAMETER Experiment Name: Zm_42deg_Heat_P Parameter: Temperature (deg C) Value: 42 vs. 22
  misc_feature: MA Experiment 108523 PARAMETER Experiment Name: Zm_42deg_Heat_P Parameter: Timepoint (hr) Value: 6
  misc_feature: MA Experiment 108523 PARAMETER Experiment Name: Zm_42deg_Heat_P Parameter: Tissue Value: Aerial
  misc_feature: MA Experiment ID: 108527 Result: Down-regulated in Transcription
  misc_feature: MA Experiment 108527 PARAMETER Experiment Name: Zm_5mM_NO_P Parameter: Age (day) Value: 8
  misc_feature: MA Experiment 108527 PARAMETER Experiment Name: Zm_5mM_NO_P Parameter: Organism Value: Zea mays
  misc_feature: MA Experiment 108527 PARAMETER Experiment Name: Zm_5mM_NO_P Parameter: Plant Line Value: 35A19
  misc_feature: MA Experiment 108527 PARAMETER Experiment Name: Zm_5mM_NO_P Parameter: Timepoint (hr) Value: 6
  misc_feature: MA Experiment 108527 PARAMETER Experiment Name: Zm_5mM_NO_P Parameter: Tissue Value: Aerial
  misc_feature: MA Experiment 108527 PARAMETER Experiment Name: Zm_5mM_NO_P Parameter: Treatment Value: 5mM NO vs. No Treatment
  misc_feature: MA Experiment ID: 108528 Result: Up-regulated in Transcription
  misc_feature: MA Experiment 108528 PARAMETER Experiment Name: Zm_Imbibed_Seeds_P Parameter: Age (day) Value: 5 vs. 2
  misc_feature: MA Experiment 108528 PARAMETER Experiment Name: Zm_Imbibed_Seeds_P Parameter: Organism Value: Zea mays
  misc_feature: MA Experiment 108528 PARAMETER Experiment Name: Zm_Imbibed_Seeds_P Parameter: Plant Line Value: 35A19
  misc_feature: MA Experiment 108528 PARAMETER Experiment Name: Zm_Imbibed_Seeds_P Parameter: Tissue Value: Aerial vs. Embryo
  misc_feature: MA Experiment ID: 108530 Result: Up-regulated in Transcription
  misc_feature: MA Experiment 108530 PARAMETER Experiment Name: Zm_Imbibed_Seeds_P Parameter: Age (day) Value: 6 vs. 2
  misc_feature: MA Experiment 108530 PARAMETER Experiment Name: Zm_Imbibed_Seeds_P Parameter: Organism Value: Zea mays
  misc_feature: MA Experiment 108530 PARAMETER Experiment Name: Zm_Imbibed_Seeds_P Parameter: Plant Line Value: 35A19
  misc_feature: MA Experiment 108530 PARAMETER Experiment Name: Zm_Imbibed_Seeds_P Parameter: Tissue Value: Aerial vs. Embryo
  misc_feature: MA Experiment ID: 108534 Result: Up-regulated in Transcription
  misc_feature: MA Experiment 108534 PARAMETER Experiment Name: Zm_4deg_Cold_P Parameter: Age (hr) Value: 8
  misc_feature: MA Experiment 108534 PARAMETER Experiment Name: Zm_4deg_Cold_P Parameter: Organism Value: Zea mays
  misc_feature: MA Experiment 108534 PARAMETER Experiment Name: Zm_4deg_Cold_P Parameter: Plant Line Value: 35A19
  misc_feature: MA Experiment 108534 PARAMETER Experiment Name: Zm_4deg_Cold_P Parameter: Temperature (deg C) Value: 4 vs. 22
  misc_feature: MA Experiment 108534 PARAMETER Experiment Name: Zm_4deg_Cold_P Parameter: Timepoint (hr) Value: 6
  misc_feature: MA Experiment 108534 PARAMETER Experiment Name: Zm_4deg_Cold_P Parameter: Tissue Value: Aerial
  misc_feature: MA Experiment ID: 108536 Result: Down-regulated in Transcription
  misc_feature: MA Experiment 108536 PARAMETER Experiment Name: Zm_Meristem_P Parameter: Age (day) Value: 8
  misc_feature: MA Experiment 108536 PARAMETER Experiment Name: Zm_Meristem_P Parameter: Organism Value: Zea mays
  misc_feature: MA Experiment 108536 PARAMETER Experiment Name: Zm_Meristem_P Parameter: Plant Line Value: 35A19
  misc_feature: MA Experiment 108536 PARAMETER Experiment Name: Zm_Meristem_P Parameter: Tissue Value: Shoot Meristem vs. Above Shoot Meristem
  misc_feature: MA Experiment ID: 108545 Result: Up-regulated in Transcription
  misc_feature: MA Experiment 108545 PARAMETER Experiment Name: Zm_Imbibed_Seeds_P Parameter: Age (day) Value: 3 vs. 2
  misc_feature: MA Experiment 108545 PARAMETER Experiment Name: Zm_Imbibed_Seeds_P Parameter: Organism Value: Zea mays
  misc_feature: MA Experiment 108545 PARAMETER Experiment Name: Zm_Imbibed_Seeds_P Parameter: Plant Line Value: 35A19
  misc_feature: MA Experiment 108545 PARAMETER Experiment Name: Zm_Imbibed_Seeds_P Parameter: Tissue Value: Aerial vs. Embryo
  misc_feature: MA Experiment ID: 108546 Result: Down-regulated in Transcription
  misc_feature: MA Experiment 108546 PARAMETER Experiment Name: Zm_Imbibed_Seeds_P Parameter: Age (day) Value: 3 vs. 2
  misc_feature: MA Experiment 108546 PARAMETER Experiment Name: Zm_Imbibed_Seeds_P Parameter: Organism Value: Zea mays
  misc_feature: MA Experiment 108546 PARAMETER Experiment Name: Zm_Imbibed_Seeds_P Parameter: Plant Line Value: 35A19
  misc_feature: MA Experiment 108546 PARAMETER Experiment Name: Zm_Imbibed_Seeds_P Parameter: Tissue Value: Roots vs. Embryo
  misc_feature: MA Experiment ID: 108547 Result: Up-regulated in Transcription
  misc_feature: MA Experiment 108547 PARAMETER Experiment Name: Zm_Imbibed_Seeds_P Parameter: Age (day) Value: 4 vs. 2
  misc_feature: MA Experiment 108547 PARAMETER Experiment Name: Zm_Imbibed_Seeds_P Parameter: Organism Value: Zea mays
  misc_feature: MA Experiment 108547 PARAMETER Experiment Name: Zm_Imbibed_Seeds_P Parameter: Plant Line Value: 35A19
  misc_feature: MA Experiment 108547 PARAMETER Experiment Name: Zm_Imbibed_Seeds_P Parameter: Tissue Value: Aerial vs. Embryo
  misc_feature: MA Experiment ID: 108559 Result: Down-regulated in Transcription
  misc_feature: MA Experiment 108559 PARAMETER Experiment Name: Zm_5mM_NO_P Parameter: Age (day) Value: 8
  misc_feature: MA Experiment 108559 PARAMETER Experiment Name: Zm_5mM_NO_P Parameter: Organism Value: Zea mays
  misc_feature: MA Experiment 108559 PARAMETER Experiment Name: Zm_5mM_NO_P Parameter: Plant Line Value: 35A19
  misc_feature: MA Experiment 108559 PARAMETER Experiment Name: Zm_5mM_NO_P Parameter: Timepoint (hr) Value: 12
  misc_feature: MA Experiment 108559 PARAMETER Experiment Name: Zm_5mM_NO_P Parameter: Tissue Value: Aerial
  misc_feature: MA Experiment 108559 PARAMETER Experiment Name: Zm_5mM_NO_P Parameter: Treatment Value: 5mM NO vs. No Treatment
  misc_feature: MA Experiment ID: 20000626 Result: Down-regulated in Transcription
  misc_feature: MA Experiment 20000626 PARAMETER Experiment Name: Zm_Herbicide-Treatments_P Parameter: Timepoint (hr) Value: 12
  misc_feature: MA Experiment 20000626 PARAMETER Experiment Name: Zm_Herbicide-Treatments_P Parameter: Tissue Value: Aerial
  misc_feature: MA Experiment 20000626 PARAMETER Experiment Name: Zm_Herbicide-Treatments_P Parameter: Treatment Value: Roundup vs. No Treatment
accgccaccacacagctcccacgctcaccgacgccacagcttgtgcgcgcgcaatggcactcgtgtccgcctcctcgtcctccaccaccgccgtcgcggcgctccccaggaatgggcagcagcgggcgtcgtcgtcgttgttctcctcctcctcctcttcctccttcctcgtcggcaagacgctgctgaggcaggccgaggcagcccggccgtcgttcgccgtgcgcgccgcggcggattccgacaggccgatctggttccccggcagcacccctccgccgtggctcgacggcagccttcccggcgacttcggctttgatccctggggcctcggatctgacccggagagcctgcggtggaacgtgcaggcggagctggtgcactgccggtgggcgatgctcggcgcggcgggtatcttcatcccggagttcctgaccaagatcggcgtcctcaacacgcccttctgggtacaccgccggcgagcagcagtacttcaccgacaccaccaccctcttcatcatcgagctcatcctcatcggctgggccgagggccgccgttgggctgacatcatcaagcccggaagcgtcaacaccgatcccatcttccccagcaacaagctcaccggcaccgacgtcgggtaccctggtggcctgtggtttgacccgctcggctggggctccggctcgccggagaagatcaaggagctgcgcaccaaggagatcaagaacggacgcctcgccatgctcgccgtcatgggcgcttggttccaggccgagtacaccggcaccggccccatcgacaacctcttcgcccacctcgccgaccctggccacgccaccatcttccaggccttcacccccaaatgaggagctctgatgaacttggcagttcgaggagtgctaccacacatgcatgcattgttaggtttgatggccgatatggaactttttctttttgttgggggcggactactgggtagactgtcaacgatgatgatgatgatgatgaaatgttcgtggtgcgatgcatggtgtacttgtactatgttgtaactaatgtaaaaatgcgatggtcgttagatgctatgtcctcttaattaaggcggacctacatgcaagtaaggatgcaaataagggtattcagtatttaattgaatactcattattttttgcaaaaaaatatgtatacatgtatatgttactagccagttgttcgg

SEQ ID NO: 12565 - protein, 187 aa, Zea mays subsp. mays
  peptide (1)..(187): Ceres Seq. ID no. 12374036
  misc_feature (90)..(155): Pfam Name: Chlorophyll A-B binding protein Pfam Description: Chlorophyll A-B binding protein
  misc_feature (18)..(155): Homolog of NCBI NO: 34393511 NR Description: putative photosystem I antenna protein [Oryza
  misc_feature (18)..(155): Homolog of NCBI NO: 1076724 NR Description: LHCI-680, photosystem I antenna protein - barley
  misc_feature (24)..(155): Homolog of NCBI NO: 7443233 NR Description: chlorophyll a/b-binding protein type II, I - Lolium temulentum >gi|551047|emb|CAA55864.1| type II LHCI
  misc_feature (15)..(155): Homolog of NCBI NO: 18376587 NR Description: putative chlorophyll A-B binding protein of LHCI
  misc_feature (15)..(155): Homolog of NCBI NO: 99486 NR Description: chlorophyll a/b-binding protein (clone pINEab 31)
  misc_feature (20)..(155): Homolog of NCBI NO: 115765 NR Description: Chlorophyll A-B binding protein 7, chloroplast
  misc_feature (43)..(155): Homolog of NCBI NO: 11277627 NR Description: PS I antenna protein Lhca2 [imported] - thaliana >gi|4741940|gb|AAD28767.1|AF134120_1 Lhca2 protein thaliana] >gi|15451180|gb|AAK96861.1| Lhca2 protein [Arabidopsis
  misc_feature (20)..(155): Homolog of NCBI NO: 115766 NR Description: Chlorophyll A-B binding protein, chloroplast
  misc_feature (43)..(155): Homolog of NCBI NO: 15233120 NR Description: light-harvesting chlorophyll a/b binding protein; id: At3g61470.1, supported by cDNA: 123159., supported by cDNA:
  misc_feature (18)..(155): Homolog of NCBI NO: 2306981 NR Description: photosystem I antenna protein [Oryza sativa]
RHHTAPTLTDATACARAMALVSASSSSTTAVAALPRNGQQRASSSLFSSSSSSSFLVGKTLLRQAEAARPSFAVRAAADSDRPIWFPGSTPPPWLDGSLPGDFGFDPWGLGSDPESLRWNVQAELVHCRWAMLGAAGIFIPEFLTKIGVLNTPFWVHRRRAAVLHRHHHPLHHRAHPHRLGRGPPLG

SEQ ID NO: 12566 - protein, 170 aa, Zea mays subsp. mays
  peptide (1)..(170): Ceres Seq. ID no. 12374037
  misc_feature (73)..(138): Pfam Name: Chlorophyll A-B binding protein Pfam Description: Chlorophyll A-B binding protein
  misc_feature (1)..(138): Homolog of NCBI NO: 34393511 NR Description: putative photosystem I antenna protein [Oryza
  misc_feature (1)..(138): Homolog of NCBI NO: 1076724 NR Description: LHCI-680, photosystem I antenna protein - barley
  misc_feature (7)..(138): Homolog of NCBI NO: 7443233 NR Description: chlorophyll a/b-binding protein type II, I - Lolium temulentum >gi|551047|emb|CAA55864.1| type II LHCI
  misc_feature (1)..(138): Homolog of NCBI NO: 18376587 NR Description: putative chlorophyll A-B binding protein of LHCI
  misc_feature (1)..(138): Homolog of NCBI NO: 99486 NR Description: chlorophyll a/b-binding protein (clone pINEab 31)
  misc_feature (3)..(138): Homolog of NCBI NO: 115765 NR Description: Chlorophyll A-B binding protein 7, chloroplast
  misc_feature (26)..(138): Homolog of NCBI NO: 11277627 NR Description: PS I antenna protein Lhca2 [imported] - thaliana >gi|4741940|gb|AAD28767.1|AF134120_1 Lhca2 protein thaliana] >gi|15451180|gb|AAK96861.1| Lhca2 protein [Arabidopsis
  misc_feature (3)..(138): Homolog of NCBI NO: 115766 NR Description: Chlorophyll A-B binding protein, chloroplast
  misc_feature (26)..(138): Homolog of NCBI NO: 15233120 NR Description: light-harvesting chlorophyll a/b binding protein; id: At3g61470.1, supported by cDNA: 123159., supported by cDNA:
  misc_feature (1)..(138): Homolog of NCBI NO: 2306981 NR Description: photosystem I antenna protein [Oryza sativa]
MALVSASSSSTTAVAALPRNGQQRASSSLFSSSSSSSFLVGKTLLRQAEAARPSFAVRAAADSDRPIWFPGSTPPPWLDGSLPGDFGFDPWGLGSDPESLRWNVQAELVHCRWAMLGAAGIFIPEFLTKIGVLNTPFWVHRRRAAVLHRHHHPLHHRAHPHRLGRGPPLG

SEQ ID NO: 12567 - protein, 105 aa, Zea mays subsp. mays
  peptide (1)..(105): Ceres Seq. ID no. 12374038
  misc_feature (91)..(105): Homolog of NCBI NO: 13592175 NR Description: ppg3 [Leishmania major]
  misc_feature (91)..(105): Homolog of NCBI NO: 13592175 NR Description: ppg3 [Leishmania major]
  misc_feature (91)..(105): Homolog of NCBI NO: 13592175 NR Description: ppg3 [Leishmania major]
  misc_feature (91)..(105): Homolog of NCBI NO: 13592175 NR Description: ppg3 [Leishmania major]
PPPHSSHAHRRHSLCARNGTRVRLLVLHHRRRGAPQEWAAAGVVVVVLLLLLFLLPRRQDAAEAGRGSPAVVRRARRGGFRQADLVPRQHPSAVARRQPSRRLRL

SEQ ID NO: 12568 - DNA, 1289 bp, Zea mays subsp. mays
  misc_feature (1)..(1289): Ceres Seq. ID no. 12411503
  misc_feature: MA Experiment ID: 108528 Result: Up-regulated in Transcription
  misc_feature: MA Experiment 108528 PARAMETER Experiment Name: Zm_Imbibed_Seeds_P Parameter: Age (day) Value: 5 vs. 2
  misc_feature: MA Experiment 108528 PARAMETER Experiment Name: Zm_Imbibed_Seeds_P Parameter: Organism Value: Zea mays
  misc_feature: MA Experiment 108528 PARAMETER Experiment Name: Zm_Imbibed_Seeds_P Parameter: Plant Line Value: 35A19
  misc_feature: MA Experiment 108528 PARAMETER Experiment Name: Zm_Imbibed_Seeds_P Parameter: Tissue Value: Aerial vs. Embryo
  misc_feature: MA Experiment ID: 108530 Result: Up-regulated in Transcription
  misc_feature: MA Experiment 108530 PARAMETER Experiment Name: Zm_Imbibed_Seeds_P Parameter: Age (day) Value: 6 vs. 2
  misc_feature: MA Experiment 108530 PARAMETER Experiment Name: Zm_Imbibed_Seeds_P Parameter: Organism Value: Zea mays
  misc_feature: MA Experiment 108530 PARAMETER Experiment Name: Zm_Imbibed_Seeds_P Parameter: Plant Line Value: 35A19
  misc_feature: MA Experiment 108530 PARAMETER Experiment Name: Zm_Imbibed_Seeds_P Parameter: Tissue Value: Aerial vs. Embryo
  misc_feature: MA Experiment ID: 108545 Result: Up-regulated in Transcription
  misc_feature: MA Experiment 108545 PARAMETER Experiment Name: Zm_Imbibed_Seeds_P Parameter: Age (day) Value: 3 vs. 2
  misc_feature: MA Experiment 108545 PARAMETER Experiment Name: Zm_Imbibed_Seeds_P Parameter: Organism Value: Zea mays
  misc_feature: MA Experiment 108545 PARAMETER Experiment Name: Zm_Imbibed_Seeds_P Parameter: Plant Line Value: 35A19
  misc_feature: MA Experiment 108545 PARAMETER Experiment Name: Zm_Imbibed_Seeds_P Parameter: Tissue Value: Aerial vs. Embryo
  misc_feature: MA Experiment ID: 108547 Result: Up-regulated in Transcription
  misc_feature: MA Experiment 108547 PARAMETER Experiment Name: Zm_Imbibed_Seeds_P Parameter: Age (day) Value: 4 vs. 2
  misc_feature: MA Experiment 108547 PARAMETER Experiment Name: Zm_Imbibed_Seeds_P Parameter: Organism Value: Zea mays
  misc_feature: MA Experiment 108547 PARAMETER Experiment Name: Zm_Imbibed_Seeds_P Parameter: Plant Line Value: 35A19
  misc_feature: MA Experiment 108547 PARAMETER Experiment Name: Zm_Imbibed_Seeds_P Parameter: Tissue Value: Aerial vs. Embryo
  misc_feature: MA Experiment ID: 108597 Result: Down-regulated in Transcription
  misc_feature: MA Experiment 108597 PARAMETER Experiment Name: Zm_100uM_ABA_P Parameter: Age (day) Value: 9
  misc_feature: MA Experiment 108597 PARAMETER Experiment Name: Zm_100uM_ABA_P Parameter: Organism Value: Zea mays
  misc_feature: MA Experiment 108597 PARAMETER Experiment Name: Zm_100uM_ABA_P Parameter: Plant Line Value: 35A19
  misc_feature: MA Experiment 108597 PARAMETER Experiment Name: Zm_100uM_ABA_P Parameter: Timepoint (hr) Value: 24
  misc_feature: MA Experiment 108597 PARAMETER Experiment Name: Zm_100uM_ABA_P Parameter: Tissue Value: Aerial
  misc_feature: MA Experiment 108597 PARAMETER Experiment Name: Zm_100uM_ABA_P Parameter: Treatment Value: 100uM ABA vs. No Treatment
  misc_feature: MA Experiment ID: 20000477 Result: Down-regulated in Transcription
  misc_feature: MA Experiment 20000477 PARAMETER Experiment Name: Zm_5mM_SA_P Parameter: Age (day) Value: 10
  misc_feature: MA Experiment 20000477 PARAMETER Experiment Name: Zm_5mM_SA_P Parameter: Organism Value: Zea mays
  misc_feature: MA Experiment 20000477 PARAMETER Experiment Name: Zm_5mM_SA_P Parameter: Plant Line Value: 35A19
  misc_feature: MA Experiment 20000477 PARAMETER Experiment Name: Zm_5mM_SA_P Parameter: Timepoint (hr) Value: 48
  misc_feature: MA Experiment 20000477 PARAMETER Experiment Name: Zm_5mM_SA_P Parameter: Tissue Value: Aerial
  misc_feature: MA Experiment 20000477 PARAMETER Experiment Name: Zm_5mM_SA_P Parameter: Treatment Value: 5mM SA vs. No Treatment
  misc_feature: MA Experiment ID: 20000479 Result: Down-regulated in Transcription
  misc_feature: MA Experiment 20000479 PARAMETER Experiment Name: Zm_Drought_P Parameter: Age (day) Value: 10
  misc_feature: MA Experiment 20000479 PARAMETER Experiment Name: Zm_Drought_P Parameter: Organism Value: Zea mays
  misc_feature: MA Experiment 20000479 PARAMETER Experiment Name: Zm_Drought_P Parameter: Plant Line Value: 35A19
  misc_feature: MA Experiment 20000479 PARAMETER Experiment Name: Zm_Drought_P Parameter: Timepoint (hr) Value: 48
  misc_feature: MA Experiment 20000479 PARAMETER Experiment Name: Zm_Drought_P Parameter: Tissue Value: Aerial
  misc_feature: MA Experiment 20000479 PARAMETER Experiment Name: Zm_Drought_P Parameter: Treatment Value: Drought vs. No Drought
  misc_feature: MA Experiment ID: 20000480 Result: Down-regulated in Transcription
  misc_feature: MA Experiment 20000480 PARAMETER Experiment Name: Zm_Drought_P Parameter: Age (day) Value: 11
  misc_feature: MA Experiment 20000480 PARAMETER Experiment Name: Zm_Drought_P Parameter: Organism Value: Zea mays
  misc_feature: MA Experiment 20000480 PARAMETER Experiment Name: Zm_Drought_P Parameter: Plant Line Value: 35A19
  misc_feature: MA Experiment 20000480 PARAMETER Experiment Name: Zm_Drought_P Parameter: Timepoint (hr) Value: 72
  misc_feature: MA Experiment 20000480 PARAMETER Experiment Name: Zm_Drought_P Parameter: Tissue Value: Aerial
  misc_feature: MA Experiment 20000480 PARAMETER Experiment Name: Zm_Drought_P Parameter: Treatment Value: Drought vs. No Drought
gcgcctccgtgcatgcaccgttgccgatcgtcgtcctcctccccactccccagaggccaagccaaaggtccagcaatggcgaggtctccccggcttctcgcgctgctgctggctgtcgtctggatatgcggcgcggccctagtagcgcgtgccgacccgatgctcgagaggttcgagcagtggatgggcaggcacggccggctgtacgctgacgccggagagaagcagaggcggctcgaggtgtaccggaggaacgtcgagctggtcgagaccttcaactccatgggcaacgggtacaggctggccgacaacaagttcgccgacctgacgaacgaggagttcagggccaagatgctgggcttcggacggcctcgcagcggaggcggagccgggcactccacagcgccgagcaccgtggcttgtattggaagtggactgatgggtcgtcagggttattctgatctaccgaaaagcgtggactggcgagagaagggagctgtcgcgccggtgaagagccagggggactgtggctcttgctgggcgttctccgccgttgcggccatcgagggcatcaaccagatcaagaacgggaagctggtgtccctgtcggagcaggagctggtggactgcgacaccaaggccatcggctgcgccggcgggtacatgagctgggccttcgagttcgtcatgaagaaccgcggcctcaccaccgaacggaactacccgtatcaagggctgaacggcgcctgccagacgccgaagctgaaggagagcgcggtgagcatctccgggtacatgaacgtgacgcccagcagcgagccggacctcctgcgggccgccgcggcgcagccggtgtccgtggccgtggacgccggcagcttcgtgtggcagctctacggcggcggcgtcttcacgggaccctgcaccgccgagctgaaccacggcgtcacggtggtcgggtacggcgagacccagggggacacggacggcgacggtagcggcgtgcccgggaagaagtactggatcgtcaagaactcgtgggggcccgagtggggcgacgccggctacatcctcatgcaacgcgaagccagcgtcgcgtctggcctctgcggcatcgctatgctcccgagctacccggtcatgtgatccggcggctgccgccgtcgagacctacagctgcagctctaagaacaatcagtcattatgttggccatcttttgaacaaagggcgttcctctttcccgataagatgatgtcttatcttggcgatcgataaggttacagatagt

SEQ ID NO: 12569 - protein, 381 aa, Zea mays subsp. mays
  peptide (1)..(381): Ceres Seq. ID no. 12411504
  misc_feature (155)..(380): Pfam Name: Papain family cysteine protease Pfam Description: Papain family cysteine protease
  misc_feature (33)..(379): Homolog of NCBI NO: 40806498 NR Description: putative cysteine protease 1 [Iris hollandica]
  misc_feature (26)..(379): Homolog of NCBI NO: 24285904 NR Description: cysteine proteinase precursor [Ipomoea batatas]
  misc_feature (26)..(379): Homolog of NCBI NO: 13491750 NR Description: cysteine protease [Ipomoea batatas]
  misc_feature (54)..(381): Homolog of NCBI NO: 18422605 NR Description: senescence-specific cysteine protease SAG12;
  misc_feature (26)..(379): Homolog of NCBI NO: 37780047 NR Description: cysteine protease 8 [Trifolium repens]
  misc_feature (48)..(380): Homolog of NCBI NO: 544129 NR Description: Vignain precursor (Bean endopeptidase) (Cysteine
  misc_feature (54)..(381): Homolog of NCBI NO: 21666724 NR Description: cysteine proteinase [Brassica napus]
  misc_feature (56)..(379): Homolog of NCBI NO: 34329348 NR Description: putative cysteine proteinase [Medicago truncatula]
  misc_feature (54)..(381): Homolog of NCBI NO: 5823020 NR Description: senescence-specific cysteine protease [Brassica
  misc_feature (54)..(381): Homolog of NCBI NO: 1046373 NR Description: SAG12 protein
APPCMHRCRSSSSSPLPRGQAKGPAMARSPRLLALLLAVVWICGAALVARADPMLERFEQWMGRHGRLYADAGEKQRRLEVYRRNVELVETFNSMGNGYRLADNKFADLTNEEFRAKMLGFGRPRSGGGAGHSTAPSTVACIGSGLMGRQGYSDLPKSVDWREKGAVAPVKSQGDCGSCWAFSAVAAIEGINQIKNGKLVSLSEQELVDCDTKAIGCAGGYMSWAFEFVMKNRGLTTERNYPYQGLNGACQTPKLKESAVSISGYMNVTPSSEPDLLRAAAAQPVSVAVDAGSFVWQLYGGGVFTGPCTAELNHGVTVVGYGETQGDTDGDGSGVPGKKYWIVKNSWGPEWGDAGYILMQREASVASGLCGIAMLPSYPVM

SEQ ID NO: 12570 - protein, 377 aa, Zea mays subsp. mays
  peptide (1)..(377): Ceres Seq. ID no. 12411505
  misc_feature (151)..(376): Pfam Name: Papain family cysteine protease Pfam Description: Papain family cysteine protease
  misc_feature (29)..(375): Homolog of NCBI NO: 40806498 NR Description: putative cysteine protease 1 [Iris hollandica]
  misc_feature (22)..(375): Homolog of NCBI NO: 24285904 NR Description: cysteine proteinase precursor [Ipomoea batatas]
  misc_feature (22)..(375): Homolog of NCBI NO: 13491750 NR Description: cysteine protease [Ipomoea batatas]
  misc_feature (50)..(377): Homolog of NCBI NO: 18422605 NR Description: senescence-specific cysteine protease SAG12;
  misc_feature (22)..(375): Homolog of NCBI NO: 37780047 NR Description: cysteine protease 8 [Trifolium repens]
  misc_feature (44)..(376): Homolog of NCBI NO: 544129 NR Description: Vignain precursor (Bean endopeptidase) (Cysteine
  misc_feature (50)..(377): Homolog of NCBI NO: 21666724 NR Description: cysteine proteinase [Brassica napus]
  misc_feature (52)..(375): Homolog of NCBI NO: 34329348 NR Description: putative cysteine proteinase [Medicago truncatula]
  misc_feature (50)..(377): Homolog of NCBI NO: 5823020 NR Description: senescence-specific cysteine protease [Brassica
  misc_feature (50)..(377): Homolog of NCBI NO: 1046373 NR Description: SAG12 protein
MHRCRSSSSSPLPRGQAKGPAMARSPRLLALLLAVVWICGAALVARADPMLERFEQWMGRHGRLYADAGEKQRRLEVYRRNVELVETFNSMGNGYRLADNKFADLTNEEFRAKMLGFGRPRSGGGAGHSTAPSTVACIGSGLMGRQGYSDLPKSVDWREKGAVAPVKSQGDCGSCWAFSAVAAIEGINQIKNGKLVSLSEQELVDCDTKAIGCAGGYMSWAFEFVMKNRGLTTERNYPYQGLNGACQTPKLKESAVSISGYMNVTPSSEPDLLRAAAAQPVSVAVDAGSFVWQLYGGGVFTGPCTAELNHGVTVVGYGETQGDTDGDGSGVPGKKYWIVKNSWGPEWGDAGYILMQREASVASGLCGIAMLPSYPVM

SEQ ID NO: 12571 - protein, 356 aa, Zea mays subsp. mays
  peptide (1)..(356): Ceres Seq. ID no. 12411506
  misc_feature (130)..(355): Pfam Name: Papain family cysteine protease Pfam Description: Papain family cysteine protease
  misc_feature (8)..(354): Homolog of NCBI NO: 40806498 NR Description: putative cysteine protease 1 [Iris hollandica]
  misc_feature (1)..(354): Homolog of NCBI NO: 24285904 NR Description: cysteine proteinase precursor [Ipomoea batatas]
  misc_feature (1)..(354): Homolog of NCBI NO: 13491750 NR Description: cysteine protease [Ipomoea batatas]
  misc_feature (29)..(356): Homolog of NCBI NO: 18422605 NR Description: senescence-specific cysteine protease SAG12;
  misc_feature (1)..(354): Homolog of NCBI NO: 37780047 NR Description: cysteine protease 8 [Trifolium repens]
  misc_feature (23)..(355): Homolog of NCBI NO: 544129 NR Description: Vignain precursor (Bean endopeptidase) (Cysteine
  misc_feature (29)..(356): Homolog of NCBI NO: 21666724 NR Description: cysteine proteinase [Brassica napus]
  misc_feature (31)..(354): Homolog of NCBI NO: 34329348 NR Description: putative cysteine proteinase [Medicago truncatula]
  misc_feature (29)..(356): Homolog of NCBI NO: 5823020 NR Description: senescence-specific cysteine protease [Brassica
  misc_feature (29)..(356): Homolog of NCBI NO: 1046373 NR Description: SAG12 protein
MARSPRLLALLLAVVWICGAALVARADPMLERFEQWMGRHGRLYADAGEKQRRLEVYRRNVELVETFNSMGNGYRLADNKFADLTNEEFRAKMLGFGRPRSGGGAGHSTAPSTVACIGSGLMGRQGYSDLPKSVDWREKGAVAPVKSQGDCGSCWAFSAVAAIEGINQIKNGKLVSLSEQELVDCDTKAIGCAGGYMSWAFEFVMKNRGLTTERNYPYQGLNGACQTPKLKESAVSISGYMNVTPSSEPDLLRAAAAQPVSVAVDAGSFVWQLYGGGVFTGPCTAELNHGVTVVGYGETQGDTDGDGSGVPGKKYWIVKNSWGPEWGDAGYILMQREASVASGLCGIAMLPSYPVM

SEQ ID NO: 12572 - DNA, 1825 bp, Zea mays subsp. mays
  misc_feature (1)..(1825): Ceres Seq. ID no. 12411499
  misc_feature: MA Experiment ID: 108535 Result: Up-regulated in Transcription
  misc_feature: MA Experiment 108535 PARAMETER Experiment Name: Zm_Meristem_P Parameter: Age (day) Value: 8
  misc_feature: MA Experiment 108535 PARAMETER Experiment Name: Zm_Meristem_P Parameter: Organism Value: Zea mays
  misc_feature: MA Experiment 108535 PARAMETER Experiment Name: Zm_Meristem_P Parameter: Plant Line Value: 35A19
  misc_feature: MA Experiment 108535 PARAMETER Experiment Name: Zm_Meristem_P Parameter: Tissue Value: Root Meristem vs. Above Root Meristem
  misc_feature: MA Experiment ID: 108543 Result: Up-regulated in Transcription
  misc_feature: MA Experiment ID: 108689 Result: Up-regulated in Transcription
  misc_feature: MA Experiment 108689 PARAMETER Experiment Name: Zm_Drought_Roots_P Parameter: Age (day) Value: 9
  misc_feature: MA Experiment 108689 PARAMETER Experiment Name: Zm_Drought_Roots_P Parameter: Organism Value: Zea mays
  misc_feature: MA Experiment 108689 PARAMETER Experiment Name: Zm_Drought_Roots_P Parameter: Plant Line Value: 35A19
  misc_feature: MA Experiment 108689 PARAMETER Experiment Name: Zm_Drought_Roots_P Parameter: Timepoint (hr) Value: 24
  misc_feature: MA Experiment 108689 PARAMETER Experiment Name: Zm_Drought_Roots_P Parameter: Tissue Value: Roots
  misc_feature: MA Experiment 108689 PARAMETER Experiment Name: Zm_Drought_Roots_P Parameter: Treatment Value: Drought vs. No Drought
  misc_feature: MA Experiment ID: 20000477 Result: Down-regulated in Transcription
  misc_feature: MA Experiment 20000477 PARAMETER Experiment Name: Zm_5mM_SA_P Parameter: Age (day) Value: 10
  misc_feature: MA Experiment 20000477 PARAMETER Experiment Name: Zm_5mM_SA_P Parameter: Organism Value: Zea mays
  misc_feature: MA Experiment 20000477 PARAMETER Experiment Name: Zm_5mM_SA_P Parameter: Plant Line Value: 35A19
  misc_feature: MA Experiment 20000477 PARAMETER Experiment Name: Zm_5mM_SA_P Parameter: Timepoint (hr) Value: 48
  misc_feature: MA Experiment 20000477 PARAMETER Experiment Name: Zm_5mM_SA_P Parameter: Tissue Value: Aerial
  misc_feature: MA Experiment 20000477 PARAMETER Experiment Name: Zm_5mM_SA_P Parameter: Treatment Value: 5mM SA vs. No Treatment
  misc_feature: MA Experiment ID: 20000492 Result: Up-regulated in Transcription
  misc_feature: MA Experiment 20000492 PARAMETER Experiment Name: Zm_Hybrid_Seed_Dev_P Parameter: DAP Value: 12
  misc_feature: MA Experiment 20000492 PARAMETER Experiment Name: Zm_Hybrid_Seed_Dev_P Parameter: Organism Value: Zea mays
  misc_feature: MA Experiment 20000492 PARAMETER Experiment Name: Zm_Hybrid_Seed_Dev_P Parameter: Plant Line Value: 35A19
  misc_feature: MA Experiment 20000492 PARAMETER Experiment Name: Zm_Hybrid_Seed_Dev_P Parameter: Tissue Value: Fert Kernel vs. Unfert Floret
  misc_feature: MA Experiment ID: 20000535 Result: Up-regulated in Transcription
  misc_feature: MA Experiment 20000535 PARAMETER Experiment Name: Zm_Hybrid_Seed_Dev_P Parameter: DAP Value: 30 vs. 12
  misc_feature: MA Experiment 20000535 PARAMETER Experiment Name: Zm_Hybrid_Seed_Dev_P Parameter: Organism Value: Zea mays
  misc_feature: MA Experiment 20000535 PARAMETER Experiment Name: Zm_Hybrid_Seed_Dev_P Parameter: Plant Line Value: 35A19
  misc_feature: MA Experiment 20000535 PARAMETER Experiment Name: Zm_Hybrid_Seed_Dev_P Parameter: Tissue Value: Embryo vs. Unfert Floret
gggtatatatatacggcgccggcgccgaggagagaggaccccggccgatcccgcacccctgactgtcagccgcgatccgctcttttttgcgtgcagcggcggagcaggagatatggcgtcggaggccaaggacgtgggcatcctcgccatggacatctacttcccgcccaactgcgtgctccaggaagagttggaaacacatgatggcgtgagcaaagggaagtataccattgggcttgggcaggaaagtatggcattttgcactgaagttgaggatgttatttcgatgagcttgacagcggtgaagtccctcctgaaaaattataacattgacccaaagtgcattggacgtttggaagttggcagtgaaaccgtaatagacaagagcaagtctataaagacatggctgatgcagatatttgaggaatctggcaatactgatattgaaggagttgactcctcgaatgcatgttatggtggaacagctgcattgtttaattgtgttaactgggttgaaagcaagtcatgggatggtcgctatggacttgttgtttgcacagacagtgcggtttacgctgaaggtccggctcgccctactggtggtgcggctgctattgcaatgctgattggaccaaatgctcctatttgttttgaaagtaaatatagaggatctcatatggcccatgtatacgacttttacaagcccgatcttgcgagtgaatatccggtggttgatgggaagctatcacaaacatgctacctcatggcattggactcctgctacaatctattttgcaaaaagtatgaaaaacatgaggggaagcagttttcaatttctgatgcagattatgttgtgttccattctccatacaacaagcttgtacagaaaagcttcgctcgtttgtactacaatgatttcttgagaaactgcagcacggttgatggagagtcaagggaaaaattggcaccctatgcaggcttgtcatctgaagaaagctaccagagtcgcgaccttgaaaaggcatctcagcaagtcgcaaagaatctgtacgagtccaaggttcagccaacaacattgatcccaaaacaagttgggaatatgtatacagcatcactctacgcagctcttgcatcggttgtccacagtagacatgaaactctggcaggccagaggattgttatgttttcgtatggcagtgggttgacatcaacgatgttctctttcatgattaatgaaggccatcaccctttcagtctgctaaacatcgcaaacatactggatatttccaagaaactgaaggcaaggcacgtggttcccccagagaaatttgtggaggcactaaaactgatggagcaccgctatggggcaagagatttcgtgacgagtcaagatacaagtctgctacccgcaggcacatactatctcacgcacgttgactccaagtacagaaggttctacgacgtgaaaggtgacggtgtcgccactgcaatgtccaacggccactgatctttcttctgcccgaagctgcaacaagtcaaataacagaggcaagtgtcctaagcatccttagatgattatatctattaggaggggaagctggagttatagattaatctctgcccagctgtaaggttgtaaagttagttagagctgcgcatgcatgcttgtttagtaaaagctctgctgctcttcagttatttagcgaatcaagcacactgctgggctataagaattgtaaacaataatctgcagaatcactggctacatccaggctatgctgatgaatgcacgatttcatgtttagcacgatcaatgcatctggct

SEQ ID NO: 12573 - protein, 501 aa, Zea mays subsp. mays
  peptide (1)..(501): Ceres Seq. ID no. 12411500
  misc_feature (42)..(489): Pfam Name: Hydroxymethylglutaryl-coenzyme A synthase Pfam Description: Hydroxymethylglutaryl-coenzyme A synthase
  misc_feature (42)..(501): Homolog of NCBI NO: 16417956 NR Description: hydroxymethylglutaryl coenzyme A synthase [Hevea
  misc_feature (42)..(501): Homolog of NCBI NO: 14916100 NR Description: hydroxymethylglutaryl coenzyme A synthase [Hevea
  misc_feature (42)..(501): Homolog of NCBI NO: 7799986 NR Description: HMG-CoA synthase [Brassica juncea]
  misc_feature (42)..(501): Homolog of NCBI NO: 11192003 NR Description: HMG-CoA synthase [Brassica juncea]
  misc_feature (42)..(501): Homolog of NCBI NO: 11192005 NR Description: HMG-CoA synthase [Brassica juncea]
  misc_feature (42)..(501): Homolog of NCBI NO: 15234313 NR Description: hydroxymethylglutaryl-CoA synthase; protein id: supported by cDNA: 22413., supported by cDNA: gi_4098520
  misc_feature (42)..(501): Homolog of NCBI NO: 1143390 NR Description: hydroxymethylglutaryl-CoA synthase [Arabidopsis
  misc_feature (38)..(500): Homolog of NCBI NO: 7436678 NR Description: hydroxymethylglutaryl-CoA synthase (EC 4.1.3.5),
  misc_feature (42)..(500): Homolog of NCBI NO: 11192007 NR Description: HMG-CoA synthase [Brassica juncea]
  misc_feature (96)..(501): Homolog of NCBI NO: 30681902 NR Description: hydroxymethylglutaryl-CoA synthase [Arabidopsis
GIYIRRRRRGERTPADPAPLTVSRDPLFFACSGGAGDMASEAKDVGILAMDIYFPPNCVLQEELETHDGVSKGKYTIGLGQESMAFCTEVEDVISMSLTAVKSLLKNYNIDPKCIGRLEVGSETVIDKSKSIKTWLMQIFEESGNTDIEGVDSSNACYGGTAALFNCVNWVESKSWDGRYGLVVCTDSAVYAEGPARPTGGAAAIAMLIGPNAPICFESKYRGSHMAHVYDFYKPDLASEYPVVDGKLSQTCYLMALDSCYNLFCKKYEKHEGKQFSISDADYVVFHSPYNKLVQKSFARLYYNDFLRNCSTVDGESREKLAPYAGLSSEESYQSRDLEKASQQVAKNLYESKVQPTTLIPKQVGNMYTASLYAALASVVHSRHETLAGQRIVMFSYGSGLTSTMFSFMINEGHHPFSLLNIANILDISKKLKARHVVPPEKFVEALKLMEHRYGARDFVTSQDTSLLPAGTYYLTHVDSKYRRFYDVKGDGVATAMSNGH

SEQ ID NO: 12574 - protein, 464 aa, Zea mays subsp. mays
  peptide (1)..(464): Ceres Seq. ID no. 12411501
  misc_feature (5)..(452): Pfam Name: Hydroxymethylglutaryl-coenzyme A synthase Pfam Description: Hydroxymethylglutaryl-coenzyme A synthase
  misc_feature (5)..(464): Homolog of NCBI NO: 16417956 NR Description: hydroxymethylglutaryl coenzyme A synthase [Hevea
  misc_feature (5)..(464): Homolog of NCBI NO: 14916100 NR Description: hydroxymethylglutaryl coenzyme A synthase [Hevea
  misc_feature (5)..(464): Homolog of NCBI NO: 7799986 NR Description: HMG-CoA synthase [Brassica juncea]
  misc_feature (5)..(464): Homolog of NCBI NO: 11192003 NR Description: HMG-CoA synthase [Brassica juncea]
  misc_feature (5)..(464): Homolog of NCBI NO: 11192005 NR Description: HMG-CoA synthase [Brassica juncea]
  misc_feature (5)..(464): Homolog of NCBI NO: 15234313 NR Description: hydroxymethylglutaryl-CoA synthase; protein id: supported by cDNA: 22413., supported by cDNA: gi_4098520
  misc_feature (5)..(464): Homolog of NCBI NO: 1143390 NR Description: hydroxymethylglutaryl-CoA synthase [Arabidopsis
  misc_feature (1)..(463): Homolog of NCBI NO: 7436678 NR Description: hydroxymethylglutaryl-CoA synthase (EC 4.1.3.5),
  misc_feature (5)..(463): Homolog of NCBI NO: 11192007 NR Description: HMG-CoA synthase [Brassica juncea]
  misc_feature (59)..(464): Homolog of NCBI NO: 30681902 NR Description: hydroxymethylglutaryl-CoA synthase [Arabidopsis
MASEAKDVGILAMDIYFPPNCVLQEELETHDGVSKGKYTIGLGQESMAFCTEVEDVISMSLTAVKSLLKNYNIDPKCIGRLEVGSETVIDKSKSIKTWLMQIFEESGNTDIEGVDSSNACYGGTAALFNCVNWVESKSWDGRYGLVVCTDSAVYAEGPARPTGGAAAIAMLIGPNAPICFESKYRGSHMAHVYDFYKPDLASEYPVVDGKLSQTCYLMALDSCYNLFCKKYEKHEGKQFSISDADYVVFHSPYNKLVQKSFARLYYNDFLRNCSTVDGESREKLAPYAGLSSEESYQSRDLEKASQQVAKNLYESKVQPTTLIPKQVGNMYTASLYAALASVVHSRHETLAGQRIVMFSYGSGLTSTMFSFMINEGHHPFSLLNIANILDISKKLKARHVVPPEKFVEALKLMEHRYGARDFVTSQDTSLLPAGTYYLTHVDSKYRRFYDVKGDGVATAMSNGH

SEQ ID NO: 12575 - protein, 452 aa, Zea mays subsp. mays
  peptide (1)..(452): Ceres Seq. ID no. 12411502
  misc_feature (1)..(440): Pfam Name: Hydroxymethylglutaryl-coenzyme A synthase Pfam Description: Hydroxymethylglutaryl-coenzyme A synthase
  misc_feature (1)..(452): Homolog of NCBI NO: 16417956 NR Description: hydroxymethylglutaryl coenzyme A synthase [Hevea
  misc_feature (1)..(452): Homolog of NCBI NO: 14916100 NR Description: hydroxymethylglutaryl coenzyme A synthase [Hevea
  misc_feature (1)..(452): Homolog of NCBI NO: 7799986 NR Description: HMG-CoA synthase [Brassica juncea]
  misc_feature (1)..(452): Homolog of NCBI NO: 11192003 NR Description: HMG-CoA synthase [Brassica juncea]
  misc_feature (1)..(452): Homolog of NCBI NO: 11192005 NR Description: HMG-CoA synthase [Brassica juncea]
  misc_feature (1)..(452): Homolog of NCBI NO: 15234313 NR Description: hydroxymethylglutaryl-CoA synthase; protein id: supported by cDNA: 22413., supported by cDNA: gi_4098520
  misc_feature (1)..(452): Homolog of NCBI NO: 1143390 NR Description: hydroxymethylglutaryl-CoA synthase [Arabidopsis
  misc_feature (1)..(451): Homolog of NCBI NO: 7436678 NR Description: hydroxymethylglutaryl-CoA synthase (EC 4.1.3.5),
  misc_feature (1)..(451): Homolog of NCBI NO: 11192007 NR Description: HMG-CoA synthase [Brassica juncea]
  misc_feature (47)..(452): Homolog of NCBI NO: 30681902 NR Description: hydroxymethylglutaryl-CoA synthase [Arabidopsis
MDIYFPPNCVLQEELETHDGVSKGKYTIGLGQESMAFCTEVEDVISMSLTAVKSLLKNYNIDPKCIGRLEVGSETVIDKSKSIKTWLMQIFEESGNTDIEGVDSSNACYGGTAALFNCVNWVESKSWDGRYGLVVCTDSAVYAEGPARPTGGAAAIAMLIGPNAPICFESKYRGSHMAHVYDFYKPDLASEYPVVDGKLSQTCYLMALDSCYNLFCKKYEKHEGKQFSISDADYVVFHSPYNKLVQKSFARLYYNDFLRNCSTVDGESREKLAPYAGLSSEESYQSRDLEKASQQVAKNLYESKVQPTTLIPKQVGNMYTASLYAALASVVHSRHETLAGQRIVMFSYGSGLTSTMFSFMINEGHHPFSLLNIANILDISKKLKARHVVPPEKFVEALKLMEHRYGARDFVTSQDTSLLPAGTYYLTHVDSKYRRFYDVKGDGVATAMSNGH

SEQ ID NO: 12576 - DNA, 1318 bp, Zea mays subsp. mays
  misc_feature (1)..(1318): Ceres Seq. ID no. 12342388
  misc_feature: MA Experiment ID: 20000488 Result: Up-regulated in Transcription
  misc_feature: MA Experiment 20000488 PARAMETER Experiment Name: Zm_50mM_NH4NO3_L_to_H_P Parameter: Organism Value: Zea mays
  misc_feature: MA Experiment 20000488 PARAMETER Experiment Name: Zm_50mM_NH4NO3_L_to_H_P Parameter: Timepoint (hr) Value: 8
  misc_feature: MA Experiment 20000488 PARAMETER Experiment Name: Zm_50mM_NH4NO3_L_to_H_P Parameter: Tissue Value: Leaves
  misc_feature: MA Experiment 20000488 PARAMETER Experiment Name: Zm_50mM_NH4NO3_L_to_H_P Parameter: Treatment Value: 50mM NH4NO3 vs. 100mM Mannitol
  misc_feature: MA Experiment ID: 20000535 Result: Up-regulated in Transcription
  misc_feature: MA Experiment 20000535 PARAMETER Experiment Name: Zm_Hybrid_Seed_Dev_P Parameter: DAP Value: 30 vs. 12
  misc_feature: MA Experiment 20000535 PARAMETER Experiment Name: Zm_Hybrid_Seed_Dev_P Parameter: Organism Value: Zea mays
  misc_feature: MA Experiment 20000535 PARAMETER Experiment Name: Zm_Hybrid_Seed_Dev_P Parameter: Plant Line Value: 35A19
  misc_feature: MA Experiment 20000535 PARAMETER Experiment Name: Zm_Hybrid_Seed_Dev_P Parameter: Tissue Value: Embryo vs. Unfert Floret
  misc_feature: MA Experiment ID: 20000626 Result: Up-regulated in Transcription
  misc_feature: MA Experiment 20000626 PARAMETER Experiment Name: Zm_Herbicide-Treatments_P Parameter: Timepoint (hr) Value: 12
  misc_feature: MA Experiment 20000626 PARAMETER Experiment Name: Zm_Herbicide-Treatments_P Parameter: Tissue Value: Aerial
  misc_feature: MA Experiment 20000626 PARAMETER Experiment Name: Zm_Herbicide-Treatments_P Parameter: Treatment Value: Roundup vs. No Treatment
agatagggctgttttgcagcggtggcccaaaacatgcagaaaggctgcaagggccgaatttttttccaaatcgttccttctacacactgtcgaggagggcagcgggaagggacgagtcgacgccggtgtgcggtggcggcggtcgcgcggtaacgtttcccttcagcttcgatcatgttggtggcggcgccggccacaaaaggctcacccaccaaggatttgacggctgtcgagcccggggacgagggcatgcccttagtcgtgagaggtgacaggaaacttgttcatagtcgttttcgctaccgtaggtggcgcagtcggtgttcgacgcagggggagctatgggttcggtctcggtttgtcaggcgaatggcaaccaccagccgccgccgccgcaggcagaagcggagcaggtcgtcgaggatggcgttgccgtcgacaggatcaatggcaactaccagccgctggagctggtggctgaggcggggcaggtcgtcgaggagggcgatgccggcgtgaccatggaaggcgtcgcttccatcgccttgctgcctaccggtgccatctccggccatttcattcgcctccctgactccatctgctacgggctacacggcaccccaatatcttgcgagagggaatgtagccgaggagaggactaccgccttataaagctcaccatcattgattttaagagcaagagagagaaggtgcttgtggtggaatgcaggggccatgatgctgctcgattacaaaacattgaccatttgcatgggtgggaagatgacattgttggtttggttgagaaggagcacggaaatcagaaagtcttgctctcctttgaatgcgagacgctgaaggctgataaagacgcggaagatcatattgccaaatatatgccaaatctgtgtggactggacgcagttgtaaatatagggaaaatgagcatctcaggcatcaatctcgacgaggacgccgaaccaagaggggacaactgagcgtgtgaacagtggtcattgttcatcagcactggtaaactctgcacgaatcacatcaaacgcttacactgcactacatatggcagtttgatacgtgtctcattaccagtgcctgtacttaaaattctgtggctgtgaatcggattcaaaaccctttatacgtttcaactttcaagttaccacgtcgcttcttgcacgaatcccaagggtcggttgctcctgctgggtgcatttcttgtctgtggcggtactgtttgtcacgctttgtacgtatgactagcattgcttgtctgtttatgagagtggtgctgtgtttcgcc

SEQ ID NO: 12577 - protein, 218 aa, Zea mays subsp. mays
  peptide (1)..(218): Ceres Seq. ID no. 12342389
  misc_feature (53)..(207): Homolog of NCBI NO: 15228659 NR Description: hypothetical protein; protein id: At3g29280.1
  misc_feature (82)..(195): Homolog of NCBI NO: 11994768 NR Description: gene_id:MMF24.3~unknown protein [Arabidopsis
MGSVSVCQANGNHQPPPPQAEAEQVVEDGVAVDRINGNYQPLELVAEAGQVVEEGDAGVTMEGVASIALLPTGAISGHFIRLPDSICYGLHGTPISCERECSRGEDYRLIKLTIIDFKSKREKVLVVECRGHDAARLQNIDHLHGWEDDIVGLVEKEHGNQKVLLSFECETLKADKDAEDHIAKYMPNLCGLDAVVNIGKMSISGINLDEDAEPRGDN

SEQ ID NO: 12578 - protein, 158 aa, Zea mays subsp. mays
  peptide (1)..(158): Ceres Seq. ID no. 12342390
  misc_feature (1)..(147): Homolog of NCBI NO: 15228659 NR Description: hypothetical protein; protein id: At3g29280.1
  misc_feature (22)..(135): Homolog of NCBI NO: 11994768 NR Description: gene_id:MMF24.3~unknown protein [Arabidopsis
MEGVASIALLPTGAISGHFIRLPDSICYGLHGTPISCERECSRGEDYRLIKLTIIDFKSKREKVLVVECRGHDAARLQNIDHLHGWEDDIVGLVEKEHGNQKVLLSFECETLKADKDAEDHIAKYMPNLCGLDAVVNIGKMSISGINLDEDAEPRGDN

SEQ ID NO: 12579 - protein, 114 aa, Zea mays subsp. mays
  peptide (1)..(114): Ceres Seq. ID no. 12342391
MLVAAPATKGSPTKDLTAVEPGDEGMPLVVRGDRKLVHSRFRYRRWRSRCSTQGELWVRSRFVRRMATTSRRRRRQKRSRSSRMALPSTGSMATTSRWSWWLRRGRSSRRAMPA

SEQ ID NO: 12580 - DNA, 1407 bp, Zea mays subsp. mays
  misc_feature (1)..(1407): Ceres Seq. ID no. 12411495
  misc_feature: MA Experiment ID: 108522 Result: Down-regulated in Transcription
  misc_feature: MA Experiment 108522 PARAMETER Experiment Name: Zm_42deg_Heat_P Parameter: Age (day) Value: 8
  misc_feature: MA Experiment 108522 PARAMETER Experiment Name: Zm_42deg_Heat_P Parameter: Organism Value: Zea mays
  misc_feature: MA Experiment 108522 PARAMETER Experiment Name: Zm_42deg_Heat_P Parameter: Plant Line Value: 35A19
  misc_feature: MA Experiment 108522 PARAMETER Experiment Name: Zm_42deg_Heat_P Parameter: Temperature (deg C) Value: 42 vs. 22
  misc_feature: MA Experiment 108522 PARAMETER Experiment Name: Zm_42deg_Heat_P Parameter: Timepoint (hr) Value: 1
  misc_feature: MA Experiment 108522 PARAMETER Experiment Name: Zm_42deg_Heat_P Parameter: Tissue Value: Aerial
  misc_feature: MA Experiment ID: 108556 Result: Down-regulated in Transcription
  misc_feature: MA Experiment 108556 PARAMETER Experiment Name: Zm_Drought_P Parameter: Age (day) Value: 9
  misc_feature: MA Experiment 108556 PARAMETER Experiment Name: Zm_Drought_P Parameter: Organism Value: Zea mays
  misc_feature: MA Experiment 108556 PARAMETER Experiment Name: Zm_Drought_P Parameter: Plant Line Value: 35A19
  misc_feature: MA Experiment 108556 PARAMETER Experiment Name: Zm_Drought_P Parameter: Timepoint (hr) Value: 24
  misc_feature: MA Experiment 108556 PARAMETER Experiment Name: Zm_Drought_P Parameter: Tissue Value: Aerial
  misc_feature: MA Experiment 108556 PARAMETER Experiment Name: Zm_Drought_P Parameter: Treatment Value: Drought vs. No Drought
  misc_feature: MA Experiment ID: 108559 Result: Down-regulated in Transcription
  misc_feature: MA Experiment 108559 PARAMETER Experiment Name: Zm_5mM_NO_P Parameter: Age (day) Value: 8
  misc_feature: MA Experiment 108559 PARAMETER Experiment Name: Zm_5mM_NO_P Parameter: Organism Value: Zea mays
  misc_feature: MA Experiment 108559 PARAMETER Experiment Name: Zm_5mM_NO_P Parameter: Plant Line Value: 35A19
  misc_feature: MA Experiment 108559 PARAMETER Experiment Name: Zm_5mM_NO_P Parameter: Timepoint (hr) Value: 12
  misc_feature: MA Experiment 108559 PARAMETER Experiment Name: Zm_5mM_NO_P Parameter: Tissue Value: Aerial
  misc_feature: MA Experiment 108559 PARAMETER Experiment Name: Zm_5mM_NO_P Parameter: Treatment Value: 5mM NO vs. No Treatment
  misc_feature: MA Experiment ID: 20000108 Result: Down-regulated in Transcription
  misc_feature: MA Experiment 20000108 PARAMETER Experiment Name: Zm_Root-Tips_P Parameter: Age (day) Value: 12
  misc_feature: MA Experiment 20000108 PARAMETER Experiment Name: Zm_Root-Tips_P Parameter: Organism Value: Zea mays
  misc_feature: MA Experiment 20000108 PARAMETER Experiment Name: Zm_Root-Tips_P Parameter: Tissue Value: Root tips vs. Root mid region    35
  misc_feature: MA Experiment 20000108 PARAMETER Experiment Name: Zm_Root-Tips_P Parameter: Tissue Value: Root tips vs. Root mid region   Sequence Listing-Misc Features (4)
  misc_feature: MA Experiment ID: 20000477 Result: Down-regulated in Transcription
  misc_feature: MA Experiment 20000477 PARAMETER Experiment Name: Zm_5mM_SA_P Parameter: Age (day) Value: 10
  misc_feature: MA Experiment 20000477 PARAMETER Experiment Name: Zm_5mM_SA_P Parameter: Organism Value: Zea mays
  misc_feature: MA Experiment 20000477 PARAMETER Experiment Name: Zm_5mM_SA_P Parameter: Plant Line Value: 35A19
  misc_feature: MA Experiment 20000477 PARAMETER Experiment Name: Zm_5mM_SA_P Parameter: Timepoint (hr) Value: 48
  misc_feature: MA Experiment 20000477 PARAMETER Experiment Name: Zm_5mM_SA_P Parameter: Tissue Value: Aerial
  misc_feature: MA Experiment 20000477 PARAMETER Experiment Name: Zm_5mM_SA_P Parameter: Treatment Value: 5mM SA vs. No Treatment
  misc_feature: MA Experiment ID: 20000478 Result: Down-regulated in Transcription
  misc_feature: MA Experiment 20000478 PARAMETER Experiment Name: Zm_5mM_SA_P Parameter: Age (day) Value: 11
  misc_feature: MA Experiment 20000478 PARAMETER Experiment Name: Zm_5mM_SA_P Parameter: Organism Value: Zea mays
  misc_feature: MA Experiment 20000478 PARAMETER Experiment Name: Zm_5mM_SA_P Parameter: Plant Line Value: 35A19
  misc_feature: MA Experiment 20000478 PARAMETER Experiment Name: Zm_5mM_SA_P Parameter: Timepoint (hr) Value: 72
  misc_feature: MA Experiment 20000478 PARAMETER Experiment Name: Zm_5mM_SA_P Parameter: Tissue Value: Aerial
  misc_feature: MA Experiment 20000478 PARAMETER Experiment Name: Zm_5mM_SA_P Parameter: Treatment Value: 5mM SA vs. No Treatment
  misc_feature: MA Experiment ID: 20000480 Result: Down-regulated in Transcription
  misc_feature: MA Experiment 20000480 PARAMETER Experiment Name: Zm_Drought_P Parameter: Age (day) Value: 11
  misc_feature: MA Experiment 20000480 PARAMETER Experiment Name: Zm_Drought_P Parameter: Organism Value: Zea mays
  misc_feature: MA Experiment 20000480 PARAMETER Experiment Name: Zm_Drought_P Parameter: Plant Line Value: 35A19
  misc_feature: MA Experiment 20000480 PARAMETER Experiment Name: Zm_Drought_P Parameter: Timepoint (hr) Value: 72
  misc_feature: MA Experiment 20000480 PARAMETER Experiment Name: Zm_Drought_P Parameter: Tissue Value: Aerial
  misc_feature: MA Experiment 20000480 PARAMETER Experiment Name: Zm_Drought_P Parameter: Treatment Value: Drought vs. No Drought
  misc_feature: MA Experiment ID: 20000535 Result: Down-regulated in Transcription
  misc_feature: MA Experiment 20000535 PARAMETER Experiment Name: Zm_Hybrid_Seed_Dev_P Parameter: DAP Value: 30 vs. 12
  misc_feature: MA Experiment 20000535 PARAMETER Experiment Name: Zm_Hybrid_Seed_Dev_P Parameter: Organism Value: Zea mays
  misc_feature: MA Experiment 20000535 PARAMETER Experiment Name: Zm_Hybrid_Seed_Dev_P Parameter: Plant Line Value: 35A19
  misc_feature: MA Experiment 20000535 PARAMETER Experiment Name: Zm_Hybrid_Seed_Dev_P Parameter: Tissue Value: Embryo vs. Unfert Floret
gttctcttctctccctcctcctatagttggcttctcgcaaccctctgctttcgatcagctttctccgctccccatttccctctccaactccaatccatggcctccacggatcgctccacgccggcggaggacgagcaacagcagaagcgcccgtctctcttctcgccgtaccagatgccccgcttccgcctcgcccaccgggtggtgctggcgccgatgaccaggtgcagggcgcccgacgcggtcccaggccccgcgctcgcggagtactacgcgcagcggtccacggacggcggcttgctcatctccgagggcaccatcatctcgccgtccggccctgggttccctcgtgtccctgggatatacaatcaagaacagactgatgcatggagaaaggtggttgatgctgttcatgccaagggagctatctttttctgccaactatggcatgtaggccgagcttctcaccaagtatatcagccgggtgctgctgctccgatatcctcaactgataagccaatatcatcaagatggaggatactgatgcccgatggatcctatggcaagtatccaactccgaggcgcctagccacatccgagataccagaaattgttgagcaataccgtcaagcagccgtaaacgccatcaaagcaggtttcgatggcatcgagatccatggcgcccatggctacctcatcgatcagttcctcaagggcggtatcaacgaccggactgacgagtacggtggctcactctccaaccgttgccggttcctcctggaggtgacccgagccgtggtctctgcgataggggcagaccgcgtcgcggtccgagtgtccccggccatcgaccatctcgacgcctacgactccaaccccctgcagctcggcctggccgtggtggagcgtctcaacgctctccagcaggaggccgggcggctggcctacctccacgtgacgcagccacggtacacggcgtacgggcagacagagtctggccagcacgggagtgccgaggaggagagccggctgatgcgtgccgtgcgaggtgcctaccgtggcacgttcatgtgcagcggtgggtacacgcgggagctcggggtcgaggccatcgagtccggggacgctgacctggtgtcctacgggcggctgttcatcgctaatcccgacctggtggagcggtttcggcgcgacgccccgctgaacaaatacgtgcgcaagacgttctacacgccggaccccgtcgtcggttacacggactacacattcctcggccagcctaaggcacgcatgtgatttgattattagtgcgttgccgtaattataagaggcggagtattgtttgtatgttgtgacttgagaaaacaagcaaacatctgggtaatgccgcgattgttacgtattcct

SEQ ID NO: 12581 - protein, 431 aa, Zea mays subsp. mays
  peptide (1)..(431): Ceres Seq. ID no. 12411496
  misc_feature (53)..(402): Pfam Name: NADH:flavin oxidoreductase / NADH oxidase family Pfam Description: NADH:flavin oxidoreductase / NADH oxidase family
  misc_feature (42)..(424): Homolog of NCBI NO: 12056507 NR Description: 12-oxophytodienoate reductase 3 [Lycopersicon
  misc_feature (46)..(431): Homolog of NCBI NO: 6707797 NR Description: 12-oxo-phytodienoate reductase [Arabidopsis
  misc_feature (46)..(431): Homolog of NCBI NO: 5059115 NR Description: OPDA-reductase homolog [Arabidopsis thaliana]
  misc_feature (46)..(431): Homolog of NCBI NO: 10242314 NR Description: 12-oxo-phytodienoate reductase [Arabidopsis
  misc_feature (46)..(431): Homolog of NCBI NO: 7688991 NR Description: 12-oxo-phytodienoate reductase [Arabidopsis
  misc_feature (46)..(431): Homolog of NCBI NO: 15225045 NR Description: 12-oxophytodienoate reductase (OPR3)(DDE1); id: At2g06050.1, supported by cDNA: gi_10242313, supported by
  misc_feature (45)..(424): Homolog of NCBI NO: 40645459 NR Description: LEDI-5c protein [Lithospermum erythrorhizon]
  misc_feature (53)..(424): Homolog of NCBI NO: 23495288 NR Description: 12-oxophytodienoic acid reductase [Oryza sativa]
  misc_feature (43)..(424): Homolog of NCBI NO: 7449901 NR Description: probable 12-oxophytodienoate reductase (EC
  misc_feature (43)..(424): Homolog of NCBI NO: 14277800 NR Description: Chain A, Crystal Structure Of 12-Oxophytodienoate
VLFSPSSYSWLLATLCFRSAFSAPHFPLQLQSMASTDRSTPAEDEQQQKRPSLFSPYQMPRFRLAHRVVLAPMTRCRAPDAVPGPALAEYYAQRSTDGGLLISEGTIISPSGPGFPRVPGIYNQEQTDAWRKVVDAVHAKGAIFFCQLWHVGRASHQVYQPGAAAPISSTDKPISSRWRILMPDGSYGKYPTPRRLATSEIPEIVEQYRQAAVNAIKAGFDGIEIHGAHGYLIDQFLKGGINDRTDEYGGSLSNRCRFLLEVTRAVVSAIGADRVAVRVSPAIDHLDAYDSNPLQLGLAVVERLNALQQEAGRLAYLHVTQPRYTAYGQTESGQHGSAEEESRLMRAVRGAYRGTFMCSGGYTRELGVEAIESGDADLVSYGRLFIANPDLVERFRRDAPLNKYVRKTFYTPDPVVGYTDYTFLGQPKARM

SEQ ID NO: 12582 - protein, 399 aa, Zea mays subsp. mays
  peptide (1)..(399): Ceres Seq. ID no. 12411497
  misc_feature (21)..(370): Pfam Name: NADH:flavin oxidoreductase / NADH oxidase family Pfam Description: NADH:flavin oxidoreductase / NADH oxidase family
  misc_feature (14)..(399): Homolog of NCBI NO: 15225045 NR Description: 12-oxophytodienoate reductase (OPR3)(DDE1); id: At2g06050.1, supported by cDNA: gi_10242313, supported by
  misc_feature (13)..(392): Homolog of NCBI NO: 40645459 NR Description: LEDI-5c protein [Lithospermum erythrorhizon]
  misc_feature (21)..(392): Homolog of NCBI NO: 23495288 NR Description: 12-oxophytodienoic acid reductase [Oryza sativa]
  misc_feature (14)..(399): Homolog of NCBI NO: 6707797 NR Description: 12-oxo-phytodienoate reductase [Arabidopsis
  misc_feature (14)..(399): Homolog of NCBI NO: 10242314 NR Description: 12-oxo-phytodienoate reductase [Arabidopsis
  misc_feature (14)..(399): Homolog of NCBI NO: 7688991 NR Description: 12-oxo-phytodienoate reductase [Arabidopsis
  misc_feature (14)..(399): Homolog of NCBI NO: 5059115 NR Description: OPDA-reductase homolog [Arabidopsis thaliana]
  misc_feature (10)..(392): Homolog of NCBI NO: 12056507 NR Description: 12-oxophytodienoate reductase 3 [Lycopersicon
  misc_feature (11)..(392): Homolog of NCBI NO: 7449901 NR Description: probable 12-oxophytodienoate reductase (EC
  misc_feature (11)..(392): Homolog of NCBI NO: 14277800 NR Description: Chain A, Crystal Structure Of 12-Oxophytodienoate
MASTDRSTPAEDEQQQKRPSLFSPYQMPRFRLAHRVVLAPMTRCRAPDAVPGPALAEYYAQRSTDGGLLISEGTIISPSGPGFPRVPGIYNQEQTDAWRKVVDAVHAKGAIFFCQLWHVGRASHQVYQPGAAAPISSTDKPISSRWRILMPDGSYGKYPTPRRLATSEIPEIVEQYRQAAVNAIKAGFDGIEIHGAHGYLIDQFLKGGINDRTDEYGGSLSNRCRFLLEVTRAVVSAIGADRVAVRVSPAIDHLDAYDSNPLQLGLAVVERLNALQQEAGRLAYLHVTQPRYTAYGQTESGQHGSAEEESRLMRAVRGAYRGTFMCSGGYTRELGVEAIESGDADLVSYGRLFIANPDLVERFRRDAPLNKYVRKTFYTPDPVVGYTDYTFLGQPKARM

SEQ ID NO: 12583 - protein, 373 aa, Zea mays subsp. mays
  peptide (1)..(373): Ceres Seq. ID no. 12411498
  misc_feature (1)..(344): Pfam Name: NADH:flavin oxidoreductase / NADH oxidase family Pfam Description: NADH:flavin oxidoreductase / NADH oxidase family
  misc_feature (1)..(366): Homolog of NCBI NO: 12056507 NR Description: 12-oxophytodienoate reductase 3 [Lycopersicon
  misc_feature (1)..(373): Homolog of NCBI NO: 6707797 NR Description: 12-oxo-phytodienoate reductase [Arabidopsis
  misc_feature (1)..(373): Homolog of NCBI NO: 5059115 NR Description: OPDA-reductase homolog [Arabidopsis thaliana]
  misc_feature (1)..(373): Homolog of NCBI NO: 10242314 NR Description: 12-oxo-phytodienoate reductase [Arabidopsis
  misc_feature (1)..(373): Homolog of NCBI NO: 7688991 NR Description: 12-oxo-phytodienoate reductase [Arabidopsis
  misc_feature (1)..(373): Homolog of NCBI NO: 15225045 NR Description: 12-oxophytodienoate reductase (OPR3)(DDE1); id: At2g06050.1, supported by cDNA: gi_10242313, supported by
  misc_feature (1)..(366): Homolog of NCBI NO: 40645459 NR Description: LEDI-5c protein [Lithospermum erythrorhizon]
  misc_feature (1)..(366): Homolog of NCBI NO: 23495288 NR Description: 12-oxophytodienoic acid reductase [Oryza sativa]
  misc_feature (1)..(366): Homolog of NCBI NO: 7449901 NR Description: probable 12-oxophytodienoate reductase (EC
  misc_feature (1)..(366): Homolog of NCBI NO: 14277800 NR Description: Chain A, Crystal Structure Of 12-Oxophytodienoate
MPRFRLAHRVVLAPMTRCRAPDAVPGPALAEYYAQRSTDGGLLISEGTIISPSGPGFPRVPGIYNQEQTDAWRKVVDAVHAKGAIFFCQLWHVGRASHQVYQPGAAAPISSTDKPISSRWRILMPDGSYGKYPTPRRLATSEIPEIVEQYRQAAVNAIKAGFDGIEIHGAHGYLIDQFLKGGINDRTDEYGGSLSNRCRFLLEVTRAVVSAIGADRVAVRVSPAIDHLDAYDSNPLQLGLAVVERLNALQQEAGRLAYLHVTQPRYTAYGQTESGQHGSAEEESRLMRAVRGAYRGTFMCSGGYTRELGVEAIESGDADLVSYGRLFIANPDLVERFRRDAPLNKYVRKTFYTPDPVVGYTDYTFLGQPKARM

SEQ ID NO: 12584 - DNA, 1161 bp, Zea mays subsp. mays
  misc_feature (1)..(1161): Ceres Seq. ID no. 12348889
  misc_feature: MA Experiment ID: 108535 Result: Up-regulated in Transcription
  misc_feature: MA Experiment 108535 PARAMETER Experiment Name: Zm_Meristem_P Parameter: Age (day) Value: 8
  misc_feature: MA Experiment 108535 PARAMETER Experiment Name: Zm_Meristem_P Parameter: Organism Value: Zea mays
  misc_feature: MA Experiment 108535 PARAMETER Experiment Name: Zm_Meristem_P Parameter: Plant Line Value: 35A19
  misc_feature: MA Experiment 108535 PARAMETER Experiment Name: Zm_Meristem_P Parameter: Tissue Value: Root Meristem vs. Above Root Meristem
  misc_feature: MA Experiment ID: 20000108 Result: Up-regulated in Transcription
  misc_feature: MA Experiment 20000108 PARAMETER Experiment Name: Zm_Root-Tips_P Parameter: Age (day) Value: 12
  misc_feature: MA Experiment 20000108 PARAMETER Experiment Name: Zm_Root-Tips_P Parameter: Organism Value: Zea mays
  misc_feature: MA Experiment 20000108 PARAMETER Experiment Name: Zm_Root-Tips_P Parameter: Tissue Value: Root tips vs. Root mid region    35
  misc_feature: MA Experiment 20000108 PARAMETER Experiment Name: Zm_Root-Tips_P Parameter: Tissue Value: Root tips vs. Root mid region   Sequence Listing-Misc Features (4)
  misc_feature: MA Experiment ID: 20000534 Result: Down-regulated in Transcription
  misc_feature: MA Experiment 20000534 PARAMETER Experiment Name: Zm_Hybrid_Pollen_P Parameter: Age (day) Value: 8
  misc_feature: MA Experiment 20000534 PARAMETER Experiment Name: Zm_Hybrid_Pollen_P Parameter: Organism Value: Zea mays
  misc_feature: MA Experiment 20000534 PARAMETER Experiment Name: Zm_Hybrid_Pollen_P Parameter: Plant Line Value: 35A19
  misc_feature: MA Experiment 20000534 PARAMETER Experiment Name: Zm_Hybrid_Pollen_P Parameter: Tissue Value: Pollen vs. Aerial
  misc_feature: MA Experiment ID: 20000535 Result: Up-regulated in Transcription
  misc_feature: MA Experiment 20000535 PARAMETER Experiment Name: Zm_Hybrid_Seed_Dev_P Parameter: DAP Value: 30 vs. 12
  misc_feature: MA Experiment 20000535 PARAMETER Experiment Name: Zm_Hybrid_Seed_Dev_P Parameter: Organism Value: Zea mays
  misc_feature: MA Experiment 20000535 PARAMETER Experiment Name: Zm_Hybrid_Seed_Dev_P Parameter: Plant Line Value: 35A19
  misc_feature: MA Experiment 20000535 PARAMETER Experiment Name: Zm_Hybrid_Seed_Dev_P Parameter: Tissue Value: Embryo vs. Unfert Floret
actgctccctctggcttcccgcctcctcttcggctccttcgcgtcccgacgccccctcatggccaccgccgccgccaccgtagcagcagcagtctcctccccggctgccccacgcgccggggccgccgccgcctcccgccgggggttcgtcacgtttggtggaggcgccgcccgcttctctcccacgctgcggtccggccgtgggttctctggtgtgcaaacccatgttgccgctgttgaacaagcaattgtaaaagatgctaccaagctggaagctccagttgttgttgttacaggtgcatctagagggattggtaaggcaactgctctagcccttggaaaagcaggatgcaaggttctggtaaactatgccctgtcctcgaaagaggctgaagaggtctccaaagagattgaagcatctggtggtgaggctatcaccttcggaggagatgtttcaaaagaagctgatgtagagtctatgatgaaagcagctctagataaatggggaacaatagatgtgctggtaaataatgcagggattacacgagacgcattgttgatgaggatgaagaaatctcagtggcaagacgtaattgatctgaatcttactggtgtcttcctttgtacacaggctgcaacaaaagtaatgatgaaaaagagaaagggaaaaattatcaacattgcatctgtagttggtcttactggcaatgttggccaagctaattatagcgcagccaaggctggagtgattggtttcacaaaaacagttgccagggagtatgcaagcagaaatatcaatgtgaatgctattgcaccagggttcattgcatctgatatgactgccgaacttggagaagagcttgagaagaaaatcttgtcaaccattccgttagggagatatggccaaccagaggaagttgcagggttggtcgagttcctggcccttaaccccgcagctagctatatgactggacaggtgcttacaattgacggagggatggtaatgtaagatttgagttagcttgatgcacttctacttttgctgagcatttaatgttgaacacccttgttgtgcacgggcgattttggacaacaaattagtgttgtctctttctttgtaatactctctggtaataaatctagcatgtggaatggaagttg

SEQ ID NO: 12585 - protein, 335 aa, Zea mays subsp. mays
  peptide (1)..(335): Ceres Seq. ID no. 12348890
  misc_feature (20)..(335): Homolog of NCBI NO: 38346116 NR Description: OSJNBb0006N15.11 [Oryza sativa (japonica
  misc_feature (20)..(335): Homolog of NCBI NO: 119791 NR Description: 3-oxoacyl-[acyl-carrier protein] reductase,
  misc_feature (72)..(335): Homolog of NCBI NO: 14422251 NR Description: 3-oxyacyl-[acyl carrier protein] reductase
  misc_feature (72)..(335): Homolog of NCBI NO: 14422263 NR Description: beta-oxyacyl-[acyl-carrier protein] reductase
  misc_feature (73)..(335): Homolog of NCBI NO: 14422249 NR Description: 3-oxyacyl-[acyl carrier protein] reductase
  misc_feature (73)..(335): Homolog of NCBI NO: 14422247 NR Description: 3-oxyacyl-[acyl-carrier protein] reductase
  misc_feature (92)..(335): Homolog of NCBI NO: 13096234 NR Description: Chain A, The X-Ray Structure Of Beta-Keto Acyl
  misc_feature (24)..(335): Homolog of NCBI NO: 18395461 NR Description: putative 3-oxoacyl (acyl-carrier protein) protein id: At1g24360.1, supported by cDNA: gi_13358177, by cDNA: gi_16648892, supported by cDNA: gi_20148324 [Arabidopsis
  misc_feature (89)..(335): Homolog of NCBI NO: 14422253 NR Description: 3-oxyacyl-[acyl carrier protein] reductase
  misc_feature (24)..(335): Homolog of NCBI NO: 99753 NR Description: 3-oxoacyl-[acyl-carrier-protein] reductase (EC
LLPLASRLLFGSFASRRPLMATAAATVAAAVSSPAAPRAGAAAASRRGFVTFGGGAARFSPTLRSGRGFSGVQTHVAAVEQAIVKDATKLEAPVVVVTGASRGIGKATALALGKAGCKVLVNYALSSKEAEEVSKEIEASGGEAITFGGDVSKEADVESMMKAALDKWGTIDVLVNNAGITRDALLMRMKKSQWQDVIDLNLTGVFLCTQAATKVMMKKRKGKIINIASVVGLTGNVGQANYSAAKAGVIGFTKTVAREYASRNINVNAIAPGFIASDMTAELGEELEKKILSTIPLGRYGQPEEVAGLVEFLALNPAASYMTGQVLTIDGGMVM

SEQ ID NO: 12586 - protein, 316 aa, Zea mays subsp. mays
  peptide (1)..(316): Ceres Seq. ID no. 12348891
  misc_feature (1)..(316): Homolog of NCBI NO: 38346116 NR Description: OSJNBb0006N15.11 [Oryza sativa (japonica
  misc_feature (1)..(316): Homolog of NCBI NO: 119791 NR Description: 3-oxoacyl-[acyl-carrier protein] reductase,
  misc_feature (53)..(316): Homolog of NCBI NO: 14422251 NR Description: 3-oxyacyl-[acyl carrier protein] reductase
  misc_feature (53)..(316): Homolog of NCBI NO: 14422263 NR Description: beta-oxyacyl-[acyl-carrier protein] reductase
  misc_feature (54)..(316): Homolog of NCBI NO: 14422249 NR Description: 3-oxyacyl-[acyl carrier protein] reductase
  misc_feature (54)..(316): Homolog of NCBI NO: 14422247 NR Description: 3-oxyacyl-[acyl-carrier protein] reductase
  misc_feature (73)..(316): Homolog of NCBI NO: 13096234 NR Description: Chain A, The X-Ray Structure Of Beta-Keto Acyl
  misc_feature (5)..(316): Homolog of NCBI NO: 18395461 NR Description: putative 3-oxoacyl (acyl-carrier protein) protein id: At1g24360.1, supported by cDNA: gi_13358177, by cDNA: gi_16648892, supported by cDNA: gi_20148324 [Arabidopsis
  misc_feature (70)..(316): Homolog of NCBI NO: 14422253 NR Description: 3-oxyacyl-[acyl carrier protein] reductase
  misc_feature (5)..(316): Homolog of NCBI NO: 99753 NR Description: 3-oxoacyl-[acyl-carrier-protein] reductase (EC
MATAAATVAAAVSSPAAPRAGAAAASRRGFVTFGGGAARFSPTLRSGRGFSGVQTHVAAVEQAIVKDATKLEAPVVVVTGASRGIGKATALALGKAGCKVLVNYALSSKEAEEVSKEIEASGGEAITFGGDVSKEADVESMMKAALDKWGTIDVLVNNAGITRDALLMRMKKSQWQDVIDLNLTGVFLCTQAATKVMMKKRKGKIINIASVVGLTGNVGQANYSAAKAGVIGFTKTVAREYASRNINVNAIAPGFIASDMTAELGEELEKKILSTIPLGRYGQPEEVAGLVEFLALNPAASYMTGQVLTIDGGMVM

SEQ ID NO: 12587 - protein, 176 aa, Zea mays subsp. mays
  peptide (1)..(176): Ceres Seq. ID no. 12348892
  misc_feature (1)..(176): Homolog of NCBI NO: 38346116 NR Description: OSJNBb0006N15.11 [Oryza sativa (japonica
  misc_feature (1)..(176): Homolog of NCBI NO: 119791 NR Description: 3-oxoacyl-[acyl-carrier protein] reductase,
  misc_feature (1)..(176): Homolog of NCBI NO: 14422251 NR Description: 3-oxyacyl-[acyl carrier protein] reductase
  misc_feature (1)..(176): Homolog of NCBI NO: 14422263 NR Description: beta-oxyacyl-[acyl-carrier protein] reductase
  misc_feature (1)..(176): Homolog of NCBI NO: 14422249 NR Description: 3-oxyacyl-[acyl carrier protein] reductase
  misc_feature (1)..(176): Homolog of NCBI NO: 14422247 NR Description: 3-oxyacyl-[acyl-carrier protein] reductase
  misc_feature (1)..(176): Homolog of NCBI NO: 13096234 NR Description: Chain A, The X-Ray Structure Of Beta-Keto Acyl
  misc_feature (1)..(176): Homolog of NCBI NO: 18395461 NR Description: putative 3-oxoacyl (acyl-carrier protein) protein id: At1g24360.1, supported by cDNA: gi_13358177, by cDNA: gi_16648892, supported by cDNA: gi_20148324 [Arabidopsis
  misc_feature (1)..(176): Homolog of NCBI NO: 14422253 NR Description: 3-oxyacyl-[acyl carrier protein] reductase
  misc_feature (1)..(176): Homolog of NCBI NO: 99753 NR Description: 3-oxoacyl-[acyl-carrier-protein] reductase (EC
MMKAALDKWGTIDVLVNNAGITRDALLMRMKKSQWQDVIDLNLTGVFLCTQAATKVMMKKRKGKIINIASVVGLTGNVGQANYSAAKAGVIGFTKTVAREYASRNINVNAIAPGFIASDMTAELGEELEKKILSTIPLGRYGQPEEVAGLVEFLALNPAASYMTGQVLTIDGGMVM

SEQ ID NO: 12588 - DNA, 1239 bp, Zea mays subsp. mays
  misc_feature (1)..(1239): Ceres Seq. ID no. 12364583
  misc_feature: MA Experiment ID: 108527 Result: Up-regulated in Transcription
  misc_feature: MA Experiment 108527 PARAMETER Experiment Name: Zm_5mM_NO_P Parameter: Age (day) Value: 8
  misc_feature: MA Experiment 108527 PARAMETER Experiment Name: Zm_5mM_NO_P Parameter: Organism Value: Zea mays
  misc_feature: MA Experiment 108527 PARAMETER Experiment Name: Zm_5mM_NO_P Parameter: Plant Line Value: 35A19
  misc_feature: MA Experiment 108527 PARAMETER Experiment Name: Zm_5mM_NO_P Parameter: Timepoint (hr) Value: 6
  misc_feature: MA Experiment 108527 PARAMETER Experiment Name: Zm_5mM_NO_P Parameter: Tissue Value: Aerial
  misc_feature: MA Experiment 108527 PARAMETER Experiment Name: Zm_5mM_NO_P Parameter: Treatment Value: 5mM NO vs. No Treatment
  misc_feature: MA Experiment ID: 108543 Result: Up-regulated in Transcription
  misc_feature: MA Experiment ID: 108544 Result: Up-regulated in Transcription
  misc_feature: MA Experiment ID: 20000478 Result: Up-regulated in Transcription
  misc_feature: MA Experiment 20000478 PARAMETER Experiment Name: Zm_5mM_SA_P Parameter: Age (day) Value: 11
  misc_feature: MA Experiment 20000478 PARAMETER Experiment Name: Zm_5mM_SA_P Parameter: Organism Value: Zea mays
  misc_feature: MA Experiment 20000478 PARAMETER Experiment Name: Zm_5mM_SA_P Parameter: Plant Line Value: 35A19
  misc_feature: MA Experiment 20000478 PARAMETER Experiment Name: Zm_5mM_SA_P Parameter: Timepoint (hr) Value: 72
  misc_feature: MA Experiment 20000478 PARAMETER Experiment Name: Zm_5mM_SA_P Parameter: Tissue Value: Aerial
  misc_feature: MA Experiment 20000478 PARAMETER Experiment Name: Zm_5mM_SA_P Parameter: Treatment Value: 5mM SA vs. No Treatment
gcacgagaccattacctagaacatcctaatcgaaaagtcctcctcgttgttttgttccgtttccccccttgcctcgctcgtcgcgtacagctggacgcctcctttctcgctgcgggctgttgccttgcctccgtcccctcccctcgtcgcctccgactccacctcccctccccggtctctgagagagggagcccggacccggagaccgccagcaagcgcgaggcagaggaggagcatggcggccccgccgtcgaggtcgcggggcgactgaccacctgattaagctcctgctcatcggcgacagcggagttggaaagagttgcttgctgctgcggttctctgatgacacattcacgacaagttttatcaccaccatcggcattgatttcaaggttaggacggtcgagctcgatggaaagcgtgtaaaattacaaatttgggacactgctggtcaagaacgtttccgaacaattaccactgcttactacagaggagctatgggcattctgcttgtatacgatgtcacagacgaatcgtccttcgataacattaggaactggattcgcaacatagagcagcacgcatctgataatgtcaacaagatcttggtgggcaacaaggtcgatatggatgcgaagcgggtggtctccacagctcaaggtcagaagctcgcagatgaatacgggatcaagtttttcgagacgagtgcgaaaacgaaccgaaatgtggagcaggtattcttcgccatggcaagggacgtgaagcaaaggctcaccgagaccgttgccgctgcggctgagcccccgaccattcagattagcaggccagaccccgaccaggctgacgcagcctcctcgcggcggtggtcgtcgtcctgctgtaacacctgatctggcgactgccgtggcgaaatcaagcagcgtgaatcttgatgcgcgtgactggactgctaggttactgattgtcgcctgtgttcactttcattccggtgccgtgccaagccaagccgggatgtataaatttcgctgtctagtattcacctcaatcaatgtgttaactcccgctgcttcgcacgtcacgtcgtttgtttgttgagagcaaaacgtgtgtggggcagataaaaaaaaaagccctggtgggtttgctcctgtcacgtactaaacagaacgtgtctgatgattgtgtcgacggtggaacttggaagcgtgcttgtctcactattgttccgtgttttcgtcc

SEQ ID NO: 12589 - protein, 130 aa, Zea mays subsp. mays
  peptide (1)..(130): Ceres Seq. ID no. 12364584
  misc_feature (1)..(90): Pfam Name: Ras family Pfam Description: Ras family
  misc_feature (1)..(130): Homolog of NCBI NO: 38175435 NR Description: putative ras-related protein [Oryza sativa
  misc_feature (1)..(130): Homolog of NCBI NO: 18447917 NR Description: ras-related protein RAB8-3 [Nicotiana tabacum]
  misc_feature (1)..(130): Homolog of NCBI NO: 15231322 NR Description: GTP-binding protein ara-3; protein id: supported by cDNA: gi_14334917, supported by cDNA: gi_14596014,
  misc_feature (1)..(130): Homolog of NCBI NO: 1370190 NR Description: RAB8A [Lotus japonicus]
  misc_feature (1)..(130): Homolog of NCBI NO: 18447921 NR Description: ras-related protein RAB8-5 [Nicotiana tabacum]
  misc_feature (1)..(130): Homolog of NCBI NO: 18447913 NR Description: ras-related protein RAB8-1 [Nicotiana tabacum]
  misc_feature (1)..(130): Homolog of NCBI NO: 5669640 NR Description: ethylene-responsive small GTP-binding protein
  misc_feature (1)..(130): Homolog of NCBI NO: 1362066 NR Description: GTP-binding protein GTP6 - garden pea
  misc_feature (1)..(129): Homolog of NCBI NO: 15232784 NR Description: Ras family GTP-binding protein, putative; protein
  misc_feature (1)..(130): Homolog of NCBI NO: 33146687 NR Description: putative ethylene-responsive small GTP-binding
MGILLVYDVTDESSFDNIRNWIRNIEQHASDNVNKILVGNKVDMDAKRVVSTAQGQKLADEYGIKFFETSAKTNRNVEQVFFAMARDVKQRLTETVAAAAEPPTIQISRPDPDQADAASSRRWSSSCCNT

SEQ ID NO: 12590 - protein, 92 aa, Zea mays subsp. mays
  peptide (1)..(92): Ceres Seq. ID no. 12364585
ARDHYLEHPNRKVLLVVLFRFPPCLARRVQLDASFLAAGCCLASVPSPRRLRLHLPSPVSERGSPDPETASKREAEEEHGGPAVEVAGRLTT

SEQ ID NO: 12591 - protein, 87 aa, Zea mays subsp. mays
  peptide (1)..(87): Ceres Seq. ID no. 12364586
  misc_feature (1)..(87): Homolog of NCBI NO: 38175435 NR Description: putative ras-related protein [Oryza sativa
  misc_feature (1)..(87): Homolog of NCBI NO: 18447917 NR Description: ras-related protein RAB8-3 [Nicotiana tabacum]
  misc_feature (1)..(87): Homolog of NCBI NO: 15231322 NR Description: GTP-binding protein ara-3; protein id: supported by cDNA: gi_14334917, supported by cDNA: gi_14596014,
  misc_feature (1)..(87): Homolog of NCBI NO: 1370190 NR Description: RAB8A [Lotus japonicus]
  misc_feature (1)..(87): Homolog of NCBI NO: 18447921 NR Description: ras-related protein RAB8-5 [Nicotiana tabacum]
  misc_feature (1)..(87): Homolog of NCBI NO: 18447913 NR Description: ras-related protein RAB8-1 [Nicotiana tabacum]
  misc_feature (1)..(87): Homolog of NCBI NO: 5669640 NR Description: ethylene-responsive small GTP-binding protein
  misc_feature (1)..(87): Homolog of NCBI NO: 1362066 NR Description: GTP-binding protein GTP6 - garden pea
  misc_feature (1)..(86): Homolog of NCBI NO: 15232784 NR Description: Ras family GTP-binding protein, putative; protein
  misc_feature (1)..(87): Homolog of NCBI NO: 33146687 NR Description: putative ethylene-responsive small GTP-binding
MDAKRVVSTAQGQKLADEYGIKFFETSAKTNRNVEQVFFAMARDVKQRLTETVAAAAEPPTIQISRPDPDQADAASSRRWSSSCCNT

SEQ ID NO: 12592 - DNA, 1854 bp, Zea mays subsp. mays
  misc_feature (1)..(1854): Ceres Seq. ID no. 12368044
  misc_feature: MA Experiment ID: 108544 Result: Up-regulated in Transcription
ccattacctagaacatcctaatcgaaaacatcctaatcgaaaactaacctcgcgccggagtcgtcgcccacgatggcctaccgatccgcagtgctcttgcccgccctcctactggccgtcgccgtcgtcgtggcctccgccgccgccggggacgggaggtggcgggaggagcaggcgcgggaccgggtgccgcgggtgccggggcaggccttcaacaccagcttcgcgcagtacgccgggtacgtgaccgtcagcgagcagcgcggcgctgcgctcttctactggttctttgaggccgagaaggacccggggtccaagcccctcgtgctctggctcaacggagggcctggatgctcgtccattgcttttggacttggagaagaagtaggacctttccatgttaacgcagatgggaagggggtccatgtcaatccttattcttggaacaaagttgcaaatttactgttccttgattcacctgttggtgttggttactcatattcaaacacctctgatgatgctttaaaaaatggggatgcaagaactgccacggattcattggcattcttactgaagtggcttgaacgctttcctcaatacaaggaacgcgaattttatttgacaggggagagttatgctggtcactatgttcctcaactggctcaagccataaaaaggcaccatgaggctactggtgacaaatcaattaatctaaagggctatatggtagggaatgctctcactgatgatttccatgaccactatggaatatttcaattcatgtggactactggcctgatctctgatcaaacatacaagctgctgaatgttttctgtgactacgagtccttcgtgcattcgtctccacagtgtgataagattatggatattgctagcactgaagctggaaacattgattcatatagcatctttcacacctacatgtcatgcatcttttgcctcttcaaagaacaaagtgatgaaaaggctacattctgctggaaaaatgggagaacagtatgatccatgcactgagaagcattcaactgtatacttcaatctagctgaggttcagaaggcacttcatgttaatacagtcattggaaaatcaaaatgggagacttgcagtgaagctgttaatactcattggggggattgcgaaagatctgtgctgcatatctatcatgaacttatacagtatggcctccgtatatgggtgttcagtggagatacagatgcagtgattccagtgacttcaactagatacagcatcgatgctctcaagcttccaacaataactccatggcatgcttggtacgacgatgacggtgaggtcggtggatggacccaagggtacaggggactcaattttgtgaccgtgaggggagcaggtcacgaagtccctcttcatcgacccaaacaggccctcacgctaatcaaatcgttcttgactgggagcccaatgcctgtgcaatccagcacacacagcaacatgtaatccgtgttgttgcaactgattcacgagatgaatgaacatcccgaagcacccaagtcagccagttgtccaacccggcttgttctgcaacttgctgtagttgtttatgtatcagagctaccggtgccggttaccgcagcagccgtgcttttgtcggccctgttggtgcttgttgcagtaccagttatcccctaaggcaggggacagaaactgcggaatagtttttgtttgcattgacgtgacagcactgtaatcttaaacatcgtaccatagtcctttctatgacaaaggtgtggtttctgatgtctgcaataaatgatctggacttggggggtaaaaatgaaatactnctgtgttgc

SEQ ID NO: 12593 - protein, 316 aa, Zea mays subsp. mays
  peptide (1)..(316): Ceres Seq. ID no. 12368045
  misc_feature (4)..(287): Homolog of NCBI NO: 18417667 NR Description: SERINE CARBOXYPEPTIDASE II - like protein; id: At4g30810.1, supported by cDNA: gi_15293048 [Arabidopsis >gi|15293049|gb|AAK93635.1| putative serine carboxypeptidase II
  misc_feature (4)..(191): Homolog of NCBI NO: 25289792 NR Description: SERINE CARBOXYPEPTIDASE II-like protein
  misc_feature (196)..(312): Homolog of NCBI NO: 25289792 NR Description: SERINE CARBOXYPEPTIDASE II-like protein
  misc_feature (5)..(287): Homolog of NCBI NO: 34895992 NR Description: putative carboxypeptidase D [Oryza sativa
  misc_feature (1)..(287): Homolog of NCBI NO: 34908012 NR Description: putative carboxypeptidase D [Oryza sativa
  misc_feature (1)..(287): Homolog of NCBI NO: 7428204 NR Description: carboxypeptidase D (EC 3.4.16.6) precursor -
  misc_feature (1)..(287): Homolog of NCBI NO: 20455471 NR Description: Serine carboxypeptidase II precursor
  misc_feature (35)..(287): Homolog of NCBI NO: 7428205 NR Description: carboxypeptidase D (EC 3.4.16.6) - wheat
  misc_feature (31)..(287): Homolog of NCBI NO: 15227493 NR Description: putative serine carboxypeptidase II; protein id:
  misc_feature (39)..(287): Homolog of NCBI NO: 2493494 NR Description: Serine carboxypeptidase II-2 precursor (CP-MII.2)
MAYRSAVLLPALLLAVAVVVASAAAGDGRWREEQARDRVPRVPGQAFNTSFAQYAGYVTVSEQRGAALFYWFFEAEKDPGSKPLVLWLNGGPGCSSIAFGLGEEVGPFHVNADGKGVHVNPYSWNKVANLLFLDSPVGVGYSYSNTSDDALKNGDARTATDSLAFLLKWLERFPQYKEREFYLTGESYAGHYVPQLAQAIKRHHEATGDKSINLKGYMVGNALTDDFHDHYGIFQFMWTTGLISDQTYKLLNVFCDYESFVHSSPQCDKIMDIASTEAGNIDSYSIFHTYMSCIFCLFKEQSDEKATFCWKNGRTV

SEQ ID NO: 12594 - protein, 223 aa, Zea mays subsp. mays
  peptide (1)..(223): Ceres Seq. ID no. 12368046
  misc_feature (36)..(222): Homolog of NCBI NO: 18417667 NR Description: SERINE CARBOXYPEPTIDASE II - like protein; id: At4g30810.1, supported by cDNA: gi_15293048 [Arabidopsis >gi|15293049|gb|AAK93635.1| putative serine carboxypeptidase II
  misc_feature (63)..(222): Homolog of NCBI NO: 25289792 NR Description: SERINE CARBOXYPEPTIDASE II-like protein
  misc_feature (36)..(223): Homolog of NCBI NO: 34895992 NR Description: putative carboxypeptidase D [Oryza sativa
  misc_feature (61)..(216): Homolog of NCBI NO: 34908012 NR Description: putative carboxypeptidase D [Oryza sativa
  misc_feature (36)..(214): Homolog of NCBI NO: 7428204 NR Description: carboxypeptidase D (EC 3.4.16.6) precursor -
  misc_feature (36)..(214): Homolog of NCBI NO: 20455471 NR Description: Serine carboxypeptidase II precursor
  misc_feature (65)..(217): Homolog of NCBI NO: 7428205 NR Description: carboxypeptidase D (EC 3.4.16.6) - wheat
  misc_feature (36)..(215): Homolog of NCBI NO: 15227493 NR Description: putative serine carboxypeptidase II; protein id:
  misc_feature (36)..(214): Homolog of NCBI NO: 13877871 NR Description: putative serine carboxypeptidase II [Arabidopsis
  misc_feature (38)..(210): Homolog of NCBI NO: 34329345 NR Description: putative serine carboxypeptidase [Medicago
MFSVTTSPSCIRLHSVIRLWILLALKLETLIHIASFTPTCHASFASSKNKVMKRLHSAGKMGEQYDPCTEKHSTVYFNLAEVQKALHVNTVIGKSKWETCSEAVNTHWGDCERSVLHIYHELIQYGLRIWVFSGDTDAVIPVTSTRYSIDALKLPTITPWHAWYDDDGEVGGWTQGYRGLNFVTVRGAGHEVPLHRPKQALTLIKSFLTGSPMPVQSSTHSNM

SEQ ID NO: 12595 - protein, 172 aa, Zea mays subsp. mays
  peptide (1)..(172): Ceres Seq. ID no. 12368047
  misc_feature (1)..(171): Homolog of NCBI NO: 18417667 NR Description: SERINE CARBOXYPEPTIDASE II - like protein; id: At4g30810.1, supported by cDNA: gi_15293048 [Arabidopsis >gi|15293049|gb|AAK93635.1| putative serine carboxypeptidase II
  misc_feature (12)..(171): Homolog of NCBI NO: 25289792 NR Description: SERINE CARBOXYPEPTIDASE II-like protein
  misc_feature (1)..(172): Homolog of NCBI NO: 34895992 NR Description: putative carboxypeptidase D [Oryza sativa
  misc_feature (10)..(165): Homolog of NCBI NO: 34908012 NR Description: putative carboxypeptidase D [Oryza sativa
  misc_feature (1)..(163): Homolog of NCBI NO: 7428204 NR Description: carboxypeptidase D (EC 3.4.16.6) precursor -
  misc_feature (1)..(163): Homolog of NCBI NO: 20455471 NR Description: Serine carboxypeptidase II precursor
  misc_feature (14)..(166): Homolog of NCBI NO: 7428205 NR Description: carboxypeptidase D (EC 3.4.16.6) - wheat
  misc_feature (1)..(164): Homolog of NCBI NO: 15227493 NR Description: putative serine carboxypeptidase II; protein id:
  misc_feature (1)..(163): Homolog of NCBI NO: 13877871 NR Description: putative serine carboxypeptidase II [Arabidopsis
  misc_feature (1)..(159): Homolog of NCBI NO: 34329345 NR Description: putative serine carboxypeptidase [Medicago
MKRLHSAGKMGEQYDPCTEKHSTVYFNLAEVQKALHVNTVIGKSKWETCSEAVNTHWGDCERSVLHIYHELIQYGLRIWVFSGDTDAVIPVTSTRYSIDALKLPTITPWHAWYDDDGEVGGWTQGYRGLNFVTVRGAGHEVPLHRPKQALTLIKSFLTGSPMPVQSSTHSNM

SEQ ID NO: 12596 - DNA, 1486 bp, Zea mays subsp. mays
  misc_feature (1)..(1486): Ceres Seq. ID no. 13573960
  misc_feature: MA Experiment ID: 108523 Result: Up-regulated in Transcription
  misc_feature: MA Experiment 108523 PARAMETER Experiment Name: Zm_42deg_Heat_P Parameter: Age (day) Value: 8
  misc_feature: MA Experiment 108523 PARAMETER Experiment Name: Zm_42deg_Heat_P Parameter: Organism Value: Zea mays
  misc_feature: MA Experiment 108523 PARAMETER Experiment Name: Zm_42deg_Heat_P Parameter: Plant Line Value: 35A19
  misc_feature: MA Experiment 108523 PARAMETER Experiment Name: Zm_42deg_Heat_P Parameter: Temperature (deg C) Value: 42 vs. 22
  misc_feature: MA Experiment 108523 PARAMETER Experiment Name: Zm_42deg_Heat_P Parameter: Timepoint (hr) Value: 6
  misc_feature: MA Experiment 108523 PARAMETER Experiment Name: Zm_42deg_Heat_P Parameter: Tissue Value: Aerial
  misc_feature: MA Experiment ID: 108528 Result: Down-regulated in Transcription
  misc_feature: MA Experiment 108528 PARAMETER Experiment Name: Zm_Imbibed_Seeds_P Parameter: Age (day) Value: 5 vs. 2
  misc_feature: MA Experiment 108528 PARAMETER Experiment Name: Zm_Imbibed_Seeds_P Parameter: Organism Value: Zea mays
  misc_feature: MA Experiment 108528 PARAMETER Experiment Name: Zm_Imbibed_Seeds_P Parameter: Plant Line Value: 35A19
  misc_feature: MA Experiment 108528 PARAMETER Experiment Name: Zm_Imbibed_Seeds_P Parameter: Tissue Value: Aerial vs. Embryo
  misc_feature: MA Experiment ID: 108529 Result: Down-regulated in Transcription
  misc_feature: MA Experiment 108529 PARAMETER Experiment Name: Zm_Imbibed_Seeds_P Parameter: Age (day) Value: 5 vs. 2
  misc_feature: MA Experiment 108529 PARAMETER Experiment Name: Zm_Imbibed_Seeds_P Parameter: Organism Value: Zea mays
  misc_feature: MA Experiment 108529 PARAMETER Experiment Name: Zm_Imbibed_Seeds_P Parameter: Plant Line Value: 35A19
  misc_feature: MA Experiment 108529 PARAMETER Experiment Name: Zm_Imbibed_Seeds_P Parameter: Tissue Value: Roots vs. Embryo
  misc_feature: MA Experiment ID: 108530 Result: Down-regulated in Transcription
  misc_feature: MA Experiment 108530 PARAMETER Experiment Name: Zm_Imbibed_Seeds_P Parameter: Age (day) Value: 6 vs. 2
  misc_feature: MA Experiment 108530 PARAMETER Experiment Name: Zm_Imbibed_Seeds_P Parameter: Organism Value: Zea mays
  misc_feature: MA Experiment 108530 PARAMETER Experiment Name: Zm_Imbibed_Seeds_P Parameter: Plant Line Value: 35A19
  misc_feature: MA Experiment 108530 PARAMETER Experiment Name: Zm_Imbibed_Seeds_P Parameter: Tissue Value: Aerial vs. Embryo
  misc_feature: MA Experiment ID: 108535 Result: Down-regulated in Transcription
  misc_feature: MA Experiment 108535 PARAMETER Experiment Name: Zm_Meristem_P Parameter: Age (day) Value: 8
  misc_feature: MA Experiment 108535 PARAMETER Experiment Name: Zm_Meristem_P Parameter: Organism Value: Zea mays
  misc_feature: MA Experiment 108535 PARAMETER Experiment Name: Zm_Meristem_P Parameter: Plant Line Value: 35A19
  misc_feature: MA Experiment 108535 PARAMETER Experiment Name: Zm_Meristem_P Parameter: Tissue Value: Root Meristem vs. Above Root Meristem
  misc_feature: MA Experiment ID: 108536 Result: Up-regulated in Transcription
  misc_feature: MA Experiment 108536 PARAMETER Experiment Name: Zm_Meristem_P Parameter: Age (day) Value: 8
  misc_feature: MA Experiment 108536 PARAMETER Experiment Name: Zm_Meristem_P Parameter: Organism Value: Zea mays
  misc_feature: MA Experiment 108536 PARAMETER Experiment Name: Zm_Meristem_P Parameter: Plant Line Value: 35A19
  misc_feature: MA Experiment 108536 PARAMETER Experiment Name: Zm_Meristem_P Parameter: Tissue Value: Shoot Meristem vs. Above Shoot Meristem
  misc_feature: MA Experiment ID: 108540 Result: Up-regulated in Transcription
  misc_feature: MA Experiment 108540 PARAMETER Experiment Name: Zm_20percent_PEG_P Parameter: Age (day) Value: 8
  misc_feature: MA Experiment 108540 PARAMETER Experiment Name: Zm_20percent_PEG_P Parameter: Organism Value: Zea mays
  misc_feature: MA Experiment 108540 PARAMETER Experiment Name: Zm_20percent_PEG_P Parameter: Plant Line Value: 35A19
  misc_feature: MA Experiment 108540 PARAMETER Experiment Name: Zm_20percent_PEG_P Parameter: Timepoint (hr) Value: 6
  misc_feature: MA Experiment 108540 PARAMETER Experiment Name: Zm_20percent_PEG_P Parameter: Tissue Value: Aerial
  misc_feature: MA Experiment 108540 PARAMETER Experiment Name: Zm_20percent_PEG_P Parameter: Treatment Value: 20percent PEG vs. No Treatment
  misc_feature: MA Experiment ID: 108544 Result: Up-regulated in Transcription
  misc_feature: MA Experiment ID: 108545 Result: Down-regulated in Transcription
  misc_feature: MA Experiment 108545 PARAMETER Experiment Name: Zm_Imbibed_Seeds_P Parameter: Age (day) Value: 3 vs. 2
  misc_feature: MA Experiment 108545 PARAMETER Experiment Name: Zm_Imbibed_Seeds_P Parameter: Organism Value: Zea mays
  misc_feature: MA Experiment 108545 PARAMETER Experiment Name: Zm_Imbibed_Seeds_P Parameter: Plant Line Value: 35A19
  misc_feature: MA Experiment 108545 PARAMETER Experiment Name: Zm_Imbibed_Seeds_P Parameter: Tissue Value: Aerial vs. Embryo
  misc_feature: MA Experiment ID: 108556 Result: Up-regulated in Transcription
  misc_feature: MA Experiment 108556 PARAMETER Experiment Name: Zm_Drought_P Parameter: Age (day) Value: 9
  misc_feature: MA Experiment 108556 PARAMETER Experiment Name: Zm_Drought_P Parameter: Organism Value: Zea mays
  misc_feature: MA Experiment 108556 PARAMETER Experiment Name: Zm_Drought_P Parameter: Plant Line Value: 35A19
  misc_feature: MA Experiment 108556 PARAMETER Experiment Name: Zm_Drought_P Parameter: Timepoint (hr) Value: 24
  misc_feature: MA Experiment 108556 PARAMETER Experiment Name: Zm_Drought_P Parameter: Tissue Value: Aerial
  misc_feature: MA Experiment 108556 PARAMETER Experiment Name: Zm_Drought_P Parameter: Treatment Value: Drought vs. No Drought
  misc_feature: MA Experiment ID: 20000477 Result: Up-regulated in Transcription
  misc_feature: MA Experiment 20000477 PARAMETER Experiment Name: Zm_5mM_SA_P Parameter: Age (day) Value: 10
  misc_feature: MA Experiment 20000477 PARAMETER Experiment Name: Zm_5mM_SA_P Parameter: Organism Value: Zea mays
  misc_feature: MA Experiment 20000477 PARAMETER Experiment Name: Zm_5mM_SA_P Parameter: Plant Line Value: 35A19
  misc_feature: MA Experiment 20000477 PARAMETER Experiment Name: Zm_5mM_SA_P Parameter: Timepoint (hr) Value: 48
  misc_feature: MA Experiment 20000477 PARAMETER Experiment Name: Zm_5mM_SA_P Parameter: Tissue Value: Aerial
  misc_feature: MA Experiment 20000477 PARAMETER Experiment Name: Zm_5mM_SA_P Parameter: Treatment Value: 5mM SA vs. No Treatment
  misc_feature: MA Experiment ID: 20000478 Result: Up-regulated in Transcription
  misc_feature: MA Experiment 20000478 PARAMETER Experiment Name: Zm_5mM_SA_P Parameter: Age (day) Value: 11
  misc_feature: MA Experiment 20000478 PARAMETER Experiment Name: Zm_5mM_SA_P Parameter: Organism Value: Zea mays
  misc_feature: MA Experiment 20000478 PARAMETER Experiment Name: Zm_5mM_SA_P Parameter: Plant Line Value: 35A19
  misc_feature: MA Experiment 20000478 PARAMETER Experiment Name: Zm_5mM_SA_P Parameter: Timepoint (hr) Value: 72
  misc_feature: MA Experiment 20000478 PARAMETER Experiment Name: Zm_5mM_SA_P Parameter: Tissue Value: Aerial
  misc_feature: MA Experiment 20000478 PARAMETER Experiment Name: Zm_5mM_SA_P Parameter: Treatment Value: 5mM SA vs. No Treatment
  misc_feature: MA Experiment ID: 20000480 Result: Up-regulated in Transcription
  misc_feature: MA Experiment 20000480 PARAMETER Experiment Name: Zm_Drought_P Parameter: Age (day) Value: 11
  misc_feature: MA Experiment 20000480 PARAMETER Experiment Name: Zm_Drought_P Parameter: Organism Value: Zea mays
  misc_feature: MA Experiment 20000480 PARAMETER Experiment Name: Zm_Drought_P Parameter: Plant Line Value: 35A19
  misc_feature: MA Experiment 20000480 PARAMETER Experiment Name: Zm_Drought_P Parameter: Timepoint (hr) Value: 72
  misc_feature: MA Experiment 20000480 PARAMETER Experiment Name: Zm_Drought_P Parameter: Tissue Value: Aerial
  misc_feature: MA Experiment 20000480 PARAMETER Experiment Name: Zm_Drought_P Parameter: Treatment Value: Drought vs. No Drought
  misc_feature: MA Experiment ID: 20000487 Result: Up-regulated in Transcription
  misc_feature: MA Experiment 20000487 PARAMETER Experiment Name: Zm_50mM_NH4NO3_L_to_H_P Parameter: Organism Value: Zea mays
  misc_feature: MA Experiment 20000487 PARAMETER Experiment Name: Zm_50mM_NH4NO3_L_to_H_P Parameter: Timepoint (hr) Value: 4
  misc_feature: MA Experiment 20000487 PARAMETER Experiment Name: Zm_50mM_NH4NO3_L_to_H_P Parameter: Tissue Value: Leaves
  misc_feature: MA Experiment 20000487 PARAMETER Experiment Name: Zm_50mM_NH4NO3_L_to_H_P Parameter: Treatment Value: 50mM NH4NO3 vs. 100mM Mannitol
  misc_feature: MA Experiment ID: 20000488 Result: Up-regulated in Transcription
  misc_feature: MA Experiment 20000488 PARAMETER Experiment Name: Zm_50mM_NH4NO3_L_to_H_P Parameter: Organism Value: Zea mays
  misc_feature: MA Experiment 20000488 PARAMETER Experiment Name: Zm_50mM_NH4NO3_L_to_H_P Parameter: Timepoint (hr) Value: 8
  misc_feature: MA Experiment 20000488 PARAMETER Experiment Name: Zm_50mM_NH4NO3_L_to_H_P Parameter: Tissue Value: Leaves
  misc_feature: MA Experiment 20000488 PARAMETER Experiment Name: Zm_50mM_NH4NO3_L_to_H_P Parameter: Treatment Value: 50mM NH4NO3 vs. 100mM Mannitol
  misc_feature: MA Experiment ID: 20000492 Result: Up-regulated in Transcription
  misc_feature: MA Experiment 20000492 PARAMETER Experiment Name: Zm_Hybrid_Seed_Dev_P Parameter: DAP Value: 12
  misc_feature: MA Experiment 20000492 PARAMETER Experiment Name: Zm_Hybrid_Seed_Dev_P Parameter: Organism Value: Zea mays
  misc_feature: MA Experiment 20000492 PARAMETER Experiment Name: Zm_Hybrid_Seed_Dev_P Parameter: Plant Line Value: 35A19
  misc_feature: MA Experiment 20000492 PARAMETER Experiment Name: Zm_Hybrid_Seed_Dev_P Parameter: Tissue Value: Fert Kernel vs. Unfert Floret
  misc_feature: MA Experiment ID: 20000629 Result: Down-regulated in Transcription
  misc_feature: MA Experiment 20000629 PARAMETER Experiment Name: Zm_Herbicide-Treatments_P Parameter: Timepoint (hr) Value: 12
  misc_feature: MA Experiment 20000629 PARAMETER Experiment Name: Zm_Herbicide-Treatments_P Parameter: Tissue Value: Aerial
  misc_feature: MA Experiment 20000629 PARAMETER Experiment Name: Zm_Herbicide-Treatments_P Parameter: Treatment Value: Trimec vs. No Treatment
  misc_feature: MA Experiment ID: 20001608 Result: Up-regulated in Transcription
  misc_feature: MA Experiment 20001608 PARAMETER Experiment Name: Zm_50ppm_KNO3_L-to-H_P Parameter: Age (day) Value: 21
  misc_feature: MA Experiment 20001608 PARAMETER Experiment Name: Zm_50ppm_KNO3_L-to-H_P Parameter: Organism Value: Zea mays
  misc_feature: MA Experiment 20001608 PARAMETER Experiment Name: Zm_50ppm_KNO3_L-to-H_P Parameter: Plant Line Value: 35A19
  misc_feature: MA Experiment 20001608 PARAMETER Experiment Name: Zm_50ppm_KNO3_L-to-H_P Parameter: Timepoint (hr) Value: 48
  misc_feature: MA Experiment 20001608 PARAMETER Experiment Name: Zm_50ppm_KNO3_L-to-H_P Parameter: Tissue Value: Shoots
  misc_feature: MA Experiment 20001608 PARAMETER Experiment Name: Zm_50ppm_KNO3_L-to-H_P Parameter: Treatment Value: 50ppm KNO3 vs. 50ppm KCl
agccgtggcgaaagcacacacggatcaatcacactcactcgcggccattgtcctgcccgtgcgtgctctgccttttcaggcgatcgaccaaccaacttctcgtcactgccatggctctgctctccgacctcatcaacctcgacctctcgggccgcaccgggaagatcatcgccgagtacatctgggttggcggttccgggatggacgtcaggagcaaagccaggacgctgtccggacctgttgatgaccccagcaagcttccgaagtggaacttcgacggctccagcaccggccaagctccgggcgacgacagcgaagtcatcctttgccctcgggccatcttcagggacccgttcaggaaggggcagaacatactggtcatgtgcgactgctacgagccgaacggggagccgatcccgagcaacaagcggcatggggccgcgaagatctttagccaccctgacgtcaaggctgaggaaccatggttcgggattgagcaggagtacacccttctccagaaggacaccaagtggcctctcggttggccgctggcgtaccctggccctcagggaccttactactgcgccgccggagcggacaagtcctacgggcgggacatcgtggactgcgcatacaaggcctgcctctacgccggcatcgacatcagtggcatcaacggggaggtcatgccggggcagtgggagttccaggtggcccctgccgtcggcgtctcggccggcgaccagctctgggtggctcgctacattcttgagaggatcaccgagatcgccggcgtggttgtctccttcgaccccaagccaattccgggggactggaatggcgctggtgcacacaccaactacagcaccaagtcgatgaggagcgacggcgggtacgaggtgatcaagaaggcgatcggcaagctgggcctccggcaccgggagcacatcgccgcgtacggggacggcaacgagcgcccgctcaccggccgccacgagaccgccgacatcaacaccttcgtctggggcgtgccgaaccgcggggcgtcggtgcgggtgggccgagacaccgagaaggaaggcaaaggctacttcgaggaccggaggccggcgtccaacatggacccgtacgtggtgacctgcctgatcgcggagacaaccatgctgtgggagcccagccactccaacggcgacggcaagggcgccgcggctccttgatttgattctgcggagactgagctctgtgtgtgagccggcctgcgtagatggcaaatgggactgaccctgtcagaaacttgagatgaccataataatagctgcagtgtgctcgttctggggttggataagacccaagaactttttttagctttcttcgaacaagtaatcatggtgctgaaccaacacagatgtgctactaaacacatctaacgagtcaaacgccgaagcatatcccaacgcacaaccccggttaatcttgttacccatgg

SEQ ID NO: 12597 - protein, 404 aa, Zea mays subsp. mays
  peptide (1)..(404): Ceres Seq. ID no. 13573961
  misc_feature (139)..(390): Pfam Name: Glutamine synthetase, catalytic domain Pfam Description: Glutamine synthetase, catalytic domain
  misc_feature (139)..(390): Pfam Name: Glutamine synthetase, catalytic domain Pfam Description: Glutamine synthetase, catalytic domain
  misc_feature (37)..(404): Homolog of NCBI NO: 585202 NR Description: GLUTAMINE SYNTHETASE ROOT ISOZYME 2
  misc_feature (38)..(399): Homolog of NCBI NO: 13324800 NR Description: putative glutamine synthetase [Oryza sativa]
  misc_feature (37)..(391): Homolog of NCBI NO: 2213877 NR Description: glutamine synthetase [Hevea brasiliensis]
  misc_feature (37)..(391): Homolog of NCBI NO: 1084350 NR Description: glutamate-ammonia ligase (EC 6.3.1.2) - rape
  misc_feature (37)..(391): Homolog of NCBI NO: 1707959 NR Description: GLUTAMINE SYNTHETASE CYTOSOLIC ISOZYME 2
  misc_feature (38)..(399): Homolog of NCBI NO: 13324800 NR Description: putative glutamine synthetase [Oryza sativa]
  misc_feature (37)..(391): Homolog of NCBI NO: 1084350 NR Description: glutamate-ammonia ligase (EC 6.3.1.2) - rape
  misc_feature (37)..(391): Homolog of NCBI NO: 121349 NR Description: Glutamine synthetase shoot isozyme
  misc_feature (37)..(391): Homolog of NCBI NO: 1934756 NR Description: cytosolic glutamine synthetase [Brassica napus]
  misc_feature (37)..(391): Homolog of NCBI NO: 15240288 NR Description: glutamate--ammonia ligase [Arabidopsis thaliana] glutamine synthetase [Arabidopsis thaliana] AT5g37600/K12B20_50 [Arabidopsis thaliana]
  misc_feature (37)..(391): Homolog of NCBI NO: 1076474 NR Description: Gln 1.2 protein - radish
  misc_feature (37)..(391): Homolog of NCBI NO: 417060 NR Description: Glutamine synthetase nodule isozyme ligase) (GS) >gi|170637|gb|AAA34239.1| glutamine synthetase
  misc_feature (37)..(391): Homolog of NCBI NO: 1707959 NR Description: GLUTAMINE SYNTHETASE CYTOSOLIC ISOZYME 2
  misc_feature (37)..(391): Homolog of NCBI NO: 2213877 NR Description: glutamine synthetase [Hevea brasiliensis]
  misc_feature (37)..(404): Homolog of NCBI NO: 585202 NR Description: GLUTAMINE SYNTHETASE ROOT ISOZYME 2
  misc_feature (37)..(391): Homolog of NCBI NO: 417060 NR Description: Glutamine synthetase nodule isozyme ligase) (GS) >gi|170637|gb|AAA34239.1| glutamine synthetase
  misc_feature (37)..(391): Homolog of NCBI NO: 1076474 NR Description: Gln 1.2 protein - radish
  misc_feature (37)..(391): Homolog of NCBI NO: 15240288 NR Description: glutamate--ammonia ligase [Arabidopsis thaliana] glutamine synthetase [Arabidopsis thaliana] AT5g37600/K12B20_50 [Arabidopsis thaliana]
  misc_feature (37)..(391): Homolog of NCBI NO: 1934756 NR Description: cytosolic glutamine synthetase [Brassica napus]
  misc_feature (37)..(391): Homolog of NCBI NO: 121349 NR Description: Glutamine synthetase shoot isozyme
PWRKHTRINHTHSRPLSCPCVLCLFRRSTNQLLVTAMALLSDLINLDLSGRTGKIIAEYIWVGGSGMDVRSKARTLSGPVDDPSKLPKWNFDGSSTGQAPGDDSEVILCPRAIFRDPFRKGQNILVMCDCYEPNGEPIPSNKRHGAAKIFSHPDVKAEEPWFGIEQEYTLLQKDTKWPLGWPLAYPGPQGPYYCAAGADKSYGRDIVDCAYKACLYAGIDISGINGEVMPGQWEFQVAPAVGVSAGDQLWVARYILERITEIAGVVVSFDPKPIPGDWNGAGAHTNYSTKSMRSDGGYEVIKKAIGKLGLRHREHIAAYGDGNERPLTGRHETADINTFVWGVPNRGASVRVGRDTEKEGKGYFEDRRPASNMDPYVVTCLIAETTMLWEPSHSNGDGKGAAAP

SEQ ID NO: 12598 - protein, 368 aa, Zea mays subsp. mays
  peptide (1)..(368): Ceres Seq. ID no. 13573962
  misc_feature (103)..(354): Pfam Name: Glutamine synthetase, catalytic domain Pfam Description: Glutamine synthetase, catalytic domain
  misc_feature (103)..(354): Pfam Name: Glutamine synthetase, catalytic domain Pfam Description: Glutamine synthetase, catalytic domain
  misc_feature (1)..(368): Homolog of NCBI NO: 585202 NR Description: GLUTAMINE SYNTHETASE ROOT ISOZYME 2
  misc_feature (2)..(363): Homolog of NCBI NO: 13324800 NR Description: putative glutamine synthetase [Oryza sativa]
  misc_feature (1)..(355): Homolog of NCBI NO: 2213877 NR Description: glutamine synthetase [Hevea brasiliensis]
  misc_feature (1)..(355): Homolog of NCBI NO: 1084350 NR Description: glutamate-ammonia ligase (EC 6.3.1.2) - rape
  misc_feature (1)..(355): Homolog of NCBI NO: 1707959 NR Description: GLUTAMINE SYNTHETASE CYTOSOLIC ISOZYME 2
  misc_feature (2)..(363): Homolog of NCBI NO: 13324800 NR Description: putative glutamine synthetase [Oryza sativa]
  misc_feature (1)..(355): Homolog of NCBI NO: 1084350 NR Description: glutamate-ammonia ligase (EC 6.3.1.2) - rape
  misc_feature (1)..(355): Homolog of NCBI NO: 121349 NR Description: Glutamine synthetase shoot isozyme
  misc_feature (1)..(355): Homolog of NCBI NO: 1934756 NR Description: cytosolic glutamine synthetase [Brassica napus]
  misc_feature (1)..(355): Homolog of NCBI NO: 15240288 NR Description: glutamate--ammonia ligase [Arabidopsis thaliana] glutamine synthetase [Arabidopsis thaliana] AT5g37600/K12B20_50 [Arabidopsis thaliana]
  misc_feature (1)..(355): Homolog of NCBI NO: 1076474 NR Description: Gln 1.2 protein - radish
  misc_feature (1)..(355): Homolog of NCBI NO: 417060 NR Description: Glutamine synthetase nodule isozyme ligase) (GS) >gi|170637|gb|AAA34239.1| glutamine synthetase
  misc_feature (1)..(355): Homolog of NCBI NO: 1707959 NR Description: GLUTAMINE SYNTHETASE CYTOSOLIC ISOZYME 2
  misc_feature (1)..(355): Homolog of NCBI NO: 2213877 NR Description: glutamine synthetase [Hevea brasiliensis]
  misc_feature (1)..(368): Homolog of NCBI NO: 585202 NR Description: GLUTAMINE SYNTHETASE ROOT ISOZYME 2
  misc_feature (1)..(355): Homolog of NCBI NO: 417060 NR Description: Glutamine synthetase nodule isozyme ligase) (GS) >gi|170637|gb|AAA34239.1| glutamine synthetase
  misc_feature (1)..(355): Homolog of NCBI NO: 1076474 NR Description: Gln 1.2 protein - radish
  misc_feature (1)..(355): Homolog of NCBI NO: 15240288 NR Description: glutamate--ammonia ligase [Arabidopsis thaliana] glutamine synthetase [Arabidopsis thaliana] AT5g37600/K12B20_50 [Arabidopsis thaliana]
  misc_feature (1)..(355): Homolog of NCBI NO: 1934756 NR Description: cytosolic glutamine synthetase [Brassica napus]
  misc_feature (1)..(355): Homolog of NCBI NO: 121349 NR Description: Glutamine synthetase shoot isozyme
MALLSDLINLDLSGRTGKIIAEYIWVGGSGMDVRSKARTLSGPVDDPSKLPKWNFDGSSTGQAPGDDSEVILCPRAIFRDPFRKGQNILVMCDCYEPNGEPIPSNKRHGAAKIFSHPDVKAEEPWFGIEQEYTLLQKDTKWPLGWPLAYPGPQGPYYCAAGADKSYGRDIVDCAYKACLYAGIDISGINGEVMPGQWEFQVAPAVGVSAGDQLWVARYILERITEIAGVVVSFDPKPIPGDWNGAGAHTNYSTKSMRSDGGYEVIKKAIGKLGLRHREHIAAYGDGNERPLTGRHETADINTFVWGVPNRGASVRVGRDTEKEGKGYFEDRRPASNMDPYVVTCLIAETTMLWEPSHSNGDGKGAAAP

SEQ ID NO: 12599 - protein, 338 aa, Zea mays subsp. mays
  peptide (1)..(338): Ceres Seq. ID no. 13573963
  misc_feature (73)..(324): Pfam Name: Glutamine synthetase, catalytic domain Pfam Description: Glutamine synthetase, catalytic domain
  misc_feature (73)..(324): Pfam Name: Glutamine synthetase, catalytic domain Pfam Description: Glutamine synthetase, catalytic domain
  misc_feature (1)..(338): Homolog of NCBI NO: 585202 NR Description: GLUTAMINE SYNTHETASE ROOT ISOZYME 2
  misc_feature (1)..(333): Homolog of NCBI NO: 13324800 NR Description: putative glutamine synthetase [Oryza sativa]
  misc_feature (1)..(325): Homolog of NCBI NO: 2213877 NR Description: glutamine synthetase [Hevea brasiliensis]
  misc_feature (1)..(325): Homolog of NCBI NO: 1084350 NR Description: glutamate-ammonia ligase (EC 6.3.1.2) - rape
  misc_feature (1)..(325): Homolog of NCBI NO: 1707959 NR Description: GLUTAMINE SYNTHETASE CYTOSOLIC ISOZYME 2
  misc_feature (1)..(325): Homolog of NCBI NO: 417060 NR Description: Glutamine synthetase nodule isozyme ligase) (GS) >gi|170637|gb|AAA34239.1| glutamine synthetase
  misc_feature (1)..(333): Homolog of NCBI NO: 13324800 NR Description: putative glutamine synthetase [Oryza sativa]
  misc_feature (1)..(325): Homolog of NCBI NO: 15240288 NR Description: glutamate--ammonia ligase [Arabidopsis thaliana] glutamine synthetase [Arabidopsis thaliana] AT5g37600/K12B20_50 [Arabidopsis thaliana]
  misc_feature (1)..(325): Homolog of NCBI NO: 1076474 NR Description: Gln 1.2 protein - radish
  misc_feature (1)..(325): Homolog of NCBI NO: 417060 NR Description: Glutamine synthetase nodule isozyme ligase) (GS) >gi|170637|gb|AAA34239.1| glutamine synthetase
  misc_feature (1)..(325): Homolog of NCBI NO: 1707959 NR Description: GLUTAMINE SYNTHETASE CYTOSOLIC ISOZYME 2
  misc_feature (1)..(325): Homolog of NCBI NO: 1084350 NR Description: glutamate-ammonia ligase (EC 6.3.1.2) - rape
  misc_feature (1)..(325): Homolog of NCBI NO: 2213877 NR Description: glutamine synthetase [Hevea brasiliensis]
  misc_feature (1)..(338): Homolog of NCBI NO: 585202 NR Description: GLUTAMINE SYNTHETASE ROOT ISOZYME 2
  misc_feature (1)..(325): Homolog of NCBI NO: 1076474 NR Description: Gln 1.2 protein - radish
  misc_feature (1)..(325): Homolog of NCBI NO: 15240288 NR Description: glutamate--ammonia ligase [Arabidopsis thaliana] glutamine synthetase [Arabidopsis thaliana] AT5g37600/K12B20_50 [Arabidopsis thaliana]
  misc_feature (1)..(325): Homolog of NCBI NO: 1934756 NR Description: cytosolic glutamine synthetase [Brassica napus]
  misc_feature (1)..(325): Homolog of NCBI NO: 121349 NR Description: Glutamine synthetase shoot isozyme
  misc_feature (1)..(325): Homolog of NCBI NO: 1934756 NR Description: cytosolic glutamine synthetase [Brassica napus]
  misc_feature (1)..(325): Homolog of NCBI NO: 121349 NR Description: Glutamine synthetase shoot isozyme
MDVRSKARTLSGPVDDPSKLPKWNFDGSSTGQAPGDDSEVILCPRAIFRDPFRKGQNILVMCDCYEPNGEPIPSNKRHGAAKIFSHPDVKAEEPWFGIEQEYTLLQKDTKWPLGWPLAYPGPQGPYYCAAGADKSYGRDIVDCAYKACLYAGIDISGINGEVMPGQWEFQVAPAVGVSAGDQLWVARYILERITEIAGVVVSFDPKPIPGDWNGAGAHTNYSTKSMRSDGGYEVIKKAIGKLGLRHREHIAAYGDGNERPLTGRHETADINTFVWGVPNRGASVRVGRDTEKEGKGYFEDRRPASNMDPYVVTCLIAETTMLWEPSHSNGDGKGAAAP

SEQ ID NO: 12600 - DNA, 809 bp, Zea mays subsp. mays
  misc_feature (1)..(809): Ceres Seq. ID no. 12345167
  misc_feature: MA Experiment ID: 108527 Result: Up-regulated in Transcription
  misc_feature: MA Experiment 108527 PARAMETER Experiment Name: Zm_5mM_NO_P Parameter: Age (day) Value: 8
  misc_feature: MA Experiment 108527 PARAMETER Experiment Name: Zm_5mM_NO_P Parameter: Organism Value: Zea mays
  misc_feature: MA Experiment 108527 PARAMETER Experiment Name: Zm_5mM_NO_P Parameter: Plant Line Value: 35A19
  misc_feature: MA Experiment 108527 PARAMETER Experiment Name: Zm_5mM_NO_P Parameter: Timepoint (hr) Value: 6
  misc_feature: MA Experiment 108527 PARAMETER Experiment Name: Zm_5mM_NO_P Parameter: Tissue Value: Aerial
  misc_feature: MA Experiment 108527 PARAMETER Experiment Name: Zm_5mM_NO_P Parameter: Treatment Value: 5mM NO vs. No Treatment
  misc_feature: MA Experiment ID: 108528 Result: Down-regulated in Transcription
  misc_feature: MA Experiment 108528 PARAMETER Experiment Name: Zm_Imbibed_Seeds_P Parameter: Age (day) Value: 5 vs. 2
  misc_feature: MA Experiment 108528 PARAMETER Experiment Name: Zm_Imbibed_Seeds_P Parameter: Organism Value: Zea mays
  misc_feature: MA Experiment 108528 PARAMETER Experiment Name: Zm_Imbibed_Seeds_P Parameter: Plant Line Value: 35A19
  misc_feature: MA Experiment 108528 PARAMETER Experiment Name: Zm_Imbibed_Seeds_P Parameter: Tissue Value: Aerial vs. Embryo
  misc_feature: MA Experiment ID: 108530 Result: Down-regulated in Transcription
  misc_feature: MA Experiment 108530 PARAMETER Experiment Name: Zm_Imbibed_Seeds_P Parameter: Age (day) Value: 6 vs. 2
  misc_feature: MA Experiment 108530 PARAMETER Experiment Name: Zm_Imbibed_Seeds_P Parameter: Organism Value: Zea mays
  misc_feature: MA Experiment 108530 PARAMETER Experiment Name: Zm_Imbibed_Seeds_P Parameter: Plant Line Value: 35A19
  misc_feature: MA Experiment 108530 PARAMETER Experiment Name: Zm_Imbibed_Seeds_P Parameter: Tissue Value: Aerial vs. Embryo
  misc_feature: MA Experiment ID: 108543 Result: Up-regulated in Transcription
  misc_feature: MA Experiment ID: 108545 Result: Down-regulated in Transcription
  misc_feature: MA Experiment 108545 PARAMETER Experiment Name: Zm_Imbibed_Seeds_P Parameter: Age (day) Value: 3 vs. 2
  misc_feature: MA Experiment 108545 PARAMETER Experiment Name: Zm_Imbibed_Seeds_P Parameter: Organism Value: Zea mays
  misc_feature: MA Experiment 108545 PARAMETER Experiment Name: Zm_Imbibed_Seeds_P Parameter: Plant Line Value: 35A19
  misc_feature: MA Experiment 108545 PARAMETER Experiment Name: Zm_Imbibed_Seeds_P Parameter: Tissue Value: Aerial vs. Embryo
  misc_feature: MA Experiment ID: 108547 Result: Down-regulated in Transcription
  misc_feature: MA Experiment 108547 PARAMETER Experiment Name: Zm_Imbibed_Seeds_P Parameter: Age (day) Value: 4 vs. 2
  misc_feature: MA Experiment 108547 PARAMETER Experiment Name: Zm_Imbibed_Seeds_P Parameter: Organism Value: Zea mays
  misc_feature: MA Experiment 108547 PARAMETER Experiment Name: Zm_Imbibed_Seeds_P Parameter: Plant Line Value: 35A19
  misc_feature: MA Experiment 108547 PARAMETER Experiment Name: Zm_Imbibed_Seeds_P Parameter: Tissue Value: Aerial vs. Embryo
  misc_feature: MA Experiment ID: 108689 Result: Up-regulated in Transcription
  misc_feature: MA Experiment 108689 PARAMETER Experiment Name: Zm_Drought_Roots_P Parameter: Age (day) Value: 9
  misc_feature: MA Experiment 108689 PARAMETER Experiment Name: Zm_Drought_Roots_P Parameter: Organism Value: Zea mays
  misc_feature: MA Experiment 108689 PARAMETER Experiment Name: Zm_Drought_Roots_P Parameter: Plant Line Value: 35A19
  misc_feature: MA Experiment 108689 PARAMETER Experiment Name: Zm_Drought_Roots_P Parameter: Timepoint (hr) Value: 24
  misc_feature: MA Experiment 108689 PARAMETER Experiment Name: Zm_Drought_Roots_P Parameter: Tissue Value: Roots
  misc_feature: MA Experiment 108689 PARAMETER Experiment Name: Zm_Drought_Roots_P Parameter: Treatment Value: Drought vs. No Drought
  misc_feature: MA Experiment ID: 20000477 Result: Up-regulated in Transcription
  misc_feature: MA Experiment 20000477 PARAMETER Experiment Name: Zm_5mM_SA_P Parameter: Age (day) Value: 10
  misc_feature: MA Experiment 20000477 PARAMETER Experiment Name: Zm_5mM_SA_P Parameter: Organism Value: Zea mays
  misc_feature: MA Experiment 20000477 PARAMETER Experiment Name: Zm_5mM_SA_P Parameter: Plant Line Value: 35A19
  misc_feature: MA Experiment 20000477 PARAMETER Experiment Name: Zm_5mM_SA_P Parameter: Timepoint (hr) Value: 48
  misc_feature: MA Experiment 20000477 PARAMETER Experiment Name: Zm_5mM_SA_P Parameter: Tissue Value: Aerial
  misc_feature: MA Experiment 20000477 PARAMETER Experiment Name: Zm_5mM_SA_P Parameter: Treatment Value: 5mM SA vs. No Treatment
  misc_feature: MA Experiment ID: 20000478 Result: Up-regulated in Transcription
  misc_feature: MA Experiment 20000478 PARAMETER Experiment Name: Zm_5mM_SA_P Parameter: Age (day) Value: 11
  misc_feature: MA Experiment 20000478 PARAMETER Experiment Name: Zm_5mM_SA_P Parameter: Organism Value: Zea mays
  misc_feature: MA Experiment 20000478 PARAMETER Experiment Name: Zm_5mM_SA_P Parameter: Plant Line Value: 35A19
  misc_feature: MA Experiment 20000478 PARAMETER Experiment Name: Zm_5mM_SA_P Parameter: Timepoint (hr) Value: 72
  misc_feature: MA Experiment 20000478 PARAMETER Experiment Name: Zm_5mM_SA_P Parameter: Tissue Value: Aerial
  misc_feature: MA Experiment 20000478 PARAMETER Experiment Name: Zm_5mM_SA_P Parameter: Treatment Value: 5mM SA vs. No Treatment
  misc_feature: MA Experiment ID: 20000479 Result: Up-regulated in Transcription
  misc_feature: MA Experiment 20000479 PARAMETER Experiment Name: Zm_Drought_P Parameter: Age (day) Value: 10
  misc_feature: MA Experiment 20000479 PARAMETER Experiment Name: Zm_Drought_P Parameter: Organism Value: Zea mays
  misc_feature: MA Experiment 20000479 PARAMETER Experiment Name: Zm_Drought_P Parameter: Plant Line Value: 35A19
  misc_feature: MA Experiment 20000479 PARAMETER Experiment Name: Zm_Drought_P Parameter: Timepoint (hr) Value: 48
  misc_feature: MA Experiment 20000479 PARAMETER Experiment Name: Zm_Drought_P Parameter: Tissue Value: Aerial
  misc_feature: MA Experiment 20000479 PARAMETER Experiment Name: Zm_Drought_P Parameter: Treatment Value: Drought vs. No Drought
ctctttcagggccttgaaatctcgccctcgttgcggtcgtccacatccttttctctcctcctcgccggcccaacctgattgttcttcaaccaagaggaagaaaggaaggaagggaccggaagcatcagccatgtcgaactcggcgtcgggaatggccgtctgtgatgaatgcaagctcaagttccaggagctcaaggcaaagaggagcttccgcttcatcgtgttcaagatcaacgagaacgtgcagcaggtggtggtggacaggctaggggagccaggcgagagctacgacgccttcacggcctgcttccccgccaacgagtgccgctacgccgtgttcgattttgacttcgtcactgacgagaactgccagaagagcaagatcttctttatctcttgggccccggatacatcgagggtgagaagcaagatgctgtacgcgagctccaaggaccggttcaagagggagctggatggcattcaggtggagctacaagcaaccgacccgagcgaaatgagcatggacatcgtcaagtcgcgagccctctgaaacagccccggccgctgcacctgcacgctgcaggggcgcatcggctcctgcatgcccgtgggtcgtcgaatccttgcttgtgtgttgggaacggtcttgtgttttcgtgtccttgttttcctggaagcaaaagccctgcattctgtatgagactgtatgccattttccatctttttctctccccatatctctgccctagtcccgctaccgctgtagactagaacttatttggtgtttgatctcgtggcattgtcgagcc

SEQ ID NO: 12601 - protein, 182 aa, Zea mays subsp. mays
  peptide (1)..(182): Ceres Seq. ID no. 12345168
  misc_feature (55)..(181): Pfam Name: Cofilin/tropomyosin-type actin-binding protein Pfam Description: Cofilin/tropomyosin-type actin-binding protein
  misc_feature (44)..(182): Homolog of NCBI NO: 38345587 NR Description: OSJNBb0012E24.5 [Oryza sativa (japonica
  misc_feature (44)..(181): Homolog of NCBI NO: 231509 NR Description: Actin-depolymerizing factor (ADF)
  misc_feature (44)..(182): Homolog of NCBI NO: 22857914 NR Description: pollen specific actin-depolymerizing factor 2
  misc_feature (44)..(180): Homolog of NCBI NO: 15223471 NR Description: actin depolymerizing factor, putative; protein At1g01750.1, supported by cDNA: 545., supported by cDNA:
  misc_feature (44)..(180): Homolog of NCBI NO: 18411410 NR Description: putative actin-depolymerizing factor; protein id:
  misc_feature (51)..(182): Homolog of NCBI NO: 15235159 NR Description: actin depolymerizing factor-like protein; protein
  misc_feature (44)..(181): Homolog of NCBI NO: 17366768 NR Description: Actin-depolymerizing factor 1 (ADF 1)
  misc_feature (44)..(182): Homolog of NCBI NO: 18423381 NR Description: actin depolymerizing factor-like; protein id:
  misc_feature (44)..(181): Homolog of NCBI NO: 17366765 NR Description: Actin-depolymerizing factor 2 (ADF 2)
  misc_feature (44)..(181): Homolog of NCBI NO: 22831338 NR Description: putative actin-depolymerizing factor 2 [Oryza
SFRALKSRPRCGRPHPFLSSSPAQPDCSSTKRKKGRKGPEASAMSNSASGMAVCDECKLKFQELKAKRSFRFIVFKINENVQQVVVDRLGEPGESYDAFTACFPANECRYAVFDFDFVTDENCQKSKIFFISWAPDTSRVRSKMLYASSKDRFKRELDGIQVELQATDPSEMSMDIVKSRAL

SEQ ID NO: 12602 - protein, 139 aa, Zea mays subsp. mays
  peptide (1)..(139): Ceres Seq. ID no. 12345169
  misc_feature (12)..(138): Pfam Name: Cofilin/tropomyosin-type actin-binding protein Pfam Description: Cofilin/tropomyosin-type actin-binding protein
  misc_feature (1)..(139): Homolog of NCBI NO: 38345587 NR Description: OSJNBb0012E24.5 [Oryza sativa (japonica
  misc_feature (1)..(138): Homolog of NCBI NO: 231509 NR Description: Actin-depolymerizing factor (ADF)
  misc_feature (1)..(139): Homolog of NCBI NO: 22857914 NR Description: pollen specific actin-depolymerizing factor 2
  misc_feature (1)..(137): Homolog of NCBI NO: 15223471 NR Description: actin depolymerizing factor, putative; protein At1g01750.1, supported by cDNA: 545., supported by cDNA:
  misc_feature (1)..(137): Homolog of NCBI NO: 18411410 NR Description: putative actin-depolymerizing factor; protein id:
  misc_feature (8)..(139): Homolog of NCBI NO: 15235159 NR Description: actin depolymerizing factor-like protein; protein
  misc_feature (1)..(138): Homolog of NCBI NO: 17366768 NR Description: Actin-depolymerizing factor 1 (ADF 1)
  misc_feature (1)..(139): Homolog of NCBI NO: 18423381 NR Description: actin depolymerizing factor-like; protein id:
  misc_feature (1)..(138): Homolog of NCBI NO: 17366765 NR Description: Actin-depolymerizing factor 2 (ADF 2)
  misc_feature (1)..(138): Homolog of NCBI NO: 22831338 NR Description: putative actin-depolymerizing factor 2 [Oryza
MSNSASGMAVCDECKLKFQELKAKRSFRFIVFKINENVQQVVVDRLGEPGESYDAFTACFPANECRYAVFDFDFVTDENCQKSKIFFISWAPDTSRVRSKMLYASSKDRFKRELDGIQVELQATDPSEMSMDIVKSRAL

SEQ ID NO: 12603 - protein, 132 aa, Zea mays subsp. mays
  peptide (1)..(132): Ceres Seq. ID no. 12345170
  misc_feature (5)..(131): Pfam Name: Cofilin/tropomyosin-type actin-binding protein Pfam Description: Cofilin/tropomyosin-type actin-binding protein
  misc_feature (1)..(132): Homolog of NCBI NO: 38345587 NR Description: OSJNBb0012E24.5 [Oryza sativa (japonica
  misc_feature (1)..(131): Homolog of NCBI NO: 231509 NR Description: Actin-depolymerizing factor (ADF)
  misc_feature (1)..(132): Homolog of NCBI NO: 22857914 NR Description: pollen specific actin-depolymerizing factor 2
  misc_feature (1)..(130): Homolog of NCBI NO: 15223471 NR Description: actin depolymerizing factor, putative; protein At1g01750.1, supported by cDNA: 545., supported by cDNA:
  misc_feature (1)..(130): Homolog of NCBI NO: 18411410 NR Description: putative actin-depolymerizing factor; protein id:
  misc_feature (1)..(132): Homolog of NCBI NO: 15235159 NR Description: actin depolymerizing factor-like protein; protein
  misc_feature (1)..(131): Homolog of NCBI NO: 17366768 NR Description: Actin-depolymerizing factor 1 (ADF 1)
  misc_feature (1)..(132): Homolog of NCBI NO: 18423381 NR Description: actin depolymerizing factor-like; protein id:
  misc_feature (1)..(131): Homolog of NCBI NO: 17366765 NR Description: Actin-depolymerizing factor 2 (ADF 2)
  misc_feature (1)..(131): Homolog of NCBI NO: 22831338 NR Description: putative actin-depolymerizing factor 2 [Oryza
MAVCDECKLKFQELKAKRSFRFIVFKINENVQQVVVDRLGEPGESYDAFTACFPANECRYAVFDFDFVTDENCQKSKIFFISWAPDTSRVRSKMLYASSKDRFKRELDGIQVELQATDPSEMSMDIVKSRAL

SEQ ID NO: 12604 - DNA, 1057 bp, Zea mays subsp. mays
  misc_feature (1)..(1057): Ceres Seq. ID no. 12350456
  misc_feature: MA Experiment ID: 108515 Result: Down-regulated in Transcription
  misc_feature: MA Experiment 108515 PARAMETER Experiment Name: Zm_2mM_SA_P Parameter: Age (day) Value: 8
  misc_feature: MA Experiment 108515 PARAMETER Experiment Name: Zm_2mM_SA_P Parameter: Organism Value: Zea mays
  misc_feature: MA Experiment 108515 PARAMETER Experiment Name: Zm_2mM_SA_P Parameter: Plant Line Value: 35A19
  misc_feature: MA Experiment 108515 PARAMETER Experiment Name: Zm_2mM_SA_P Parameter: Timepoint (hr) Value: 12
  misc_feature: MA Experiment 108515 PARAMETER Experiment Name: Zm_2mM_SA_P Parameter: Tissue Value: Aerial
  misc_feature: MA Experiment 108515 PARAMETER Experiment Name: Zm_2mM_SA_P Parameter: Treatment Value: 2mM SA vs. No Treatment
  misc_feature: MA Experiment ID: 108522 Result: Up-regulated in Transcription
  misc_feature: MA Experiment 108522 PARAMETER Experiment Name: Zm_42deg_Heat_P Parameter: Age (day) Value: 8
  misc_feature: MA Experiment 108522 PARAMETER Experiment Name: Zm_42deg_Heat_P Parameter: Organism Value: Zea mays
  misc_feature: MA Experiment 108522 PARAMETER Experiment Name: Zm_42deg_Heat_P Parameter: Plant Line Value: 35A19
  misc_feature: MA Experiment 108522 PARAMETER Experiment Name: Zm_42deg_Heat_P Parameter: Temperature (deg C) Value: 42 vs. 22
  misc_feature: MA Experiment 108522 PARAMETER Experiment Name: Zm_42deg_Heat_P Parameter: Timepoint (hr) Value: 1
  misc_feature: MA Experiment 108522 PARAMETER Experiment Name: Zm_42deg_Heat_P Parameter: Tissue Value: Aerial
  misc_feature: MA Experiment ID: 108527 Result: Down-regulated in Transcription
  misc_feature: MA Experiment 108527 PARAMETER Experiment Name: Zm_5mM_NO_P Parameter: Age (day) Value: 8
  misc_feature: MA Experiment 108527 PARAMETER Experiment Name: Zm_5mM_NO_P Parameter: Organism Value: Zea mays
  misc_feature: MA Experiment 108527 PARAMETER Experiment Name: Zm_5mM_NO_P Parameter: Plant Line Value: 35A19
  misc_feature: MA Experiment 108527 PARAMETER Experiment Name: Zm_5mM_NO_P Parameter: Timepoint (hr) Value: 6
  misc_feature: MA Experiment 108527 PARAMETER Experiment Name: Zm_5mM_NO_P Parameter: Tissue Value: Aerial
  misc_feature: MA Experiment 108527 PARAMETER Experiment Name: Zm_5mM_NO_P Parameter: Treatment Value: 5mM NO vs. No Treatment
  misc_feature: MA Experiment ID: 108528 Result: Up-regulated in Transcription
  misc_feature: MA Experiment 108528 PARAMETER Experiment Name: Zm_Imbibed_Seeds_P Parameter: Age (day) Value: 5 vs. 2
  misc_feature: MA Experiment 108528 PARAMETER Experiment Name: Zm_Imbibed_Seeds_P Parameter: Organism Value: Zea mays
  misc_feature: MA Experiment 108528 PARAMETER Experiment Name: Zm_Imbibed_Seeds_P Parameter: Plant Line Value: 35A19
  misc_feature: MA Experiment 108528 PARAMETER Experiment Name: Zm_Imbibed_Seeds_P Parameter: Tissue Value: Aerial vs. Embryo
  misc_feature: MA Experiment ID: 108530 Result: Up-regulated in Transcription
  misc_feature: MA Experiment 108530 PARAMETER Experiment Name: Zm_Imbibed_Seeds_P Parameter: Age (day) Value: 6 vs. 2
  misc_feature: MA Experiment 108530 PARAMETER Experiment Name: Zm_Imbibed_Seeds_P Parameter: Organism Value: Zea mays
  misc_feature: MA Experiment 108530 PARAMETER Experiment Name: Zm_Imbibed_Seeds_P Parameter: Plant Line Value: 35A19
  misc_feature: MA Experiment 108530 PARAMETER Experiment Name: Zm_Imbibed_Seeds_P Parameter: Tissue Value: Aerial vs. Embryo
  misc_feature: MA Experiment ID: 108536 Result: Down-regulated in Transcription
  misc_feature: MA Experiment 108536 PARAMETER Experiment Name: Zm_Meristem_P Parameter: Age (day) Value: 8
  misc_feature: MA Experiment 108536 PARAMETER Experiment Name: Zm_Meristem_P Parameter: Organism Value: Zea mays
  misc_feature: MA Experiment 108536 PARAMETER Experiment Name: Zm_Meristem_P Parameter: Plant Line Value: 35A19
  misc_feature: MA Experiment 108536 PARAMETER Experiment Name: Zm_Meristem_P Parameter: Tissue Value: Shoot Meristem vs. Above Shoot Meristem
  misc_feature: MA Experiment ID: 108547 Result: Up-regulated in Transcription
  misc_feature: MA Experiment 108547 PARAMETER Experiment Name: Zm_Imbibed_Seeds_P Parameter: Age (day) Value: 4 vs. 2
  misc_feature: MA Experiment 108547 PARAMETER Experiment Name: Zm_Imbibed_Seeds_P Parameter: Organism Value: Zea mays
  misc_feature: MA Experiment 108547 PARAMETER Experiment Name: Zm_Imbibed_Seeds_P Parameter: Plant Line Value: 35A19
  misc_feature: MA Experiment 108547 PARAMETER Experiment Name: Zm_Imbibed_Seeds_P Parameter: Tissue Value: Aerial vs. Embryo
  misc_feature: MA Experiment ID: 108559 Result: Down-regulated in Transcription
  misc_feature: MA Experiment 108559 PARAMETER Experiment Name: Zm_5mM_NO_P Parameter: Age (day) Value: 8
  misc_feature: MA Experiment 108559 PARAMETER Experiment Name: Zm_5mM_NO_P Parameter: Organism Value: Zea mays
  misc_feature: MA Experiment 108559 PARAMETER Experiment Name: Zm_5mM_NO_P Parameter: Plant Line Value: 35A19
  misc_feature: MA Experiment 108559 PARAMETER Experiment Name: Zm_5mM_NO_P Parameter: Timepoint (hr) Value: 12
  misc_feature: MA Experiment 108559 PARAMETER Experiment Name: Zm_5mM_NO_P Parameter: Tissue Value: Aerial
  misc_feature: MA Experiment 108559 PARAMETER Experiment Name: Zm_5mM_NO_P Parameter: Treatment Value: 5mM NO vs. No Treatment
  misc_feature: MA Experiment ID: 20000626 Result: Down-regulated in Transcription
  misc_feature: MA Experiment 20000626 PARAMETER Experiment Name: Zm_Herbicide-Treatments_P Parameter: Timepoint (hr) Value: 12
  misc_feature: MA Experiment 20000626 PARAMETER Experiment Name: Zm_Herbicide-Treatments_P Parameter: Tissue Value: Aerial
  misc_feature: MA Experiment 20000626 PARAMETER Experiment Name: Zm_Herbicide-Treatments_P Parameter: Treatment Value: Roundup vs. No Treatment
accaccactttctcactgaccactgtgccgcggcatgctcaccggacggacacaaggtcgacgaccactaagcatagagaacgacgatggccgcgtcggcgctgcagcagaccatcagcttcctcgggcaggccctggtctcccgccccgccggcgtcgatgccggcggccgcatcaccatgcgccgcaccgtcaagagcgctccccagagcatctggtacggccctgaccgccccaagtaccttgggccgttctccgagcagatgccgtcatacctgacgggcgagttccccggcgactacgggtgggacaccgcggggctctccgcggaccccaagacgttcgcgcgcaaccgggagctggaggtgatccactcccggtgggcgatgctgggcgcgctggggtgcgtgttcccagaggtcctggcgaagaacggcgtcaagttcggcgaggccgtgtggttcaaggccggcgcagatcttctcggagggcgggctggactacctggggaacccgaacctggtgcacgcgcagagcatcctggcccatctgggcgtgctaggtggtgctcatgggcttcgtcgagggctttggcggcggcccgctcgaggaagggctcgacaaggtgtaccccgacggcgccttcgacccgctgggcctcgtcgacgactcggacaccgccgccgagctcaaggtaaaggagctcaagaacggccacctcgccttgttctccatgttcgggttctttgtgcaggccatcgtcaccggcaagggccccatcgagaacctcttcgaccacgtcgccgaccccgtcgccaacaacgcatgggcctacgccactaacttcgtccccggcaactaactgatgatcgatccgtccgtccgttcgtcgagcgagccgtgtggtggtgttccttgtactctacttgttgaagtcgtaggcgtgtagtagttgcacgtgtcggtgtacgatgatgatcgatctgtgccgaattttttgtattttagccatttcttgggaaaaaatcacatttagaccctagaaaattttaatgtc

SEQ ID NO: 12605 - protein, 203 aa, Zea mays subsp. mays
  peptide (1)..(203): Ceres Seq. ID no. 12350457
  misc_feature (59)..(143): Pfam Name: Chlorophyll A-B binding protein Pfam Description: Chlorophyll A-B binding protein
  misc_feature (1)..(143): Homolog of NCBI NO: 480616 NR Description: chlorophyll a/b binding protein - prince's >gi|398599|emb|CAA52750.1| chlorophyll a/b binding protein
  misc_feature (1)..(143): Homolog of NCBI NO: 29123378 NR Description: chlorophyll a/b binding protein [Nicotiana
  misc_feature (1)..(143): Homolog of NCBI NO: 115802 NR Description: Chlorophyll A-B binding protein 36, chloroplast
  misc_feature (3)..(143): Homolog of NCBI NO: 99492 NR Description: chlorophyll a/b-binding protein (cab-6) precursor
  misc_feature (1)..(143): Homolog of NCBI NO: 115770 NR Description: Chlorophyll A-B binding protein of LHCII type I,
  misc_feature (1)..(143): Homolog of NCBI NO: 3126854 NR Description: chlorophyll a/b binding protein [Oryza sativa]
  misc_feature (3)..(143): Homolog of NCBI NO: 115775 NR Description: Chlorophyll A-B binding protein type I,
  misc_feature (1)..(143): Homolog of NCBI NO: 115796 NR Description: Chlorophyll A-B binding protein, chloroplast
  misc_feature (1)..(143): Homolog of NCBI NO: 320617 NR Description: chlorophyll a/b-binding protein II precursor -
  misc_feature (1)..(143): Homolog of NCBI NO: 1345698 NR Description: Chlorophyll A-B binding protein 151, chloroplast
MAASALQQTISFLGQALVSRPAGVDAGGRITMRRTVKSAPQSIWYGPDRPKYLGPFSEQMPSYLTGEFPGDYGWDTAGLSADPKTFARNRELEVIHSRWAMLGALGCVFPEVLAKNGVKFGEAVWFKAGADLLGGRAGLPGEPEPGARAEHPGPSGRARWCSWASSRALAAARSRKGSTRCTPTAPSTRWASSTTRTPPPSSR

SEQ ID NO: 12606 - protein, 172 aa, Zea mays subsp. mays
  peptide (1)..(172): Ceres Seq. ID no. 12350458
  misc_feature (28)..(112): Pfam Name: Chlorophyll A-B binding protein Pfam Description: Chlorophyll A-B binding protein
  misc_feature (1)..(112): Homolog of NCBI NO: 480616 NR Description: chlorophyll a/b binding protein - prince's >gi|398599|emb|CAA52750.1| chlorophyll a/b binding protein
  misc_feature (1)..(112): Homolog of NCBI NO: 29123378 NR Description: chlorophyll a/b binding protein [Nicotiana
  misc_feature (1)..(112): Homolog of NCBI NO: 115802 NR Description: Chlorophyll A-B binding protein 36, chloroplast
  misc_feature (1)..(112): Homolog of NCBI NO: 99492 NR Description: chlorophyll a/b-binding protein (cab-6) precursor
  misc_feature (1)..(112): Homolog of NCBI NO: 115770 NR Description: Chlorophyll A-B binding protein of LHCII type I,
  misc_feature (1)..(112): Homolog of NCBI NO: 3126854 NR Description: chlorophyll a/b binding protein [Oryza sativa]
  misc_feature (1)..(112): Homolog of NCBI NO: 115775 NR Description: Chlorophyll A-B binding protein type I,
  misc_feature (1)..(112): Homolog of NCBI NO: 115796 NR Description: Chlorophyll A-B binding protein, chloroplast
  misc_feature (1)..(112): Homolog of NCBI NO: 320617 NR Description: chlorophyll a/b-binding protein II precursor -
  misc_feature (1)..(112): Homolog of NCBI NO: 1345698 NR Description: Chlorophyll A-B binding protein 151, chloroplast
MRRTVKSAPQSIWYGPDRPKYLGPFSEQMPSYLTGEFPGDYGWDTAGLSADPKTFARNRELEVIHSRWAMLGALGCVFPEVLAKNGVKFGEAVWFKAGADLLGGRAGLPGEPEPGARAEHPGPSGRARWCSWASSRALAAARSRKGSTRCTPTAPSTRWASSTTRTPPPSSR

SEQ ID NO: 12607 - protein, 144 aa, Zea mays subsp. mays
  peptide (1)..(144): Ceres Seq. ID no. 12350459
  misc_feature (1)..(84): Pfam Name: Chlorophyll A-B binding protein Pfam Description: Chlorophyll A-B binding protein
  misc_feature (1)..(84): Homolog of NCBI NO: 480616 NR Description: chlorophyll a/b binding protein - prince's >gi|398599|emb|CAA52750.1| chlorophyll a/b binding protein
  misc_feature (1)..(84): Homolog of NCBI NO: 29123378 NR Description: chlorophyll a/b binding protein [Nicotiana
  misc_feature (1)..(84): Homolog of NCBI NO: 115802 NR Description: Chlorophyll A-B binding protein 36, chloroplast
  misc_feature (1)..(84): Homolog of NCBI NO: 99492 NR Description: chlorophyll a/b-binding protein (cab-6) precursor
  misc_feature (1)..(84): Homolog of NCBI NO: 115770 NR Description: Chlorophyll A-B binding protein of LHCII type I,
  misc_feature (1)..(84): Homolog of NCBI NO: 3126854 NR Description: chlorophyll a/b binding protein [Oryza sativa]
  misc_feature (1)..(84): Homolog of NCBI NO: 115775 NR Description: Chlorophyll A-B binding protein type I,
  misc_feature (1)..(84): Homolog of NCBI NO: 115796 NR Description: Chlorophyll A-B binding protein, chloroplast
  misc_feature (1)..(84): Homolog of NCBI NO: 320617 NR Description: chlorophyll a/b-binding protein II precursor -
  misc_feature (1)..(84): Homolog of NCBI NO: 1345698 NR Description: Chlorophyll A-B binding protein 151, chloroplast
MPSYLTGEFPGDYGWDTAGLSADPKTFARNRELEVIHSRWAMLGALGCVFPEVLAKNGVKFGEAVWFKAGADLLGGRAGLPGEPEPGARAEHPGPSGRARWCSWASSRALAAARSRKGSTRCTPTAPSTRWASSTTRTPPPSSR

SEQ ID NO: 12608 - DNA, 1317 bp, Zea mays subsp. mays
  misc_feature (1)..(1317): Ceres Seq. ID no. 12350464
  misc_feature: MA Experiment ID: 20000478 Result: Down-regulated in Transcription
  misc_feature: MA Experiment 20000478 PARAMETER Experiment Name: Zm_5mM_SA_P Parameter: Age (day) Value: 11
  misc_feature: MA Experiment 20000478 PARAMETER Experiment Name: Zm_5mM_SA_P Parameter: Organism Value: Zea mays
  misc_feature: MA Experiment 20000478 PARAMETER Experiment Name: Zm_5mM_SA_P Parameter: Plant Line Value: 35A19
  misc_feature: MA Experiment 20000478 PARAMETER Experiment Name: Zm_5mM_SA_P Parameter: Timepoint (hr) Value: 72
  misc_feature: MA Experiment 20000478 PARAMETER Experiment Name: Zm_5mM_SA_P Parameter: Tissue Value: Aerial
  misc_feature: MA Experiment 20000478 PARAMETER Experiment Name: Zm_5mM_SA_P Parameter: Treatment Value: 5mM SA vs. No Treatment
  misc_feature: MA Experiment ID: 20000480 Result: Down-regulated in Transcription
  misc_feature: MA Experiment 20000480 PARAMETER Experiment Name: Zm_Drought_P Parameter: Age (day) Value: 11
  misc_feature: MA Experiment 20000480 PARAMETER Experiment Name: Zm_Drought_P Parameter: Organism Value: Zea mays
  misc_feature: MA Experiment 20000480 PARAMETER Experiment Name: Zm_Drought_P Parameter: Plant Line Value: 35A19
  misc_feature: MA Experiment 20000480 PARAMETER Experiment Name: Zm_Drought_P Parameter: Timepoint (hr) Value: 72
  misc_feature: MA Experiment 20000480 PARAMETER Experiment Name: Zm_Drought_P Parameter: Tissue Value: Aerial
  misc_feature: MA Experiment 20000480 PARAMETER Experiment Name: Zm_Drought_P Parameter: Treatment Value: Drought vs. No Drought
atctgcttactgtgatcaccaaagttgtgctgatacgatgtgcgattattgctctttcttctctagaatgttcctgccgatgctttataagagaaggttggtcagcatcgatctctgccagtgtctagctgagaacatggtgacctcaagcaagggcaaggtatgcgtaaccggggcctcaggctttgttgcctcttggcttatcaaacggctcctcgagtctggatatcatgtggtagggactgtcagggacccaggaaatcaccaaaagacagcccacctttggaaattacctggcgctaaagagaggctgcaaatcgtgcgagctgatctgttggaagaagggagcttcgacagcgccgtgatggcctgtgagggtgtattccacactgcatcccccgtcctcgctaaacccgactctactagcaaggaggacacgctcgtccctgcggtgaacggtactctgaacgtgctgagatcgtgcaagaagaacccgttcctgaaaagggtcgtccttacgtcttcgtcgtctgcggtgaggatcagggacgacggtggccagtccagtaacatctcgctggacgaaacgacatggagctccgtgccactctgcgagaagatgcatctatggtatgccctagccaaggtatttgcagagaaagcggcgtgggagttcgccaaggagaacggcatcgaccttgtgactgtcctcccgtcgttcgtgatcgggcccagtttgtcccacgaactatgcgttaccgcttcagacgtcctaggcctattccaaggcgacacggcaaggttcagctcgtacggaagaatggggtacgtccacatcgacgacgttgcgagcagccacatcctggtgtacgaggccccccaggccgccgggaggtacctgtgcagctcagtggtgctggacaacgacgagctggtctcctcgctcgcgaaacgctacccgatattccccataccccggaggctgaacagcccctacggcaagcagtcgtaccagctgaacacgtcgaagctgcaggggctgggcttcaagttcagaggggtgcaggagatgttcgacgactgcgtacagtcgctcaaagaccagggacacctgctggagtgccccctgtgaactgcgatggggtgcctccgcctgtgaacgcgccggttgggttgcgtcccgaacccgctgttaattcgtttttttttcttcaataattccacgtcatgtcacggtgtcctcgcgcagactgctactgtcagggcgtcatagctcacgggctctccggctacatgaataaaaatgtcacgctcgcc

SEQ ID NO: 12609 - protein, 376 aa, Zea mays subsp. mays
  peptide (1)..(376): Ceres Seq. ID no. 12350465
  misc_feature (67)..(347): Pfam Name: NAD dependent epimerase/dehydratase family Pfam Description: NAD dependent epimerase/dehydratase family
  misc_feature (46)..(376): Homolog of NCBI NO: 14030554 NR Description: dihydro-flavanoid reductase-like protein [Zea
  misc_feature (46)..(376): Homolog of NCBI NO: 32352170 NR Description: dihydroflavonol reductase [Oryza sativa (japonica
  misc_feature (46)..(376): Homolog of NCBI NO: 4581047 NR Description: putative dihydroflavonol reductase [Oryza sativa]
  misc_feature (46)..(372): Homolog of NCBI NO: 34905082 NR Description: putative dihydroflavonol 4-reductase [Oryza
  misc_feature (50)..(371): Homolog of NCBI NO: 30690351 NR Description: dihydroflavonol 4-reductase (dihydrokaempferol
  misc_feature (50)..(179): Homolog of NCBI NO: 7486020 NR Description: hypothetical protein F23E12.20 - Arabidopsis >gi|3080408|emb|CAA18727.1| putative protein [Arabidopsis >gi|7270494|emb|CAB80259.1| putative protein [Arabidopsis
  misc_feature (209)..(330): Homolog of NCBI NO: 7486020 NR Description: hypothetical protein F23E12.20 - Arabidopsis >gi|3080408|emb|CAA18727.1| putative protein [Arabidopsis >gi|7270494|emb|CAB80259.1| putative protein [Arabidopsis
  misc_feature (46)..(369): Homolog of NCBI NO: 15239741 NR Description: cinnamyl-alcohol dehydrogenase - like protein;
  misc_feature (46)..(369): Homolog of NCBI NO: 21594240 NR Description: cinnamyl-alcohol dehydrogenase-like protein
  misc_feature (47)..(369): Homolog of NCBI NO: 7488627 NR Description: probable cinnamyl-alcohol dehydrogenase (EC - apple tree >gi|2981475|gb|AAC06319.1| putative cinnamyl alcohol
SAYCDHQSCADTMCDYCSFFSRMFLPMLYKRRLVSIDLCQCLAENMVTSSKGKVCVTGASGFVASWLIKRLLESGYHVVGTVRDPGNHQKTAHLWKLPGAKERLQIVRADLLEEGSFDSAVMACEGVFHTASPVLAKPDSTSKEDTLVPAVNGTLNVLRSCKKNPFLKRVVLTSSSSAVRIRDDGGQSSNISLDETTWSSVPLCEKMHLWYALAKVFAEKAAWEFAKENGIDLVTVLPSFVIGPSLSHELCVTASDVLGLFQGDTARFSSYGRMGYVHIDDVASSHILVYEAPQAAGRYLCSSVVLDNDELVSSLAKRYPIFPIPRRLNSPYGKQSYQLNTSKLQGLGFKFRGVQEMFDDCVQSLKDQGHLLECPL

SEQ ID NO: 12610 - protein, 364 aa, Zea mays subsp. mays
  peptide (1)..(364): Ceres Seq. ID no. 12350466
  misc_feature (55)..(335): Pfam Name: NAD dependent epimerase/dehydratase family Pfam Description: NAD dependent epimerase/dehydratase family
  misc_feature (34)..(364): Homolog of NCBI NO: 14030554 NR Description: dihydro-flavanoid reductase-like protein [Zea
  misc_feature (34)..(364): Homolog of NCBI NO: 32352170 NR Description: dihydroflavonol reductase [Oryza sativa (japonica
  misc_feature (34)..(364): Homolog of NCBI NO: 4581047 NR Description: putative dihydroflavonol reductase [Oryza sativa]
  misc_feature (34)..(360): Homolog of NCBI NO: 34905082 NR Description: putative dihydroflavonol 4-reductase [Oryza
  misc_feature (38)..(359): Homolog of NCBI NO: 30690351 NR Description: dihydroflavonol 4-reductase (dihydrokaempferol
  misc_feature (38)..(167): Homolog of NCBI NO: 7486020 NR Description: hypothetical protein F23E12.20 - Arabidopsis >gi|3080408|emb|CAA18727.1| putative protein [Arabidopsis >gi|7270494|emb|CAB80259.1| putative protein [Arabidopsis
  misc_feature (197)..(318): Homolog of NCBI NO: 7486020 NR Description: hypothetical protein F23E12.20 - Arabidopsis >gi|3080408|emb|CAA18727.1| putative protein [Arabidopsis >gi|7270494|emb|CAB80259.1| putative protein [Arabidopsis
  misc_feature (34)..(357): Homolog of NCBI NO: 15239741 NR Description: cinnamyl-alcohol dehydrogenase - like protein;
  misc_feature (34)..(357): Homolog of NCBI NO: 21594240 NR Description: cinnamyl-alcohol dehydrogenase-like protein
  misc_feature (35)..(357): Homolog of NCBI NO: 7488627 NR Description: probable cinnamyl-alcohol dehydrogenase (EC - apple tree >gi|2981475|gb|AAC06319.1| putative cinnamyl alcohol
MCDYCSFFSRMFLPMLYKRRLVSIDLCQCLAENMVTSSKGKVCVTGASGFVASWLIKRLLESGYHVVGTVRDPGNHQKTAHLWKLPGAKERLQIVRADLLEEGSFDSAVMACEGVFHTASPVLAKPDSTSKEDTLVPAVNGTLNVLRSCKKNPFLKRVVLTSSSSAVRIRDDGGQSSNISLDETTWSSVPLCEKMHLWYALAKVFAEKAAWEFAKENGIDLVTVLPSFVIGPSLSHELCVTASDVLGLFQGDTARFSSYGRMGYVHIDDVASSHILVYEAPQAAGRYLCSSVVLDNDELVSSLAKRYPIFPIPRRLNSPYGKQSYQLNTSKLQGLGFKFRGVQEMFDDCVQSLKDQGHLLECPL

SEQ ID NO: 12611 - protein, 354 aa, Zea mays subsp. mays
  peptide (1)..(354): Ceres Seq. ID no. 12350467
  misc_feature (45)..(325): Pfam Name: NAD dependent epimerase/dehydratase family Pfam Description: NAD dependent epimerase/dehydratase family
  misc_feature (24)..(354): Homolog of NCBI NO: 14030554 NR Description: dihydro-flavanoid reductase-like protein [Zea
  misc_feature (24)..(354): Homolog of NCBI NO: 32352170 NR Description: dihydroflavonol reductase [Oryza sativa (japonica
  misc_feature (24)..(354): Homolog of NCBI NO: 4581047 NR Description: putative dihydroflavonol reductase [Oryza sativa]
  misc_feature (24)..(350): Homolog of NCBI NO: 34905082 NR Description: putative dihydroflavonol 4-reductase [Oryza
  misc_feature (28)..(349): Homolog of NCBI NO: 30690351 NR Description: dihydroflavonol 4-reductase (dihydrokaempferol
  misc_feature (28)..(157): Homolog of NCBI NO: 7486020 NR Description: hypothetical protein F23E12.20 - Arabidopsis >gi|3080408|emb|CAA18727.1| putative protein [Arabidopsis >gi|7270494|emb|CAB80259.1| putative protein [Arabidopsis
  misc_feature (187)..(308): Homolog of NCBI NO: 7486020 NR Description: hypothetical protein F23E12.20 - Arabidopsis >gi|3080408|emb|CAA18727.1| putative protein [Arabidopsis >gi|7270494|emb|CAB80259.1| putative protein [Arabidopsis
  misc_feature (24)..(347): Homolog of NCBI NO: 15239741 NR Description: cinnamyl-alcohol dehydrogenase - like protein;
  misc_feature (24)..(347): Homolog of NCBI NO: 21594240 NR Description: cinnamyl-alcohol dehydrogenase-like protein
  misc_feature (25)..(347): Homolog of NCBI NO: 7488627 NR Description: probable cinnamyl-alcohol dehydrogenase (EC - apple tree >gi|2981475|gb|AAC06319.1| putative cinnamyl alcohol
MFLPMLYKRRLVSIDLCQCLAENMVTSSKGKVCVTGASGFVASWLIKRLLESGYHVVGTVRDPGNHQKTAHLWKLPGAKERLQIVRADLLEEGSFDSAVMACEGVFHTASPVLAKPDSTSKEDTLVPAVNGTLNVLRSCKKNPFLKRVVLTSSSSAVRIRDDGGQSSNISLDETTWSSVPLCEKMHLWYALAKVFAEKAAWEFAKENGIDLVTVLPSFVIGPSLSHELCVTASDVLGLFQGDTARFSSYGRMGYVHIDDVASSHILVYEAPQAAGRYLCSSVVLDNDELVSSLAKRYPIFPIPRRLNSPYGKQSYQLNTSKLQGLGFKFRGVQEMFDDCVQSLKDQGHLLECPL

SEQ ID NO: 12612 - DNA, 931 bp, Zea mays subsp. mays
  misc_feature (1)..(931): Ceres Seq. ID no. 12462439
  misc_feature: MA Experiment ID: 108530 Result: Down-regulated in Transcription
  misc_feature: MA Experiment 108530 PARAMETER Experiment Name: Zm_Imbibed_Seeds_P Parameter: Age (day) Value: 6 vs. 2
  misc_feature: MA Experiment 108530 PARAMETER Experiment Name: Zm_Imbibed_Seeds_P Parameter: Organism Value: Zea mays
  misc_feature: MA Experiment 108530 PARAMETER Experiment Name: Zm_Imbibed_Seeds_P Parameter: Plant Line Value: 35A19
  misc_feature: MA Experiment 108530 PARAMETER Experiment Name: Zm_Imbibed_Seeds_P Parameter: Tissue Value: Aerial vs. Embryo
  misc_feature: MA Experiment ID: 108535 Result: Up-regulated in Transcription
  misc_feature: MA Experiment 108535 PARAMETER Experiment Name: Zm_Meristem_P Parameter: Age (day) Value: 8
  misc_feature: MA Experiment 108535 PARAMETER Experiment Name: Zm_Meristem_P Parameter: Organism Value: Zea mays
  misc_feature: MA Experiment 108535 PARAMETER Experiment Name: Zm_Meristem_P Parameter: Plant Line Value: 35A19
  misc_feature: MA Experiment 108535 PARAMETER Experiment Name: Zm_Meristem_P Parameter: Tissue Value: Root Meristem vs. Above Root Meristem
  misc_feature: MA Experiment ID: 20000534 Result: Down-regulated in Transcription
  misc_feature: MA Experiment 20000534 PARAMETER Experiment Name: Zm_Hybrid_Pollen_P Parameter: Age (day) Value: 8
  misc_feature: MA Experiment 20000534 PARAMETER Experiment Name: Zm_Hybrid_Pollen_P Parameter: Organism Value: Zea mays
  misc_feature: MA Experiment 20000534 PARAMETER Experiment Name: Zm_Hybrid_Pollen_P Parameter: Plant Line Value: 35A19
  misc_feature: MA Experiment 20000534 PARAMETER Experiment Name: Zm_Hybrid_Pollen_P Parameter: Tissue Value: Pollen vs. Aerial
  misc_feature: MA Experiment ID: 20001606 Result: Up-regulated in Transcription
  misc_feature: MA Experiment 20001606 PARAMETER Experiment Name: Zm_50ppm_KNO3_L-to-H_P Parameter: Age (day) Value: 19
  misc_feature: MA Experiment 20001606 PARAMETER Experiment Name: Zm_50ppm_KNO3_L-to-H_P Parameter: Organism Value: Zea mays
  misc_feature: MA Experiment 20001606 PARAMETER Experiment Name: Zm_50ppm_KNO3_L-to-H_P Parameter: Plant Line Value: 35A19
  misc_feature: MA Experiment 20001606 PARAMETER Experiment Name: Zm_50ppm_KNO3_L-to-H_P Parameter: Timepoint (hr) Value: 8
  misc_feature: MA Experiment 20001606 PARAMETER Experiment Name: Zm_50ppm_KNO3_L-to-H_P Parameter: Tissue Value: Shoots
  misc_feature: MA Experiment 20001606 PARAMETER Experiment Name: Zm_50ppm_KNO3_L-to-H_P Parameter: Treatment Value: 50ppm KNO3 vs. 50ppm KCl
aattgacatcaccgagacctatcgccgcagaaccaccgaatccacggcatcggagagtgtagaggttagtactaggcggaggtcaagatggtgtgcatccggcaggcgactatcgacgacctgctggcgatgcaggcgtgcaacttgatgtgcctgccggagaactaccagatgaagtactacctctaccacatgctgtcttggccgcagctcctcttcgtcgccgaggactacggcggccgcatcgtcggctacgtgctcgccaagatggaggaggacccctccgagccctgccacggccacatcacctccctcgcggtgctccgctcccaccgcaagctcgggctcgccaccaagctcatgtccgccgcgcaggcagccatggaccaggtcttcggcgccgagtacgtctccctccacgtccgccgatccaaccgcgccgccttcaacctctacacctccactctcgggtaccagatccacgacatcgaggccaagtactacgccgatggagaggacgcgttcgacatgcgcaagcctctccggcagccgcaacctaagaagcaccaccatcaccaccaccacggccccggtgggtgctgctcccacgacgcacctacggcgacgactggttcttctcctcagtcttttagttcgccggataagaaggctaacacttgacggatgaagcatatctacagagaggagtcaccaagcccattggacttccgatacgcagctttttctaatagaatgggaaacgaattgtactgtaattgtttgtgtactttactttggctcaatcgtccgaccgtatctttgtaatcagttagaatggcaagcaaatgtccttgacatcttttgttattgtaaaaacatgtgttataacgctgattctcagattacatttgattattcgagctgacaattt

SEQ ID NO: 12613 - protein, 197 aa, Zea mays subsp. mays
  peptide (1)..(197): Ceres Seq. ID no. 12462440
  misc_feature (45)..(130): Pfam Name: Acetyltransferase (GNAT) family Pfam Description: Acetyltransferase (GNAT) family
  misc_feature (1)..(197): Homolog of NCBI NO: 14550116 NR Description: silencing group B protein [Zea mays]
  misc_feature (1)..(193): Homolog of NCBI NO: 38344807 NR Description: OSJNBa0043L09.27 [Oryza sativa (japonica
  misc_feature (1)..(184): Homolog of NCBI NO: 15240705 NR Description: putative protein; protein id: At5g13780.1, by cDNA: 30545., supported by cDNA: gi_15450947, supported by
  misc_feature (4)..(160): Homolog of NCBI NO: 28422354 NR Description: Similar to N-acetyltransferase ARD1 homolog (S.
  misc_feature (4)..(172): Homolog of NCBI NO: 20071196 NR Description: Similar to N-acetyltransferase ARD1 homolog (S. [Mus musculus] >gi|26365817|dbj|BAC25266.1| unnamed protein
  misc_feature (4)..(162): Homolog of NCBI NO: 9845236 NR Description: N-acetyltransferase similar to S. cerevisiae ARD1
  misc_feature (4)..(162): Homolog of NCBI NO: 10835057 NR Description: N-acetyltransferase, homolog of S. cerevisiae
  misc_feature (4)..(154): Homolog of NCBI NO: 30519923 NR Description: DNA segment, Chr 18, Wayne State University 98, [Mus musculus] >gi|12846157|dbj|BAB27052.1| unnamed protein [Mus musculus] >gi|12848020|dbj|BAB27798.1| unnamed protein
  misc_feature (4)..(162): Homolog of NCBI NO: 34881754 NR Description: similar to ARD-1 N-acetyltransferase homologue
  misc_feature (4)..(154): Homolog of NCBI NO: 27693156 NR Description: similar to hypothetical protein MGC10646 [Homo
MVCIRQATIDDLLAMQACNLMCLPENYQMKYYLYHMLSWPQLLFVAEDYGGRIVGYVLAKMEEDPSEPCHGHITSLAVLRSHRKLGLATKLMSAAQAAMDQVFGAEYVSLHVRRSNRAAFNLYTSTLGYQIHDIEAKYYADGEDAFDMRKPLRQPQPKKHHHHHHHGPGGCCSHDAPTATTGSSPQSFSSPDKKANT

SEQ ID NO: 12614 - protein, 183 aa, Zea mays subsp. mays
  peptide (1)..(183): Ceres Seq. ID no. 12462441
  misc_feature (31)..(116): Pfam Name: Acetyltransferase (GNAT) family Pfam Description: Acetyltransferase (GNAT) family
  misc_feature (1)..(140): Homolog of NCBI NO: 27693156 NR Description: similar to hypothetical protein MGC10646 [Homo
  misc_feature (1)..(183): Homolog of NCBI NO: 14550116 NR Description: silencing group B protein [Zea mays]
  misc_feature (1)..(179): Homolog of NCBI NO: 38344807 NR Description: OSJNBa0043L09.27 [Oryza sativa (japonica
  misc_feature (1)..(170): Homolog of NCBI NO: 15240705 NR Description: putative protein; protein id: At5g13780.1, by cDNA: 30545., supported by cDNA: gi_15450947, supported by
  misc_feature (1)..(146): Homolog of NCBI NO: 28422354 NR Description: Similar to N-acetyltransferase ARD1 homolog (S.
  misc_feature (1)..(158): Homolog of NCBI NO: 20071196 NR Description: Similar to N-acetyltransferase ARD1 homolog (S. [Mus musculus] >gi|26365817|dbj|BAC25266.1| unnamed protein
  misc_feature (1)..(148): Homolog of NCBI NO: 9845236 NR Description: N-acetyltransferase similar to S. cerevisiae ARD1
  misc_feature (1)..(148): Homolog of NCBI NO: 10835057 NR Description: N-acetyltransferase, homolog of S. cerevisiae
  misc_feature (1)..(140): Homolog of NCBI NO: 30519923 NR Description: DNA segment, Chr 18, Wayne State University 98, [Mus musculus] >gi|12846157|dbj|BAB27052.1| unnamed protein [Mus musculus] >gi|12848020|dbj|BAB27798.1| unnamed protein
  misc_feature (1)..(148): Homolog of NCBI NO: 34881754 NR Description: similar to ARD-1 N-acetyltransferase homologue
MQACNLMCLPENYQMKYYLYHMLSWPQLLFVAEDYGGRIVGYVLAKMEEDPSEPCHGHITSLAVLRSHRKLGLATKLMSAAQAAMDQVFGAEYVSLHVRRSNRAAFNLYTSTLGYQIHDIEAKYYADGEDAFDMRKPLRQPQPKKHHHHHHHGPGGCCSHDAPTATTGSSPQSFSSPDKKANT

SEQ ID NO: 12615 - protein, 177 aa, Zea mays subsp. mays
  peptide (1)..(177): Ceres Seq. ID no. 12462442
  misc_feature (25)..(110): Pfam Name: Acetyltransferase (GNAT) family Pfam Description: Acetyltransferase (GNAT) family
  misc_feature (1)..(177): Homolog of NCBI NO: 14550116 NR Description: silencing group B protein [Zea mays]
  misc_feature (1)..(173): Homolog of NCBI NO: 38344807 NR Description: OSJNBa0043L09.27 [Oryza sativa (japonica
  misc_feature (1)..(164): Homolog of NCBI NO: 15240705 NR Description: putative protein; protein id: At5g13780.1, by cDNA: 30545., supported by cDNA: gi_15450947, supported by
  misc_feature (1)..(140): Homolog of NCBI NO: 28422354 NR Description: Similar to N-acetyltransferase ARD1 homolog (S.
  misc_feature (1)..(152): Homolog of NCBI NO: 20071196 NR Description: Similar to N-acetyltransferase ARD1 homolog (S. [Mus musculus] >gi|26365817|dbj|BAC25266.1| unnamed protein
  misc_feature (1)..(142): Homolog of NCBI NO: 9845236 NR Description: N-acetyltransferase similar to S. cerevisiae ARD1
  misc_feature (1)..(142): Homolog of NCBI NO: 10835057 NR Description: N-acetyltransferase, homolog of S. cerevisiae
  misc_feature (1)..(134): Homolog of NCBI NO: 30519923 NR Description: DNA segment, Chr 18, Wayne State University 98, [Mus musculus] >gi|12846157|dbj|BAB27052.1| unnamed protein [Mus musculus] >gi|12848020|dbj|BAB27798.1| unnamed protein
  misc_feature (1)..(142): Homolog of NCBI NO: 34881754 NR Description: similar to ARD-1 N-acetyltransferase homologue
  misc_feature (1)..(134): Homolog of NCBI NO: 27693156 NR Description: similar to hypothetical protein MGC10646 [Homo
MCLPENYQMKYYLYHMLSWPQLLFVAEDYGGRIVGYVLAKMEEDPSEPCHGHITSLAVLRSHRKLGLATKLMSAAQAAMDQVFGAEYVSLHVRRSNRAAFNLYTSTLGYQIHDIEAKYYADGEDAFDMRKPLRQPQPKKHHHHHHHGPGGCCSHDAPTATTGSSPQSFSSPDKKANT

SEQ ID NO: 12616 - DNA, 866 bp, Zea mays subsp. mays
  misc_feature (1)..(866): Ceres Seq. ID no. 12408126
  misc_feature: MA Experiment ID: 108527 Result: Up-regulated in Transcription
  misc_feature: MA Experiment 108527 PARAMETER Experiment Name: Zm_5mM_NO_P Parameter: Age (day) Value: 8
  misc_feature: MA Experiment 108527 PARAMETER Experiment Name: Zm_5mM_NO_P Parameter: Organism Value: Zea mays
  misc_feature: MA Experiment 108527 PARAMETER Experiment Name: Zm_5mM_NO_P Parameter: Plant Line Value: 35A19
  misc_feature: MA Experiment 108527 PARAMETER Experiment Name: Zm_5mM_NO_P Parameter: Timepoint (hr) Value: 6
  misc_feature: MA Experiment 108527 PARAMETER Experiment Name: Zm_5mM_NO_P Parameter: Tissue Value: Aerial
  misc_feature: MA Experiment 108527 PARAMETER Experiment Name: Zm_5mM_NO_P Parameter: Treatment Value: 5mM NO vs. No Treatment
  misc_feature: MA Experiment ID: 108530 Result: Up-regulated in Transcription
  misc_feature: MA Experiment 108530 PARAMETER Experiment Name: Zm_Imbibed_Seeds_P Parameter: Age (day) Value: 6 vs. 2
  misc_feature: MA Experiment 108530 PARAMETER Experiment Name: Zm_Imbibed_Seeds_P Parameter: Organism Value: Zea mays
  misc_feature: MA Experiment 108530 PARAMETER Experiment Name: Zm_Imbibed_Seeds_P Parameter: Plant Line Value: 35A19
  misc_feature: MA Experiment 108530 PARAMETER Experiment Name: Zm_Imbibed_Seeds_P Parameter: Tissue Value: Aerial vs. Embryo
  misc_feature: MA Experiment ID: 108544 Result: Up-regulated in Transcription
  misc_feature: MA Experiment ID: 108556 Result: Up-regulated in Transcription
  misc_feature: MA Experiment 108556 PARAMETER Experiment Name: Zm_Drought_P Parameter: Age (day) Value: 9
  misc_feature: MA Experiment 108556 PARAMETER Experiment Name: Zm_Drought_P Parameter: Organism Value: Zea mays
  misc_feature: MA Experiment 108556 PARAMETER Experiment Name: Zm_Drought_P Parameter: Plant Line Value: 35A19
  misc_feature: MA Experiment 108556 PARAMETER Experiment Name: Zm_Drought_P Parameter: Timepoint (hr) Value: 24
  misc_feature: MA Experiment 108556 PARAMETER Experiment Name: Zm_Drought_P Parameter: Tissue Value: Aerial
  misc_feature: MA Experiment 108556 PARAMETER Experiment Name: Zm_Drought_P Parameter: Treatment Value: Drought vs. No Drought
  misc_feature: MA Experiment ID: 20000477 Result: Up-regulated in Transcription
  misc_feature: MA Experiment 20000477 PARAMETER Experiment Name: Zm_5mM_SA_P Parameter: Age (day) Value: 10
  misc_feature: MA Experiment 20000477 PARAMETER Experiment Name: Zm_5mM_SA_P Parameter: Organism Value: Zea mays
  misc_feature: MA Experiment 20000477 PARAMETER Experiment Name: Zm_5mM_SA_P Parameter: Plant Line Value: 35A19
  misc_feature: MA Experiment 20000477 PARAMETER Experiment Name: Zm_5mM_SA_P Parameter: Timepoint (hr) Value: 48
  misc_feature: MA Experiment 20000477 PARAMETER Experiment Name: Zm_5mM_SA_P Parameter: Tissue Value: Aerial
  misc_feature: MA Experiment 20000477 PARAMETER Experiment Name: Zm_5mM_SA_P Parameter: Treatment Value: 5mM SA vs. No Treatment
  misc_feature: MA Experiment ID: 20000478 Result: Up-regulated in Transcription
  misc_feature: MA Experiment 20000478 PARAMETER Experiment Name: Zm_5mM_SA_P Parameter: Age (day) Value: 11
  misc_feature: MA Experiment 20000478 PARAMETER Experiment Name: Zm_5mM_SA_P Parameter: Organism Value: Zea mays
  misc_feature: MA Experiment 20000478 PARAMETER Experiment Name: Zm_5mM_SA_P Parameter: Plant Line Value: 35A19
  misc_feature: MA Experiment 20000478 PARAMETER Experiment Name: Zm_5mM_SA_P Parameter: Timepoint (hr) Value: 72
  misc_feature: MA Experiment 20000478 PARAMETER Experiment Name: Zm_5mM_SA_P Parameter: Tissue Value: Aerial
  misc_feature: MA Experiment 20000478 PARAMETER Experiment Name: Zm_5mM_SA_P Parameter: Treatment Value: 5mM SA vs. No Treatment
  misc_feature: MA Experiment ID: 20000479 Result: Up-regulated in Transcription
  misc_feature: MA Experiment 20000479 PARAMETER Experiment Name: Zm_Drought_P Parameter: Age (day) Value: 10
  misc_feature: MA Experiment 20000479 PARAMETER Experiment Name: Zm_Drought_P Parameter: Organism Value: Zea mays
  misc_feature: MA Experiment 20000479 PARAMETER Experiment Name: Zm_Drought_P Parameter: Plant Line Value: 35A19
  misc_feature: MA Experiment 20000479 PARAMETER Experiment Name: Zm_Drought_P Parameter: Timepoint (hr) Value: 48
  misc_feature: MA Experiment 20000479 PARAMETER Experiment Name: Zm_Drought_P Parameter: Tissue Value: Aerial
  misc_feature: MA Experiment 20000479 PARAMETER Experiment Name: Zm_Drought_P Parameter: Treatment Value: Drought vs. No Drought
  misc_feature: MA Experiment ID: 20000627 Result: Up-regulated in Transcription
  misc_feature: MA Experiment 20000627 PARAMETER Experiment Name: Zm_Herbicide-Treatments_P Parameter: Timepoint (hr) Value: 12
  misc_feature: MA Experiment 20000627 PARAMETER Experiment Name: Zm_Herbicide-Treatments_P Parameter: Tissue Value: Aerial
  misc_feature: MA Experiment 20000627 PARAMETER Experiment Name: Zm_Herbicide-Treatments_P Parameter: Treatment Value: Finale vs. No Treatment
acgattccacccacaccgaatcttgacggaacgattccaccaagaaccgcgggcaacaattcacaccgcgcttctcttgtccagcgatgcagacgacggcggcggcggctgtggcatgggcgcctggcccatcggcgtccacctcgtcatcgtcctcgccgtccaccttcagggtgggggttgcgtcgacggccgtgcgggcttcttccgcgcccagccttgttgcgtcctccgcgcccctgggccgtcgacggctgcggcaagtggttcaagctgttgccaatccagaccctgcgatcgagcttccattgactgctgaaaatgtcgagatggtgttggatgaagtaaggccgtatcttatggcagacggaggcaatgttgcgttgcatgagattgatgggaacgtggtaaggttaaagctgcaaggagcatgtggttcatgcccggcttcagtaacaacgatgaagatgggtattgaacggcgcttgatggagaaaataccagagatcgttgcagttgagcccattgctgatgaggaaactggccttgagttgaaccaagagaacattgaaaaggtacttgacgagattaggccataccttgctggcacaggaggtggcgagctcgagtttgtcacaatcgaggagcctattgtcaaggttaggcttacaggcccagctgctggtgtgatgactgtccgagtagcattgactcagaagctccgtgaaaaaatccctaaaattgcagctgtccagcttttgccataagattagaatcttttagaagccaggcaccagtcacagttgataatgtaaatgaactaccgcaataaatttaaggagttgtaatgtgtagcctgctgagcg

SEQ ID NO: 12617 - protein, 226 aa, Zea mays subsp. mays
  peptide (1)..(226): Ceres Seq. ID no. 12408127
  misc_feature (80)..(147): Pfam Name: NifU-like domain Pfam Description: NifU-like domain
  misc_feature (3)..(225): Homolog of NCBI NO: 18423084 NR Description: Expressed protein; protein id: At5g49940.1, by cDNA: gi_13878180, supported by cDNA: gi_16226433, supported cDNA: gi_17104538 [Arabidopsis thaliana]
  misc_feature (1)..(225): Homolog of NCBI NO: 30698492 NR Description: NifU1 [Oryza sativa (japonica cultivar-group)]
  misc_feature (3)..(212): Homolog of NCBI NO: 8777425 NR Description: gene_id:K9P8.8~pir||T09896~strong similarity to
  misc_feature (73)..(225): Homolog of NCBI NO: 7485833 NR Description: hypothetical protein F20B18.20 - Arabidopsis >gi|4538920|emb|CAB39656.1| nitrogen fixation like protein thaliana] >gi|7269442|emb|CAB79446.1| nitrogen fixation like
  misc_feature (73)..(225): Homolog of NCBI NO: 21554503 NR Description: nitrogen fixation like protein [Arabidopsis
  misc_feature (73)..(225): Homolog of NCBI NO: 18416645 NR Description: nitrogen fixation like protein; protein id: supported by cDNA: 256052. [Arabidopsis thaliana]
  misc_feature (70)..(147): Homolog of NCBI NO: 22298836 NR Description: ORF_ID:tsl1293~similar to NifU protein
  misc_feature (73)..(147): Homolog of NCBI NO: 23126802 NR Description: hypothetical protein [Nostoc punctiforme]
  misc_feature (75)..(214): Homolog of NCBI NO: 18411785 NR Description: putative NifU-like metallocluster assembly protein id: At4g01940.1, supported by cDNA: gi_14517433, by cDNA: gi_15215669, supported by cDNA: gi_20908089 [Arabidopsis
  misc_feature (73)..(147): Homolog of NCBI NO: 17228804 NR Description: NifU like protein [Nostoc sp. PCC 7120]
MQTTAAAAVAWAPGPSASTSSSSSPSTFRVGVASTAVRASSAPSLVASSAPLGRRRLRQVVQAVANPDPAIELPLTAENVEMVLDEVRPYLMADGGNVALHEIDGNVVRLKLQGACGSCPASVTTMKMGIERRLMEKIPEIVAVEPIADEETGLELNQENIEKVLDEIRPYLAGTGGGELEFVTIEEPIVKVRLTGPAAGVMTVRVALTQKLREKIPKIAAVQLLP

SEQ ID NO: 12618 - protein, 145 aa, Zea mays subsp. mays
  peptide (1)..(145): Ceres Seq. ID no. 12408128
  misc_feature (1)..(66): Pfam Name: NifU-like domain Pfam Description: NifU-like domain
  misc_feature (1)..(144): Homolog of NCBI NO: 18423084 NR Description: Expressed protein; protein id: At5g49940.1, by cDNA: gi_13878180, supported by cDNA: gi_16226433, supported cDNA: gi_17104538 [Arabidopsis thaliana]
  misc_feature (1)..(144): Homolog of NCBI NO: 30698492 NR Description: NifU1 [Oryza sativa (japonica cultivar-group)]
  misc_feature (1)..(131): Homolog of NCBI NO: 8777425 NR Description: gene_id:K9P8.8~pir||T09896~strong similarity to
  misc_feature (1)..(144): Homolog of NCBI NO: 7485833 NR Description: hypothetical protein F20B18.20 - Arabidopsis >gi|4538920|emb|CAB39656.1| nitrogen fixation like protein thaliana] >gi|7269442|emb|CAB79446.1| nitrogen fixation like
  misc_feature (1)..(144): Homolog of NCBI NO: 21554503 NR Description: nitrogen fixation like protein [Arabidopsis
  misc_feature (1)..(144): Homolog of NCBI NO: 18416645 NR Description: nitrogen fixation like protein; protein id: supported by cDNA: 256052. [Arabidopsis thaliana]
  misc_feature (1)..(66): Homolog of NCBI NO: 22298836 NR Description: ORF_ID:tsl1293~similar to NifU protein
  misc_feature (1)..(66): Homolog of NCBI NO: 23126802 NR Description: hypothetical protein [Nostoc punctiforme]
  misc_feature (1)..(133): Homolog of NCBI NO: 18411785 NR Description: putative NifU-like metallocluster assembly protein id: At4g01940.1, supported by cDNA: gi_14517433, by cDNA: gi_15215669, supported by cDNA: gi_20908089 [Arabidopsis
  misc_feature (1)..(66): Homolog of NCBI NO: 17228804 NR Description: NifU like protein [Nostoc sp. PCC 7120]
MVLDEVRPYLMADGGNVALHEIDGNVVRLKLQGACGSCPASVTTMKMGIERRLMEKIPEIVAVEPIADEETGLELNQENIEKVLDEIRPYLAGTGGGELEFVTIEEPIVKVRLTGPAAGVMTVRVALTQKLREKIPKIAAVQLLP

SEQ ID NO: 12619 - protein, 135 aa, Zea mays subsp. mays
  peptide (1)..(135): Ceres Seq. ID no. 12408129
  misc_feature (1)..(56): Pfam Name: NifU-like domain Pfam Description: NifU-like domain
  misc_feature (1)..(134): Homolog of NCBI NO: 18423084 NR Description: Expressed protein; protein id: At5g49940.1, by cDNA: gi_13878180, supported by cDNA: gi_16226433, supported cDNA: gi_17104538 [Arabidopsis thaliana]
  misc_feature (1)..(134): Homolog of NCBI NO: 30698492 NR Description: NifU1 [Oryza sativa (japonica cultivar-group)]
  misc_feature (1)..(121): Homolog of NCBI NO: 8777425 NR Description: gene_id:K9P8.8~pir||T09896~strong similarity to
  misc_feature (1)..(134): Homolog of NCBI NO: 7485833 NR Description: hypothetical protein F20B18.20 - Arabidopsis >gi|4538920|emb|CAB39656.1| nitrogen fixation like protein thaliana] >gi|7269442|emb|CAB79446.1| nitrogen fixation like
  misc_feature (1)..(134): Homolog of NCBI NO: 18416645 NR Description: nitrogen fixation like protein; protein id: supported by cDNA: 256052. [Arabidopsis thaliana]
  misc_feature (1)..(134): Homolog of NCBI NO: 21554503 NR Description: nitrogen fixation like protein [Arabidopsis
  misc_feature (1)..(56): Homolog of NCBI NO: 22298836 NR Description: ORF_ID:tsl1293~similar to NifU protein
  misc_feature (1)..(56): Homolog of NCBI NO: 23126802 NR Description: hypothetical protein [Nostoc punctiforme]
  misc_feature (1)..(123): Homolog of NCBI NO: 18411785 NR Description: putative NifU-like metallocluster assembly protein id: At4g01940.1, supported by cDNA: gi_14517433, by cDNA: gi_15215669, supported by cDNA: gi_20908089 [Arabidopsis
  misc_feature (1)..(56): Homolog of NCBI NO: 17228804 NR Description: NifU like protein [Nostoc sp. PCC 7120]
MADGGNVALHEIDGNVVRLKLQGACGSCPASVTTMKMGIERRLMEKIPEIVAVEPIADEETGLELNQENIEKVLDEIRPYLAGTGGGELEFVTIEEPIVKVRLTGPAAGVMTVRVALTQKLREKIPKIAAVQLLP

SEQ ID NO: 12620 - DNA, 1719 bp, Zea mays subsp. mays; identical to SEQ ID NO: 12109
  misc_feature (1)..(1719): Ceres Seq. ID no. 12406579
  misc_feature: MA Experiment ID: 108527 Result: Up-regulated in Transcription
  misc_feature: MA Experiment 108527 PARAMETER Experiment Name: Zm_5mM_NO_P Parameter: Age (day) Value: 8
  misc_feature: MA Experiment 108527 PARAMETER Experiment Name: Zm_5mM_NO_P Parameter: Organism Value: Zea mays
  misc_feature: MA Experiment 108527 PARAMETER Experiment Name: Zm_5mM_NO_P Parameter: Plant Line Value: 35A19
  misc_feature: MA Experiment 108527 PARAMETER Experiment Name: Zm_5mM_NO_P Parameter: Timepoint (hr) Value: 6
  misc_feature: MA Experiment 108527 PARAMETER Experiment Name: Zm_5mM_NO_P Parameter: Tissue Value: Aerial
  misc_feature: MA Experiment 108527 PARAMETER Experiment Name: Zm_5mM_NO_P Parameter: Treatment Value: 5mM NO vs. No Treatment
  misc_feature: MA Experiment ID: 108559 Result: Up-regulated in Transcription
  misc_feature: MA Experiment 108559 PARAMETER Experiment Name: Zm_5mM_NO_P Parameter: Age (day) Value: 8
  misc_feature: MA Experiment 108559 PARAMETER Experiment Name: Zm_5mM_NO_P Parameter: Organism Value: Zea mays
  misc_feature: MA Experiment 108559 PARAMETER Experiment Name: Zm_5mM_NO_P Parameter: Plant Line Value: 35A19
  misc_feature: MA Experiment 108559 PARAMETER Experiment Name: Zm_5mM_NO_P Parameter: Timepoint (hr) Value: 12
  misc_feature: MA Experiment 108559 PARAMETER Experiment Name: Zm_5mM_NO_P Parameter: Tissue Value: Aerial
  misc_feature: MA Experiment 108559 PARAMETER Experiment Name: Zm_5mM_NO_P Parameter: Treatment Value: 5mM NO vs. No Treatment
  misc_feature: MA Experiment ID: 20000632 Result: Down-regulated in Transcription
  misc_feature: MA Experiment 20000632 PARAMETER Experiment Name: Zm_Herbicide-Treatments_P Parameter: Timepoint (hr) Value: 4
  misc_feature: MA Experiment 20000632 PARAMETER Experiment Name: Zm_Herbicide-Treatments_P Parameter: Tissue Value: Aerial
  misc_feature: MA Experiment 20000632 PARAMETER Experiment Name: Zm_Herbicide-Treatments_P Parameter: Treatment Value: Glean vs. No Treatment

SEQ ID NO: 12621 - protein, 474 aa, Zea mays subsp. mays; identical to SEQ ID NO: 12110
  peptide (1)..(474): Ceres Seq. ID no. 12406580
  misc_feature (289)..(413): Pfam Name: DnaJ C terminal region Pfam Description: DnaJ C terminal region
  misc_feature (289)..(413): Pfam Name: DnaJ C terminal region Pfam Description: DnaJ C terminal region
  misc_feature (56)..(474): Homolog of NCBI NO: 7441932 NR Description: DnaJ protein homolog ZMDJ1 - maize
  misc_feature (56)..(474): Homolog of NCBI NO: 29367357 NR Description: DNAJ-like protein [Oryza sativa (japonica
  misc_feature (56)..(474): Homolog of NCBI NO: 7441930 NR Description: dnaJ protein homolog - potato
  misc_feature (56)..(474): Homolog of NCBI NO: 7441932 NR Description: DnaJ protein homolog ZMDJ1 - maize
  misc_feature (56)..(474): Homolog of NCBI NO: 7441930 NR Description: dnaJ protein homolog - potato
  misc_feature (56)..(474): Homolog of NCBI NO: 461944 NR Description: DnaJ protein homolog (DNAJ-1)
  misc_feature (56)..(474): Homolog of NCBI NO: 1169382 NR Description: DnaJ protein homolog 2 >gi|542196|pir||S42031
  misc_feature (56)..(474): Homolog of NCBI NO: 10945669 NR Description: J1P [Daucus carota]
  misc_feature (56)..(474): Homolog of NCBI NO: 4008159 NR Description: DnaJ homolog [Salix gilgiana]
  misc_feature (56)..(474): Homolog of NCBI NO: 29367357 NR Description: DNAJ-like protein [Oryza sativa (japonica
  misc_feature (56)..(474): Homolog of NCBI NO: 4008159 NR Description: DnaJ homolog [Salix gilgiana]
  misc_feature (56)..(474): Homolog of NCBI NO: 461944 NR Description: DnaJ protein homolog (DNAJ-1)
  misc_feature (56)..(474): Homolog of NCBI NO: 10945669 NR Description: J1P [Daucus carota]
  misc_feature (56)..(474): Homolog of NCBI NO: 1169382 NR Description: DnaJ protein homolog 2 >gi|542196|pir||S42031

SEQ ID NO: 12622 - protein, 419 aa, Zea mays subsp. mays; identical to SEQ ID NO: 12111
  peptide (1)..(419): Ceres Seq. ID no. 12406581
  misc_feature (234)..(358): Pfam Name: DnaJ C terminal region Pfam Description: DnaJ C terminal region
  misc_feature (234)..(358): Pfam Name: DnaJ C terminal region Pfam Description: DnaJ C terminal region
  misc_feature (1)..(419): Homolog of NCBI NO: 7441932 NR Description: DnaJ protein homolog ZMDJ1 - maize
  misc_feature (1)..(419): Homolog of NCBI NO: 29367357 NR Description: DNAJ-like protein [Oryza sativa (japonica
  misc_feature (1)..(419): Homolog of NCBI NO: 7441930 NR Description: dnaJ protein homolog - potato
  misc_feature (1)..(419): Homolog of NCBI NO: 7441932 NR Description: DnaJ protein homolog ZMDJ1 - maize
  misc_feature (1)..(419): Homolog of NCBI NO: 7441930 NR Description: dnaJ protein homolog - potato
  misc_feature (1)..(419): Homolog of NCBI NO: 461944 NR Description: DnaJ protein homolog (DNAJ-1)
  misc_feature (1)..(419): Homolog of NCBI NO: 1169382 NR Description: DnaJ protein homolog 2 >gi|542196|pir||S42031
  misc_feature (1)..(419): Homolog of NCBI NO: 10945669 NR Description: J1P [Daucus carota]
  misc_feature (1)..(419): Homolog of NCBI NO: 4008159 NR Description: DnaJ homolog [Salix gilgiana]
  misc_feature (1)..(419): Homolog of NCBI NO: 29367357 NR Description: DNAJ-like protein [Oryza sativa (japonica
  misc_feature (1)..(419): Homolog of NCBI NO: 4008159 NR Description: DnaJ homolog [Salix gilgiana]
  misc_feature (1)..(419): Homolog of NCBI NO: 461944 NR Description: DnaJ protein homolog (DNAJ-1)
  misc_feature (1)..(419): Homolog of NCBI NO: 10945669 NR Description: J1P [Daucus carota]
  misc_feature (1)..(419): Homolog of NCBI NO: 1169382 NR Description: DnaJ protein homolog 2 >gi|542196|pir||S42031

SEQ ID NO: 12623 - protein, 338 aa, Zea mays subsp. mays; identical to SEQ ID NO: 12112
  peptide (1)..(338): Ceres Seq. ID no. 12406582
  misc_feature (153)..(277): Pfam Name: DnaJ C terminal region Pfam Description: DnaJ C terminal region
  misc_feature (153)..(277): Pfam Name: DnaJ C terminal region Pfam Description: DnaJ C terminal region
  misc_feature (1)..(338): Homolog of NCBI NO: 7441932 NR Description: DnaJ protein homolog ZMDJ1 - maize
  misc_feature (1)..(338): Homolog of NCBI NO: 29367357 NR Description: DNAJ-like protein [Oryza sativa (japonica
  misc_feature (1)..(338): Homolog of NCBI NO: 7441930 NR Description: dnaJ protein homolog - potato
  misc_feature (1)..(338): Homolog of NCBI NO: 7441932 NR Description: DnaJ protein homolog ZMDJ1 - maize
  misc_feature (1)..(338): Homolog of NCBI NO: 7441930 NR Description: dnaJ protein homolog - potato
  misc_feature (1)..(338): Homolog of NCBI NO: 461944 NR Description: DnaJ protein homolog (DNAJ-1)
  misc_feature (1)..(338): Homolog of NCBI NO: 1169382 NR Description: DnaJ protein homolog 2 >gi|542196|pir||S42031
  misc_feature (1)..(338): Homolog of NCBI NO: 10945669 NR Description: J1P [Daucus carota]
  misc_feature (1)..(338): Homolog of NCBI NO: 4008159 NR Description: DnaJ homolog [Salix gilgiana]
  misc_feature (1)..(338): Homolog of NCBI NO: 29367357 NR Description: DNAJ-like protein [Oryza sativa (japonica
  misc_feature (1)..(338): Homolog of NCBI NO: 4008159 NR Description: DnaJ homolog [Salix gilgiana]
  misc_feature (1)..(338): Homolog of NCBI NO: 461944 NR Description: DnaJ protein homolog (DNAJ-1)
  misc_feature (1)..(338): Homolog of NCBI NO: 10945669 NR Description: J1P [Daucus carota]
  misc_feature (1)..(338): Homolog of NCBI NO: 1169382 NR Description: DnaJ protein homolog 2 >gi|542196|pir||S42031

SEQ ID NO: 12624 - DNA, 1167 bp, Zea mays subsp. mays
  misc_feature (1)..(1167): Ceres Seq. ID no. 12372251
  misc_feature: MA Experiment ID: 108544 Result: Up-regulated in Transcription
gcacgagaccattacctagaacatcctaatcgaaaaatctgcagcacgtctcctcttttcctcgtccacccggccatctccgcatccactcccgcaggccgcagcccagcaccggccgctctacgcctccacgccggcacgtcctcgtttctgtccgaggtcatcgcctccgcaacttcgtggccggtgaggtcgcaccaccatggcgtcgctcctagcccggcaggcagcgcaggcgctccgcgcgaggcaaacggcgcagctngggccggccgcgtcggcgatgcaagggcacctccgtacctacatgaacgcggggattcccaagcggttcaaagaggatgaggagaaagaacagcttgcaaaagatgtcgcaaaagattggaatgctgtgtttgaaaggagcatcaatacattgtttttgactgaaatggtccgtggcttgatgctaactctcaagtacttctttgatagaaatgtcacaattaactatccgtttgagaagggtcctctgagcccccgcttccgtggtgagcatgctctcagacgttatgaatctggggaagagcgctgcattgcttgtaaactatgcgaagctatatgcccagcgcaggcaattacaattgaggctgaagaacgtgaagatggcagtcgccgaaccacaagatatgatattgacatgaccaaatgcatttactgtgggttctgtcaagaggcttgcccagtcgatgctattgttgaggggcctaactttgagtttgccactgagacacacgaggaactactgtacgacaaggagaaattgcttgaaaatggtgatcgctgggagactgagattgctgagaacttgagatctgagagcctctatcgctgaatctgtcttccattatggttgataaactgggttcttccattttccatattttgctcaactagctgatgaataagcaaacgatgtatcataacttaggtacgatgtttttgtaccttggcaccatctgtgtgttttgttcattgccttgctaaaggtggcaccagatgttctttgatgggaaaattccttctgtagcactgagctgttttcagtcacaccttattttgtatacaatgaaacagaacgctgtgctcatggcacagtgatttggtgaatgttcacatgtttgtttc

SEQ ID NO: 12625 - protein, 223 aa, Zea mays subsp. mays
  peptide (1)..(223): Ceres Seq. ID no. 12372252
  misc_feature (156)..(179): Pfam Name: 4Fe-4S binding domain Pfam Description: 4Fe-4S binding domain
  misc_feature (1)..(223): Homolog of NCBI NO: 34915206 NR Description: putative NADH dehydrogenase [Oryza sativa
  misc_feature (1)..(223): Homolog of NCBI NO: 6226880 NR Description: NADH-ubiquinone oxidoreductase 23 kDa subunit,
  misc_feature (1)..(223): Homolog of NCBI NO: 15219265 NR Description: NADH dehydrogenase, putative; protein id: supported by cDNA: 5465., supported by cDNA: gi_15081696,
  misc_feature (1)..(223): Homolog of NCBI NO: 15219311 NR Description: NADH:ubiquinone oxidoreductase, putative; protein At1g16700.1, supported by cDNA: 1520., supported by cDNA: supported by cDNA: gi_20148604 [Arabidopsis thaliana]
  misc_feature (1)..(223): Homolog of NCBI NO: 1076669 NR Description: NADH2 dehydrogenase (ubiquinone) (EC 1.6.5.3)
  misc_feature (1)..(223): Homolog of NCBI NO: 3929358 NR Description: NADH-ubiquinone oxidoreductase 23 kDa subunit,
  misc_feature (64)..(223): Homolog of NCBI NO: 11466496 NR Description: NADH dehydrogenase, subunit 8 [Reclinomonas
  misc_feature (1)..(223): Homolog of NCBI NO: 31241895 NR Description: ENSANGP00000012187 [Anopheles gambiae]
  misc_feature (42)..(223): Homolog of NCBI NO: 34328786 NR Description: NADH:ubiquinone oxidoreductase subunit 8;
  misc_feature (21)..(223): Homolog of NCBI NO: 27807359 NR Description: NADH dehydrogenase (ubiquinone) Fe-S protein 8,
  misc_feature (21)..(21): Xaa is any aa, unknown or other
MASLLARQAAQALRARQTAQXGPAASAMQGHLRTYMNAGIPKRFKEDEEKEQLAKDVAKDWNAVFERSINTLFLTEMVRGLMLTLKYFFDRNVTINYPFEKGPLSPRFRGEHALRRYESGEERCIACKLCEAICPAQAITIEAEEREDGSRRTTRYDIDMTKCIYCGFCQEACPVDAIVEGPNFEFATETHEELLYDKEKLLENGDRWETEIAENLRSESLYR

SEQ ID NO: 12626 - protein, 196 aa, Zea mays subsp. mays
  peptide (1)..(196): Ceres Seq. ID no. 12372253
  misc_feature (129)..(152): Pfam Name: 4Fe-4S binding domain Pfam Description: 4Fe-4S binding domain
  misc_feature (1)..(196): Homolog of NCBI NO: 34915206 NR Description: putative NADH dehydrogenase [Oryza sativa
  misc_feature (1)..(196): Homolog of NCBI NO: 6226880 NR Description: NADH-ubiquinone oxidoreductase 23 kDa subunit,
  misc_feature (1)..(196): Homolog of NCBI NO: 15219265 NR Description: NADH dehydrogenase, putative; protein id: supported by cDNA: 5465., supported by cDNA: gi_15081696,
  misc_feature (1)..(196): Homolog of NCBI NO: 15219311 NR Description: NADH:ubiquinone oxidoreductase, putative; protein At1g16700.1, supported by cDNA: 1520., supported by cDNA: supported by cDNA: gi_20148604 [Arabidopsis thaliana]
  misc_feature (1)..(196): Homolog of NCBI NO: 1076669 NR Description: NADH2 dehydrogenase (ubiquinone) (EC 1.6.5.3)
  misc_feature (1)..(196): Homolog of NCBI NO: 3929358 NR Description: NADH-ubiquinone oxidoreductase 23 kDa subunit,
  misc_feature (37)..(196): Homolog of NCBI NO: 11466496 NR Description: NADH dehydrogenase, subunit 8 [Reclinomonas
  misc_feature (1)..(196): Homolog of NCBI NO: 31241895 NR Description: ENSANGP00000012187 [Anopheles gambiae]
  misc_feature (15)..(196): Homolog of NCBI NO: 34328786 NR Description: NADH:ubiquinone oxidoreductase subunit 8;
  misc_feature (1)..(196): Homolog of NCBI NO: 27807359 NR Description: NADH dehydrogenase (ubiquinone) Fe-S protein 8,
MQGHLRTYMNAGIPKRFKEDEEKEQLAKDVAKDWNAVFERSINTLFLTEMVRGLMLTLKYFFDRNVTINYPFEKGPLSPRFRGEHALRRYESGEERCIACKLCEAICPAQAITIEAEEREDGSRRTTRYDIDMTKCIYCGFCQEACPVDAIVEGPNFEFATETHEELLYDKEKLLENGDRWETEIAENLRSESLYR

SEQ ID NO: 12627 - protein, 188 aa, Zea mays subsp. mays
  peptide (1)..(188): Ceres Seq. ID no. 12372254
  misc_feature (121)..(144): Pfam Name: 4Fe-4S binding domain Pfam Description: 4Fe-4S binding domain
  misc_feature (1)..(188): Homolog of NCBI NO: 34915206 NR Description: putative NADH dehydrogenase [Oryza sativa
  misc_feature (1)..(188): Homolog of NCBI NO: 6226880 NR Description: NADH-ubiquinone oxidoreductase 23 kDa subunit,
  misc_feature (1)..(188): Homolog of NCBI NO: 15219265 NR Description: NADH dehydrogenase, putative; protein id: supported by cDNA: 5465., supported by cDNA: gi_15081696,
  misc_feature (1)..(188): Homolog of NCBI NO: 15219311 NR Description: NADH:ubiquinone oxidoreductase, putative; protein At1g16700.1, supported by cDNA: 1520., supported by cDNA: supported by cDNA: gi_20148604 [Arabidopsis thaliana]
  misc_feature (1)..(188): Homolog of NCBI NO: 1076669 NR Description: NADH2 dehydrogenase (ubiquinone) (EC 1.6.5.3)
  misc_feature (1)..(188): Homolog of NCBI NO: 3929358 NR Description: NADH-ubiquinone oxidoreductase 23 kDa subunit,
  misc_feature (29)..(188): Homolog of NCBI NO: 11466496 NR Description: NADH dehydrogenase, subunit 8 [Reclinomonas
  misc_feature (1)..(188): Homolog of NCBI NO: 31241895 NR Description: ENSANGP00000012187 [Anopheles gambiae]
  misc_feature (7)..(188): Homolog of NCBI NO: 34328786 NR Description: NADH:ubiquinone oxidoreductase subunit 8;
  misc_feature (1)..(188): Homolog of NCBI NO: 27807359 NR Description: NADH dehydrogenase (ubiquinone) Fe-S protein 8,
MNAGIPKRFKEDEEKEQLAKDVAKDWNAVFERSINTLFLTEMVRGLMLTLKYFFDRNVTINYPFEKGPLSPRFRGEHALRRYESGEERCIACKLCEAICPAQAITIEAEEREDGSRRTTRYDIDMTKCIYCGFCQEACPVDAIVEGPNFEFATETHEELLYDKEKLLENGDRWETEIAENLRSESLYR

SEQ ID NO: 12628 - DNA, 1075 bp, Zea mays subsp. mays
  misc_feature (1)..(1075): Ceres Seq. ID no. 12402112
  misc_feature: MA Experiment ID: 108522 Result: Up-regulated in Transcription
  misc_feature: MA Experiment 108522 PARAMETER Experiment Name: Zm_42deg_Heat_P Parameter: Age (day) Value: 8
  misc_feature: MA Experiment 108522 PARAMETER Experiment Name: Zm_42deg_Heat_P Parameter: Organism Value: Zea mays
  misc_feature: MA Experiment 108522 PARAMETER Experiment Name: Zm_42deg_Heat_P Parameter: Plant Line Value: 35A19
  misc_feature: MA Experiment 108522 PARAMETER Experiment Name: Zm_42deg_Heat_P Parameter: Temperature (deg C) Value: 42 vs. 22
  misc_feature: MA Experiment 108522 PARAMETER Experiment Name: Zm_42deg_Heat_P Parameter: Timepoint (hr) Value: 1
  misc_feature: MA Experiment 108522 PARAMETER Experiment Name: Zm_42deg_Heat_P Parameter: Tissue Value: Aerial
  misc_feature: MA Experiment ID: 108523 Result: Up-regulated in Transcription
  misc_feature: MA Experiment 108523 PARAMETER Experiment Name: Zm_42deg_Heat_P Parameter: Age (day) Value: 8
  misc_feature: MA Experiment 108523 PARAMETER Experiment Name: Zm_42deg_Heat_P Parameter: Organism Value: Zea mays
  misc_feature: MA Experiment 108523 PARAMETER Experiment Name: Zm_42deg_Heat_P Parameter: Plant Line Value: 35A19
  misc_feature: MA Experiment 108523 PARAMETER Experiment Name: Zm_42deg_Heat_P Parameter: Temperature (deg C) Value: 42 vs. 22
  misc_feature: MA Experiment 108523 PARAMETER Experiment Name: Zm_42deg_Heat_P Parameter: Timepoint (hr) Value: 6
  misc_feature: MA Experiment 108523 PARAMETER Experiment Name: Zm_42deg_Heat_P Parameter: Tissue Value: Aerial
  misc_feature: MA Experiment ID: 20000626 Result: Up-regulated in Transcription
  misc_feature: MA Experiment 20000626 PARAMETER Experiment Name: Zm_Herbicide-Treatments_P Parameter: Timepoint (hr) Value: 12
  misc_feature: MA Experiment 20000626 PARAMETER Experiment Name: Zm_Herbicide-Treatments_P Parameter: Tissue Value: Aerial
  misc_feature: MA Experiment 20000626 PARAMETER Experiment Name: Zm_Herbicide-Treatments_P Parameter: Treatment Value: Roundup vs. No Treatment
ctctgaaagtgggcctatcctcgctggtcacgtctcctctccgcgcacgaaaaccctagcacgcaggcgcagccagccctgctccaattcccaaagcttctggaaaacacctactcgtctctcatcccttccccgccgtcgcgtcctcttcgaactgaatcgcgccgcgatcacccaccttatggcggacaaggagcctgtcgtggagcgatccgaggcgtctgaggaggaggacgcctccgccgcggccgccgcgggggaggaagaggacacgggtgcccaggtggcccccatcgtgcggcttgaggaggtactcgtcaccaccggtgaggaggacgaggacgtcctgctcgacatgaaggcgaagctgtaccggtttgataaagacgggaaccaatggaaggaacggggcacgggcaccgtcaagcttctcaagaacaaggagaccggcaaggtccgactggtcatgcgccagggccaagacgcttaagatatgcgcgaaccacctcgtggcccccaccacgagaatgcaggaacatgccggcagcgacaaatcgtgcgtctggcacgcttctgactttgcggatggcgaactcaaggaggagatgtttgccatcaggtttggttcggtagaaaactgcaagaagttcaaggagttggttgaggagattgctgagtcacttacagagaacgaggacaaggaaggtcaagatggctcatccacggccggattgctggagaagctcactgtgagcgagggcaaatctgaggaaagtggcaagtcggagtccactgattctggcaaagtgaccgaaaccaaagccgatgcagccccagccgagtagttggtgtggttgcacgcagatcctccccgtgctgaatcagttcctctgccctttagccatgaaatatgtttgctaatttttttggggcgagttggagcagtctcttgtgtttgggtttgttcttaaaaactttgagttaattggggttggaacgttcggtatgcaagtgtagtatttcactgcgtggatcgttatggattgcggtaaattcatataaggtgcatctattg

SEQ ID NO: 12629 - protein, 162 aa, Zea mays subsp. mays
  peptide (1)..(162): Ceres Seq. ID no. 12402113
  misc_feature (106)..(160): Pfam Name: RanBP1 domain Pfam Description: RanBP1 domain
  misc_feature (61)..(160): Homolog of NCBI NO: 15222310 NR Description: Ran-binding protein (atranbp1a); protein id: supported by cDNA: gi_13877580, supported by cDNA: gi_15294205,
  misc_feature (61)..(160): Homolog of NCBI NO: 2058282 NR Description: atranbp1a [Arabidopsis thaliana]
  misc_feature (65)..(160): Homolog of NCBI NO: 14091665 NR Description: Ran binding protein-1 [Lycopersicon esculentum]
  misc_feature (61)..(160): Homolog of NCBI NO: 5106769 NR Description: Ran-binding protein siRanBP [Arabidopsis thaliana]
  misc_feature (61)..(160): Homolog of NCBI NO: 8843780 NR Description: contains similarity to small GTPase Ran binding
  misc_feature (61)..(160): Homolog of NCBI NO: 30697102 NR Description: Ran binding protein 1 homolog - like [Arabidopsis >gi|1732511|gb|AAB38776.1| Ran binding protein 1 homolog
  misc_feature (70)..(158): Homolog of NCBI NO: 34869790 NR Description: similar to Ran-specific GTPase-activating protein
  misc_feature (67)..(158): Homolog of NCBI NO: 1877412 NR Description: Ran binding protein 1 [Xenopus laevis]
  misc_feature (72)..(158): Homolog of NCBI NO: 6755284 NR Description: RAN binding protein 1 [Mus musculus] hypothetical protein A [Mus musculus] >gi|444000|emb|CAA39517.1|
  misc_feature (63)..(158): Homolog of NCBI NO: 40746106 NR Description: hypothetical protein AN0084.2 [Aspergillus
SESGPILAGHVSSPRTKTLARRRSQPCSNSQSFWKTPTRLSSLPRRRVLFELNRAAITHLMADKEPVVERSEASEEEDASAAAAAGEEEDTGAQVAPIVRLEEVLVTTGEEDEDVLLDMKAKLYRFDKDGNQWKERGTGTVKLLKNKETGKVRLVMRQGQDA

SEQ ID NO: 12630 - protein, 105 aa, Zea mays subsp. mays
  peptide (1)..(105): Ceres Seq. ID no. 12402114
  misc_feature (1)..(51): Pfam Name: RanBP1 domain Pfam Description: RanBP1 domain
  misc_feature (1)..(105): Homolog of NCBI NO: 8843780 NR Description: contains similarity to small GTPase Ran binding
  misc_feature (1)..(105): Homolog of NCBI NO: 30697102 NR Description: Ran binding protein 1 homolog - like [Arabidopsis >gi|1732511|gb|AAB38776.1| Ran binding protein 1 homolog
  misc_feature (1)..(87): Homolog of NCBI NO: 34869790 NR Description: similar to Ran-specific GTPase-activating protein
  misc_feature (1)..(100): Homolog of NCBI NO: 15222310 NR Description: Ran-binding protein (atranbp1a); protein id: supported by cDNA: gi_13877580, supported by cDNA: gi_15294205,
  misc_feature (1)..(100): Homolog of NCBI NO: 14091665 NR Description: Ran binding protein-1 [Lycopersicon esculentum]
  misc_feature (1)..(100): Homolog of NCBI NO: 5106769 NR Description: Ran-binding protein siRanBP [Arabidopsis thaliana]
  misc_feature (1)..(100): Homolog of NCBI NO: 2058282 NR Description: atranbp1a [Arabidopsis thaliana]
  misc_feature (1)..(96): Homolog of NCBI NO: 1877412 NR Description: Ran binding protein 1 [Xenopus laevis]
  misc_feature (1)..(87): Homolog of NCBI NO: 6755284 NR Description: RAN binding protein 1 [Mus musculus] hypothetical protein A [Mus musculus] >gi|444000|emb|CAA39517.1|
  misc_feature (1)..(56): Homolog of NCBI NO: 40746106 NR Description: hypothetical protein AN0084.2 [Aspergillus
MQEHAGSDKSCVWHASDFADGELKEEMFAIRFGSVENCKKFKELVEEIAESLTENEDKEGQDGSSTAGLLEKLTVSEGKSEESGKSESTDSGKVTETKADAAPAE

SEQ ID NO: 12631 - protein, 102 aa, Zea mays subsp. mays
  peptide (1)..(102): Ceres Seq. ID no. 12402115
  misc_feature (46)..(100): Pfam Name: RanBP1 domain Pfam Description: RanBP1 domain
  misc_feature (1)..(100): Homolog of NCBI NO: 15222310 NR Description: Ran-binding protein (atranbp1a); protein id: supported by cDNA: gi_13877580, supported by cDNA: gi_15294205,
  misc_feature (1)..(100): Homolog of NCBI NO: 2058282 NR Description: atranbp1a [Arabidopsis thaliana]
  misc_feature (5)..(100): Homolog of NCBI NO: 14091665 NR Description: Ran binding protein-1 [Lycopersicon esculentum]
  misc_feature (1)..(100): Homolog of NCBI NO: 5106769 NR Description: Ran-binding protein siRanBP [Arabidopsis thaliana]
  misc_feature (1)..(100): Homolog of NCBI NO: 8843780 NR Description: contains similarity to small GTPase Ran binding
  misc_feature (1)..(100): Homolog of NCBI NO: 30697102 NR Description: Ran binding protein 1 homolog - like [Arabidopsis >gi|1732511|gb|AAB38776.1| Ran binding protein 1 homolog
  misc_feature (10)..(98): Homolog of NCBI NO: 34869790 NR Description: similar to Ran-specific GTPase-activating protein
  misc_feature (7)..(98): Homolog of NCBI NO: 1877412 NR Description: Ran binding protein 1 [Xenopus laevis]
  misc_feature (12)..(98): Homolog of NCBI NO: 6755284 NR Description: RAN binding protein 1 [Mus musculus] hypothetical protein A [Mus musculus] >gi|444000|emb|CAA39517.1|
  misc_feature (3)..(98): Homolog of NCBI NO: 40746106 NR Description: hypothetical protein AN0084.2 [Aspergillus
MADKEPVVERSEASEEEDASAAAAAGEEEDTGAQVAPIVRLEEVLVTTGEEDEDVLLDMKAKLYRFDKDGNQWKERGTGTVKLLKNKETGKVRLVMRQGQDA

SEQ ID NO: 12632 - DNA, 964 bp, Zea mays subsp. mays
  misc_feature (1)..(964): Ceres Seq. ID no. 12341310
  misc_feature: MA Experiment ID: 108529 Result: Up-regulated in Transcription
  misc_feature: MA Experiment 108529 PARAMETER Experiment Name: Zm_Imbibed_Seeds_P Parameter: Age (day) Value: 5 vs. 2
  misc_feature: MA Experiment 108529 PARAMETER Experiment Name: Zm_Imbibed_Seeds_P Parameter: Organism Value: Zea mays
  misc_feature: MA Experiment 108529 PARAMETER Experiment Name: Zm_Imbibed_Seeds_P Parameter: Plant Line Value: 35A19
  misc_feature: MA Experiment 108529 PARAMETER Experiment Name: Zm_Imbibed_Seeds_P Parameter: Tissue Value: Roots vs. Embryo
  misc_feature: MA Experiment ID: 108535 Result: Down-regulated in Transcription
  misc_feature: MA Experiment 108535 PARAMETER Experiment Name: Zm_Meristem_P Parameter: Age (day) Value: 8
  misc_feature: MA Experiment 108535 PARAMETER Experiment Name: Zm_Meristem_P Parameter: Organism Value: Zea mays
  misc_feature: MA Experiment 108535 PARAMETER Experiment Name: Zm_Meristem_P Parameter: Plant Line Value: 35A19
  misc_feature: MA Experiment 108535 PARAMETER Experiment Name: Zm_Meristem_P Parameter: Tissue Value: Root Meristem vs. Above Root Meristem
acgcgtccaggctcggaggctccaacagcacgacgcaaccgaccccaccttccctttacgcgaagaagcatcaccgcgagacgcgagtcgtcctcctctctgtcttcgctcggcgatctatcaaggagggtgagggggagatggcggagaatccgcagctgtttgggaacgggatgccggtgccgttctacggcgagatgttcgtcctcgtccgcgacggcgtcgagttccacgtcgacaagatcccgtcagctcctggaggtcatgtgaaaacaaaaggcacaatttacctgtccaatataaggatggtgtttgttgccagcaagcctgttggcaacttctttgcttttgatatgccactgttgtttgtgcatggtgagaagttcaatcagcccatatttcactgcaacaacatctctggattcgttgaaccagtcgttccagacaatcagaacagggccctgtactcaactcacaccttcaagatcttgttcaagtaaggcggctgtggtactttcgttcctctcttccttaacctgactgcatctgtgcggcgctacaatgagtttgaagcccagtctgctgctaacatggcaccgcgtgtggatcccctgcaagccgcgcagactcctgtcgatgatatgatgcgtcatgcgtatgttgacccaaatgatcctaccaagatttaccttcagcaacctgccccagaatcgcagctgaggaggagaaactaccacggcccagctgatgtgaattagcgcttgctggattggcaaaactcatggccaatgaactgttgtatctgtttgaacaatttatcacaactggcttcaatatccgggagcccccgtatactgcgaatctgtggccgttacatcgtacataatgttttgagttcgctcaataatgatgtacataagcagtggtgtactggtgtgttcaaataatattgtagtgttaagtc

SEQ ID NO: 12633 - protein, 165 aa, Zea mays subsp. mays
  peptide (1)..(165): Ceres Seq. ID no. 12341311
  misc_feature (47)..(165): Homolog of NCBI NO: 15239148 NR Description: putative protein; protein id: At5g11680.1, by cDNA: 403., supported by cDNA: gi_17065569, supported by cDNA: supported by cDNA: gi_20148562 [Arabidopsis thaliana]
  misc_feature (47)..(165): Homolog of NCBI NO: 23479181 NR Description: arabinogalactan protein [Plasmodium yoelii yoelii]
  misc_feature (47)..(165): Homolog of NCBI NO: 23619609 NR Description: hypothetical protein [Plasmodium falciparum 3D7]
ASRLGGSNSTTQPTPPSLYAKKHHRETRVVLLSVFARRSIKEGEGEMAENPQLFGNGMPVPFYGEMFVLVRDGVEFHVDKIPSAPGGHVKTKGTIYLSNIRMVFVASKPVGNFFAFDMPLLFVHGEKFNQPIFHCNNISGFVEPVVPDNQNRALYSTHTFKILFK

SEQ ID NO: 12634 - protein, 119 aa, Zea mays subsp. mays
  peptide (1)..(119): Ceres Seq. ID no. 12341312
  misc_feature (1)..(119): Homolog of NCBI NO: 15239148 NR Description: putative protein; protein id: At5g11680.1, by cDNA: 403., supported by cDNA: gi_17065569, supported by cDNA: supported by cDNA: gi_20148562 [Arabidopsis thaliana]
  misc_feature (1)..(119): Homolog of NCBI NO: 23479181 NR Description: arabinogalactan protein [Plasmodium yoelii yoelii]
  misc_feature (1)..(119): Homolog of NCBI NO: 23619609 NR Description: hypothetical protein [Plasmodium falciparum 3D7]
MAENPQLFGNGMPVPFYGEMFVLVRDGVEFHVDKIPSAPGGHVKTKGTIYLSNIRMVFVASKPVGNFFAFDMPLLFVHGEKFNQPIFHCNNISGFVEPVVPDNQNRALYSTHTFKILFK

SEQ ID NO: 12635 - protein, 108 aa, Zea mays subsp. mays
  peptide (1)..(108): Ceres Seq. ID no. 12341313
  misc_feature (1)..(108): Homolog of NCBI NO: 15239148 NR Description: putative protein; protein id: At5g11680.1, by cDNA: 403., supported by cDNA: gi_17065569, supported by cDNA: supported by cDNA: gi_20148562 [Arabidopsis thaliana]
  misc_feature (1)..(108): Homolog of NCBI NO: 23479181 NR Description: arabinogalactan protein [Plasmodium yoelii yoelii]
  misc_feature (1)..(108): Homolog of NCBI NO: 23619609 NR Description: hypothetical protein [Plasmodium falciparum 3D7]
MPVPFYGEMFVLVRDGVEFHVDKIPSAPGGHVKTKGTIYLSNIRMVFVASKPVGNFFAFDMPLLFVHGEKFNQPIFHCNNISGFVEPVVPDNQNRALYSTHTFKILFK

SEQ ID NO: 12636 - DNA, 619 bp, Zea mays subsp. mays
  misc_feature (1)..(619): Ceres Seq. ID no. 12483051
  misc_feature: MA Experiment ID: 108523 Result: Up-regulated in Transcription
  misc_feature: MA Experiment 108523 PARAMETER Experiment Name: Zm_42deg_Heat_P Parameter: Age (day) Value: 8
  misc_feature: MA Experiment 108523 PARAMETER Experiment Name: Zm_42deg_Heat_P Parameter: Organism Value: Zea mays
  misc_feature: MA Experiment 108523 PARAMETER Experiment Name: Zm_42deg_Heat_P Parameter: Plant Line Value: 35A19
  misc_feature: MA Experiment 108523 PARAMETER Experiment Name: Zm_42deg_Heat_P Parameter: Temperature (deg C) Value: 42 vs. 22
  misc_feature: MA Experiment 108523 PARAMETER Experiment Name: Zm_42deg_Heat_P Parameter: Timepoint (hr) Value: 6
  misc_feature: MA Experiment 108523 PARAMETER Experiment Name: Zm_42deg_Heat_P Parameter: Tissue Value: Aerial
  misc_feature: MA Experiment ID: 108559 Result: Down-regulated in Transcription
  misc_feature: MA Experiment 108559 PARAMETER Experiment Name: Zm_5mM_NO_P Parameter: Age (day) Value: 8
  misc_feature: MA Experiment 108559 PARAMETER Experiment Name: Zm_5mM_NO_P Parameter: Organism Value: Zea mays
  misc_feature: MA Experiment 108559 PARAMETER Experiment Name: Zm_5mM_NO_P Parameter: Plant Line Value: 35A19
  misc_feature: MA Experiment 108559 PARAMETER Experiment Name: Zm_5mM_NO_P Parameter: Timepoint (hr) Value: 12
  misc_feature: MA Experiment 108559 PARAMETER Experiment Name: Zm_5mM_NO_P Parameter: Tissue Value: Aerial
  misc_feature: MA Experiment 108559 PARAMETER Experiment Name: Zm_5mM_NO_P Parameter: Treatment Value: 5mM NO vs. No Treatment
atttttcgagatgaacgaacagtccagaacccactgctcgaaaccgcagccactggccagtcgatgcccatgactgcggtgcccaggaccggccccggttgcctggggtcgccgccggctcaggctctgtcgagctcactagccggggttcaaggcgccccgaagcgactgggcgcatcgaagccgtcgtggatcgttcgcactgagtcaaacgtgaggagggagagagcaaaacgacctgatcctccttgcaccatctgcaagggcacagggagaatagactgccgcaactgctttggccgaggaagaacaaaccatgccgatgtggccatgcttccgaacggcgaatggccacaatggtgtcgaatttgtggtggtagtggactggattactgcctccggtgccatggaactggtgagtatcgtgaacccatgggcttccacttcactgtccaaagaaaatgagtgaggtgggatggccttgtatgctacgatgcagcgcagctgcggggacatcgtagcccactcagcatgtttctccactgtctctcagaactcagatgatttatgtctagcgctaacgctgtaataacgttgcttcataaaaggaaaaaatgtc

SEQ ID NO: 12637 - protein, 154 aa, Zea mays subsp. mays
  peptide (1)..(154): Ceres Seq. ID no. 12483052
  misc_feature (24)..(154): Homolog of NCBI NO: 38346709 NR Description: OSJNBa0086O06.7 [Oryza sativa (japonica
  misc_feature (32)..(152): Homolog of NCBI NO: 9294155 NR Description: gene_id:MKP6.23~unknown protein [Arabidopsis
  misc_feature (32)..(140): Homolog of NCBI NO: 15229091 NR Description: hypothetical protein; protein id: At3g17670.1
IFRDERTVQNPLLETAATGQSMPMTAVPRTGPGCLGSPPAQALSSSLAGVQGAPKRLGASKPSWIVRTESNVRRERAKRPDPPCTICKGTGRIDCRNCFGRGRTNHADVAMLPNGEWPQWCRICGGSGLDYCLRCHGTGEYREPMGFHFTVQRK

SEQ ID NO: 12638 - protein, 133 aa, Zea mays subsp. mays
  peptide (1)..(133): Ceres Seq. ID no. 12483053
  misc_feature (3)..(133): Homolog of NCBI NO: 38346709 NR Description: OSJNBa0086O06.7 [Oryza sativa (japonica
  misc_feature (11)..(131): Homolog of NCBI NO: 9294155 NR Description: gene_id:MKP6.23~unknown protein [Arabidopsis
  misc_feature (11)..(119): Homolog of NCBI NO: 15229091 NR Description: hypothetical protein; protein id: At3g17670.1
MPMTAVPRTGPGCLGSPPAQALSSSLAGVQGAPKRLGASKPSWIVRTESNVRRERAKRPDPPCTICKGTGRIDCRNCFGRGRTNHADVAMLPNGEWPQWCRICGGSGLDYCLRCHGTGEYREPMGFHFTVQRK

SEQ ID NO: 12639 - protein, 131 aa, Zea mays subsp. mays
  peptide (1)..(131): Ceres Seq. ID no. 12483054
  misc_feature (1)..(131): Homolog of NCBI NO: 38346709 NR Description: OSJNBa0086O06.7 [Oryza sativa (japonica
  misc_feature (9)..(129): Homolog of NCBI NO: 9294155 NR Description: gene_id:MKP6.23~unknown protein [Arabidopsis
  misc_feature (9)..(117): Homolog of NCBI NO: 15229091 NR Description: hypothetical protein; protein id: At3g17670.1
MTAVPRTGPGCLGSPPAQALSSSLAGVQGAPKRLGASKPSWIVRTESNVRRERAKRPDPPCTICKGTGRIDCRNCFGRGRTNHADVAMLPNGEWPQWCRICGGSGLDYCLRCHGTGEYREPMGFHFTVQRK

SEQ ID NO: 12640 - DNA, 831 bp, Zea mays subsp. mays
  misc_feature (1)..(831): Ceres Seq. ID no. 12402108
  misc_feature: MA Experiment ID: 108544 Result: Up-regulated in Transcription
attttgtggacctatagcatattcccgtggtctccccccttttgctttgcttgccgagacggcgaccatggcgaagcagcagaatcctatccccatcccgatgccctgtcgctgtcgctgcccctcgtcctcgtcgcgctgctcctgccggccgcccgcggcgccgcggagacgccgcagtacacgacggtgcacgcggagtcggacttcgaggtgcggctgtacggcgacaccgtctggatgtccgcccccaccccggacatcccttccttccacgtcgccaccaagctcggcttccacagattgttccagtacctgatgggcgcaaacctcaactcttcgaggatcaggatgaccacccctgtgctcacgagtgtggttccaggtgcagggcctctgcgctcctcggcctactccgtccggctgtacctgccggcgaagttccaggcttcccctccggttcctctcccagagctgaacctgcatccagatcggtggccaggccactgcgtcgcagcgaggagcttctcgggtcgtgcacgggacaagaacgtggtcgaggaagccgagaagctcgccatgagcctgagccggtcaccatgggctaactccacagactactccagcaagagcgcttactcggttgcacagtacagcagtccattccgcatcattggccgtgtcaatgaggtgtggttcgacgtcaactgcagatctactgctgctggtgttgagtcctactgaaaaaaaaactgccagatgtgatggataataataatttggatgtaaaacacaagctgtcctgctttattccatctcttactcctagcc

SEQ ID NO: 12641 - protein, 247 aa, Zea mays subsp. mays
  peptide (1)..(247): Ceres Seq. ID no. 12402109
  misc_feature (57)..(236): Pfam Name: SOUL heme-binding protein Pfam Description: SOUL heme-binding protein
  misc_feature (36)..(247): Homolog of NCBI NO: 34904402 NR Description: unnamed protein product [Oryza sativa (japonica group)] >gi|7339697|dbj|BAA92902.1| unnamed protein product
  misc_feature (50)..(232): Homolog of NCBI NO: 15220033 NR Description: SOUL-like protein; protein id: At1g17100.1, by cDNA: 29992. [Arabidopsis thaliana] >gi|25372687|pir||G86306
  misc_feature (36)..(234): Homolog of NCBI NO: 34903864 NR Description: unnamed protein product [Oryza sativa (japonica group)] >gi|8096573|dbj|BAA96146.1| unnamed protein product
  misc_feature (49)..(233): Homolog of NCBI NO: 18411970 NR Description: expressed protein; protein id: At1g78450.1, by cDNA: 5677. [Arabidopsis thaliana] >gi|25372685|pir||H96812
  misc_feature (49)..(233): Homolog of NCBI NO: 21593898 NR Description: SOUL-like protein [Arabidopsis thaliana]
  misc_feature (57)..(232): Homolog of NCBI NO: 28278449 NR Description: Similar to heme binding protein 2 [Danio rerio]
  misc_feature (57)..(236): Homolog of NCBI NO: 15218357 NR Description: hypothetical protein; protein id: At1g78460.1
  misc_feature (51)..(232): Homolog of NCBI NO: 7657603 NR Description: heme binding protein 2; putative heme-binding chromosome 6 open reading frame 34 [Homo sapiens]
  misc_feature (70)..(232): Homolog of NCBI NO: 15778345 NR Description: C6ORF34B [Homo sapiens]
  misc_feature (70)..(232): Homolog of NCBI NO: 27731687 NR Description: similar to heme binding protein 2; putative
ILWTYSIFPWSPPFCFACRDGDHGEAAESYPHPDALSLSLPLVLVALLLPAARGAAETPQYTTVHAESDFEVRLYGDTVWMSAPTPDIPSFHVATKLGFHRLFQYLMGANLNSSRIRMTTPVLTSVVPGAGPLRSSAYSVRLYLPAKFQASPPVPLPELNLHPDRWPGHCVAARSFSGRARDKNVVEEAEKLAMSLSRSPWANSTDYSSKSAYSVAQYSSPFRIIGRVNEVWFDVNCRSTAAGVESY

SEQ ID NO: 12642 - protein, 167 aa, Zea mays subsp. mays
  peptide (1)..(167): Ceres Seq. ID no. 12402110
  misc_feature (1)..(156): Pfam Name: SOUL heme-binding protein Pfam Description: SOUL heme-binding protein
  misc_feature (1)..(167): Homolog of NCBI NO: 34904402 NR Description: unnamed protein product [Oryza sativa (japonica group)] >gi|7339697|dbj|BAA92902.1| unnamed protein product
  misc_feature (1)..(152): Homolog of NCBI NO: 15220033 NR Description: SOUL-like protein; protein id: At1g17100.1, by cDNA: 29992. [Arabidopsis thaliana] >gi|25372687|pir||G86306
  misc_feature (1)..(154): Homolog of NCBI NO: 34903864 NR Description: unnamed protein product [Oryza sativa (japonica group)] >gi|8096573|dbj|BAA96146.1| unnamed protein product
  misc_feature (1)..(153): Homolog of NCBI NO: 18411970 NR Description: expressed protein; protein id: At1g78450.1, by cDNA: 5677. [Arabidopsis thaliana] >gi|25372685|pir||H96812
  misc_feature (1)..(153): Homolog of NCBI NO: 21593898 NR Description: SOUL-like protein [Arabidopsis thaliana]
  misc_feature (1)..(152): Homolog of NCBI NO: 28278449 NR Description: Similar to heme binding protein 2 [Danio rerio]
  misc_feature (1)..(156): Homolog of NCBI NO: 15218357 NR Description: hypothetical protein; protein id: At1g78460.1
  misc_feature (1)..(152): Homolog of NCBI NO: 7657603 NR Description: heme binding protein 2; putative heme-binding chromosome 6 open reading frame 34 [Homo sapiens]
  misc_feature (1)..(152): Homolog of NCBI NO: 15778345 NR Description: C6ORF34B [Homo sapiens]
  misc_feature (1)..(152): Homolog of NCBI NO: 27731687 NR Description: similar to heme binding protein 2; putative
MSAPTPDIPSFHVATKLGFHRLFQYLMGANLNSSRIRMTTPVLTSVVPGAGPLRSSAYSVRLYLPAKFQASPPVPLPELNLHPDRWPGHCVAARSFSGRARDKNVVEEAEKLAMSLSRSPWANSTDYSSKSAYSVAQYSSPFRIIGRVNEVWFDVNCRSTAAGVESY

SEQ ID NO: 12643 - protein, 141 aa, Zea mays subsp. mays
  peptide (1)..(141): Ceres Seq. ID no. 12402111
  misc_feature (1)..(130): Pfam Name: SOUL heme-binding protein Pfam Description: SOUL heme-binding protein
  misc_feature (1)..(141): Homolog of NCBI NO: 34904402 NR Description: unnamed protein product [Oryza sativa (japonica group)] >gi|7339697|dbj|BAA92902.1| unnamed protein product
  misc_feature (1)..(126): Homolog of NCBI NO: 15220033 NR Description: SOUL-like protein; protein id: At1g17100.1, by cDNA: 29992. [Arabidopsis thaliana] >gi|25372687|pir||G86306
  misc_feature (1)..(128): Homolog of NCBI NO: 34903864 NR Description: unnamed protein product [Oryza sativa (japonica group)] >gi|8096573|dbj|BAA96146.1| unnamed protein product
  misc_feature (1)..(127): Homolog of NCBI NO: 18411970 NR Description: expressed protein; protein id: At1g78450.1, by cDNA: 5677. [Arabidopsis thaliana] >gi|25372685|pir||H96812
  misc_feature (1)..(127): Homolog of NCBI NO: 21593898 NR Description: SOUL-like protein [Arabidopsis thaliana]
  misc_feature (1)..(126): Homolog of NCBI NO: 28278449 NR Description: Similar to heme binding protein 2 [Danio rerio]
  misc_feature (1)..(130): Homolog of NCBI NO: 15218357 NR Description: hypothetical protein; protein id: At1g78460.1
  misc_feature (1)..(126): Homolog of NCBI NO: 7657603 NR Description: heme binding protein 2; putative heme-binding chromosome 6 open reading frame 34 [Homo sapiens]
  misc_feature (1)..(126): Homolog of NCBI NO: 15778345 NR Description: C6ORF34B [Homo sapiens]
  misc_feature (1)..(126): Homolog of NCBI NO: 27731687 NR Description: similar to heme binding protein 2; putative
MGANLNSSRIRMTTPVLTSVVPGAGPLRSSAYSVRLYLPAKFQASPPVPLPELNLHPDRWPGHCVAARSFSGRARDKNVVEEAEKLAMSLSRSPWANSTDYSSKSAYSVAQYSSPFRIIGRVNEVWFDVNCRSTAAGVESY

SEQ ID NO: 12644 - DNA, 1801 bp, Zea mays subsp. mays
  misc_feature (1)..(1801): Ceres Seq. ID no. 12351800
  misc_feature: MA Experiment ID: 108527 Result: Up-regulated in Transcription
  misc_feature: MA Experiment 108527 PARAMETER Experiment Name: Zm_5mM_NO_P Parameter: Age (day) Value: 8
  misc_feature: MA Experiment 108527 PARAMETER Experiment Name: Zm_5mM_NO_P Parameter: Organism Value: Zea mays
  misc_feature: MA Experiment 108527 PARAMETER Experiment Name: Zm_5mM_NO_P Parameter: Plant Line Value: 35A19
  misc_feature: MA Experiment 108527 PARAMETER Experiment Name: Zm_5mM_NO_P Parameter: Timepoint (hr) Value: 6
  misc_feature: MA Experiment 108527 PARAMETER Experiment Name: Zm_5mM_NO_P Parameter: Tissue Value: Aerial
  misc_feature: MA Experiment 108527 PARAMETER Experiment Name: Zm_5mM_NO_P Parameter: Treatment Value: 5mM NO vs. No Treatment
  misc_feature: MA Experiment ID: 108529 Result: Up-regulated in Transcription
  misc_feature: MA Experiment 108529 PARAMETER Experiment Name: Zm_Imbibed_Seeds_P Parameter: Age (day) Value: 5 vs. 2
  misc_feature: MA Experiment 108529 PARAMETER Experiment Name: Zm_Imbibed_Seeds_P Parameter: Organism Value: Zea mays
  misc_feature: MA Experiment 108529 PARAMETER Experiment Name: Zm_Imbibed_Seeds_P Parameter: Plant Line Value: 35A19
  misc_feature: MA Experiment 108529 PARAMETER Experiment Name: Zm_Imbibed_Seeds_P Parameter: Tissue Value: Roots vs. Embryo
  misc_feature: MA Experiment ID: 108543 Result: Up-regulated in Transcription
  misc_feature: MA Experiment ID: 108544 Result: Up-regulated in Transcription
  misc_feature: MA Experiment ID: 20000108 Result: Down-regulated in Transcription
  misc_feature: MA Experiment 20000108 PARAMETER Experiment Name: Zm_Root-Tips_P Parameter: Age (day) Value: 12
  misc_feature: MA Experiment 20000108 PARAMETER Experiment Name: Zm_Root-Tips_P Parameter: Organism Value: Zea mays
  misc_feature: MA Experiment 20000108 PARAMETER Experiment Name: Zm_Root-Tips_P Parameter: Tissue Value: Root tips vs. Root mid region    35
  misc_feature: MA Experiment 20000108 PARAMETER Experiment Name: Zm_Root-Tips_P Parameter: Tissue Value: Root tips vs. Root mid region   Sequence Listing-Misc Features (4)
  misc_feature: MA Experiment ID: 20000535 Result: Down-regulated in Transcription
  misc_feature: MA Experiment 20000535 PARAMETER Experiment Name: Zm_Hybrid_Seed_Dev_P Parameter: DAP Value: 30 vs. 12
  misc_feature: MA Experiment 20000535 PARAMETER Experiment Name: Zm_Hybrid_Seed_Dev_P Parameter: Organism Value: Zea mays
  misc_feature: MA Experiment 20000535 PARAMETER Experiment Name: Zm_Hybrid_Seed_Dev_P Parameter: Plant Line Value: 35A19
  misc_feature: MA Experiment 20000535 PARAMETER Experiment Name: Zm_Hybrid_Seed_Dev_P Parameter: Tissue Value: Embryo vs. Unfert Floret
atcagcgtgttttgttttgtttcgtctcgtcgaccgagccgtccgtcgtcctccctggcggtctggccgcctccgccttcctccccgtgcgtctcacccttttcctctacagcttcctctgcccaatcagctcgtcctctcccctcctctccctcccgtgaactgctaaaatccctcgccaagcatttccgtcgggttaggtggtagataagccgaaaatcgagtggaaaagcatcaatcgagtgctgcgctagttgcctggttcgtcccaacaaattccaccgggaatcagggtcgtccggcagcggctgaggcgtctgggttctggaggagcggccgtcggtgaggggggatggggggcggcggcggatcctccgggccggagctgtcgacggacaacatgaaggggatagtcctggcgctgctctccagcggcttcatcggcgccagcttcatcatcaagaagaagggtctccgccgggccgctgtcgcctccggcgtccgtgcaggtgtaggcgggtactcatacctcatggagcccctgtggtgggttggcatgatcattatgattgtaggtgagattgccaatttcgtggcatatgctttcgcccccgctgttctggttactccccttggagcactcagcataattgttagtgcagtgctggctcatttcattctgaacgagaggctgcatgccctcggggtgctcggctgcgtgatgtgcattgcagggtctgtggtcattgttatccacgctccacaggagcaggagattacttcagttaaggaaatatggaacatggcgacacaacctgctttcttgttatatgttgcgtcagttattgtgattgtttttgtcctggtgttctatttctcccctctctatgggcagtccaatgtgttgatctacactgccatttgctctttgatgggctctctttcggttatgagtgttaaagctcttggtacatcactaaagcttacttttgagggaacaaaccaattaatatatccagagacttggttctttatgcttgttgtggctacttgtgtgttgactcagatgaattatctgaacaaggcacttgacacgttcaacacggcaattgtatctccaatatattatgtaatgttcacaactcttacaatacttgccagcgtcataatgttcaaggattggtctggtcaaagccctggaagcgtcatttctgaaatttgtggcttggttgtggtgttgtctggtaccattttgttgcatgtgacgaaggattatgaaaggatcccacaatcaagaagtgtttatgcaccattatctccctctttgacaactagattaaatggagaattgttgaagcatgtcgtggatgagaggacttcggacgaagaaaaggccttgagaagacaggagatgtattagcgtgcgtcagaatatcaaaggaaatataggttactctgatggattctccggcaggggcttgtacatggcgtagtgataaccttcccatagcgattgttgattcctccattacagtttgttggtttgtgtatataactgcagcaatttgtggctaccgagtgattgcaaatctgccgaggtggtggaaggctgcagagttccaccaaaaagaatctaagtcgggtgcatagattcttatcgaattcccttcttcctttcgtaacttcctcagttttgtccacggcatttgttccatgtgagttttagagtgaatcacggaccctatgcaactgatgtacattattattgtcatagtgaagttcgtgcaactgtgaatgatgt

SEQ ID NO: 12645 - protein, 355 aa, Zea mays subsp. mays
  peptide (1)..(355): Ceres Seq. ID no. 12351801
  misc_feature (12)..(307): Pfam Name: Protein of unknown function (DUF803) Pfam Description: Protein of unknown function (DUF803)
  misc_feature (2)..(320): Homolog of NCBI NO: 20161440 NR Description: B1065E10.15 [Oryza sativa (japonica
  misc_feature (12)..(307): Homolog of NCBI NO: 18399280 NR Description: expressed protein; protein id: At1g34470.1, by cDNA: 110782. [Arabidopsis thaliana] F12K21.21 [Arabidopsis thaliana]
  misc_feature (1)..(332): Homolog of NCBI NO: 18409942 NR Description: expressed protein; protein id: At1g71900.1, by cDNA: gi_15028240, supported by cDNA: gi_19310780 [Arabidopsis >gi|15028241|gb|AAK76709.1| unknown protein [Arabidopsis
  misc_feature (1)..(307): Homolog of NCBI NO: 25406128 NR Description: unknown protein F17M19.5 [imported] - Arabidopsis
  misc_feature (12)..(310): Homolog of NCBI NO: 30681265 NR Description: expressed protein [Arabidopsis thaliana]
  misc_feature (14)..(315): Homolog of NCBI NO: 26449939 NR Description: unknown protein [Arabidopsis thaliana]
  misc_feature (11)..(331): Homolog of NCBI NO: 15229534 NR Description: unknown protein; protein id: At3g23870.1 thaliana] >gi|9294655|dbj|BAB03004.1|
  misc_feature (11)..(307): Homolog of NCBI NO: 18414079 NR Description: expressed protein; protein id: At4g13800.1,
  misc_feature (12)..(307): Homolog of NCBI NO: 21593618 NR Description: unknown [Arabidopsis thaliana]
  misc_feature (19)..(307): Homolog of NCBI NO: 23428942 NR Description: NIPA2 [Gallus gallus]
MGGGGGSSGPELSTDNMKGIVLALLSSGFIGASFIIKKKGLRRAAVASGVRAGVGGYSYLMEPLWWVGMIIMIVGEIANFVAYAFAPAVLVTPLGALSIIVSAVLAHFILNERLHALGVLGCVMCIAGSVVIVIHAPQEQEITSVKEIWNMATQPAFLLYVASVIVIVFVLVFYFSPLYGQSNVLIYTAICSLMGSLSVMSVKALGTSLKLTFEGTNQLIYPETWFFMLVVATCVLTQMNYLNKALDTFNTAIVSPIYYVMFTTLTILASVIMFKDWSGQSPGSVISEICGLVVVLSGTILLHVTKDYERIPQSRSVYAPLSPSLTTRLNGELLKHVVDERTSDEEKALRRQEMY

SEQ ID NO: 12646 - protein, 339 aa, Zea mays subsp. mays
  peptide (1)..(339): Ceres Seq. ID no. 12351802
  misc_feature (1)..(291): Pfam Name: Protein of unknown function (DUF803) Pfam Description: Protein of unknown function (DUF803)
  misc_feature (1)..(304): Homolog of NCBI NO: 20161440 NR Description: B1065E10.15 [Oryza sativa (japonica
  misc_feature (1)..(291): Homolog of NCBI NO: 18399280 NR Description: expressed protein; protein id: At1g34470.1, by cDNA: 110782. [Arabidopsis thaliana] F12K21.21 [Arabidopsis thaliana]
  misc_feature (1)..(316): Homolog of NCBI NO: 18409942 NR Description: expressed protein; protein id: At1g71900.1, by cDNA: gi_15028240, supported by cDNA: gi_19310780 [Arabidopsis >gi|15028241|gb|AAK76709.1| unknown protein [Arabidopsis
  misc_feature (1)..(291): Homolog of NCBI NO: 25406128 NR Description: unknown protein F17M19.5 [imported] - Arabidopsis
  misc_feature (1)..(294): Homolog of NCBI NO: 30681265 NR Description: expressed protein [Arabidopsis thaliana]
  misc_feature (1)..(299): Homolog of NCBI NO: 26449939 NR Description: unknown protein [Arabidopsis thaliana]
  misc_feature (1)..(315): Homolog of NCBI NO: 15229534 NR Description: unknown protein; protein id: At3g23870.1 thaliana] >gi|9294655|dbj|BAB03004.1|
  misc_feature (1)..(291): Homolog of NCBI NO: 18414079 NR Description: expressed protein; protein id: At4g13800.1,
  misc_feature (1)..(291): Homolog of NCBI NO: 21593618 NR Description: unknown [Arabidopsis thaliana]
  misc_feature (3)..(291): Homolog of NCBI NO: 23428942 NR Description: NIPA2 [Gallus gallus]
MKGIVLALLSSGFIGASFIIKKKGLRRAAVASGVRAGVGGYSYLMEPLWWVGMIIMIVGEIANFVAYAFAPAVLVTPLGALSIIVSAVLAHFILNERLHALGVLGCVMCIAGSVVIVIHAPQEQEITSVKEIWNMATQPAFLLYVASVIVIVFVLVFYFSPLYGQSNVLIYTAICSLMGSLSVMSVKALGTSLKLTFEGTNQLIYPETWFFMLVVATCVLTQMNYLNKALDTFNTAIVSPIYYVMFTTLTILASVIMFKDWSGQSPGSVISEICGLVVVLSGTILLHVTKDYERIPQSRSVYAPLSPSLTTRLNGELLKHVVDERTSDEEKALRRQEMY

SEQ ID NO: 12647 - protein, 295 aa, Zea mays subsp. mays
  peptide (1)..(295): Ceres Seq. ID no. 12351803
  misc_feature (1)..(247): Pfam Name: Protein of unknown function (DUF803) Pfam Description: Protein of unknown function (DUF803)
  misc_feature (1)..(260): Homolog of NCBI NO: 20161440 NR Description: B1065E10.15 [Oryza sativa (japonica
  misc_feature (1)..(247): Homolog of NCBI NO: 18399280 NR Description: expressed protein; protein id: At1g34470.1, by cDNA: 110782. [Arabidopsis thaliana] F12K21.21 [Arabidopsis thaliana]
  misc_feature (1)..(272): Homolog of NCBI NO: 18409942 NR Description: expressed protein; protein id: At1g71900.1, by cDNA: gi_15028240, supported by cDNA: gi_19310780 [Arabidopsis >gi|15028241|gb|AAK76709.1| unknown protein [Arabidopsis
  misc_feature (1)..(247): Homolog of NCBI NO: 25406128 NR Description: unknown protein F17M19.5 [imported] - Arabidopsis
  misc_feature (1)..(250): Homolog of NCBI NO: 30681265 NR Description: expressed protein [Arabidopsis thaliana]
  misc_feature (1)..(255): Homolog of NCBI NO: 26449939 NR Description: unknown protein [Arabidopsis thaliana]
  misc_feature (1)..(271): Homolog of NCBI NO: 15229534 NR Description: unknown protein; protein id: At3g23870.1 thaliana] >gi|9294655|dbj|BAB03004.1|
  misc_feature (1)..(247): Homolog of NCBI NO: 18414079 NR Description: expressed protein; protein id: At4g13800.1,
  misc_feature (1)..(247): Homolog of NCBI NO: 21593618 NR Description: unknown [Arabidopsis thaliana]
  misc_feature (1)..(247): Homolog of NCBI NO: 23428942 NR Description: NIPA2 [Gallus gallus]
MEPLWWVGMIIMIVGEIANFVAYAFAPAVLVTPLGALSIIVSAVLAHFILNERLHALGVLGCVMCIAGSVVIVIHAPQEQEITSVKEIWNMATQPAFLLYVASVIVIVFVLVFYFSPLYGQSNVLIYTAICSLMGSLSVMSVKALGTSLKLTFEGTNQLIYPETWFFMLVVATCVLTQMNYLNKALDTFNTAIVSPIYYVMFTTLTILASVIMFKDWSGQSPGSVISEICGLVVVLSGTILLHVTKDYERIPQSRSVYAPLSPSLTTRLNGELLKHVVDERTSDEEKALRRQEMY

SEQ ID NO: 12648 - DNA, 1334 bp, Zea mays subsp. mays
  misc_feature (1)..(1334): Ceres Seq. ID no. 12369102
  misc_feature: MA Experiment ID: 108527 Result: Down-regulated in Transcription
  misc_feature: MA Experiment 108527 PARAMETER Experiment Name: Zm_5mM_NO_P Parameter: Age (day) Value: 8
  misc_feature: MA Experiment 108527 PARAMETER Experiment Name: Zm_5mM_NO_P Parameter: Organism Value: Zea mays
  misc_feature: MA Experiment 108527 PARAMETER Experiment Name: Zm_5mM_NO_P Parameter: Plant Line Value: 35A19
  misc_feature: MA Experiment 108527 PARAMETER Experiment Name: Zm_5mM_NO_P Parameter: Timepoint (hr) Value: 6
  misc_feature: MA Experiment 108527 PARAMETER Experiment Name: Zm_5mM_NO_P Parameter: Tissue Value: Aerial
  misc_feature: MA Experiment 108527 PARAMETER Experiment Name: Zm_5mM_NO_P Parameter: Treatment Value: 5mM NO vs. No Treatment
  misc_feature: MA Experiment ID: 108528 Result: Up-regulated in Transcription
  misc_feature: MA Experiment 108528 PARAMETER Experiment Name: Zm_Imbibed_Seeds_P Parameter: Age (day) Value: 5 vs. 2
  misc_feature: MA Experiment 108528 PARAMETER Experiment Name: Zm_Imbibed_Seeds_P Parameter: Organism Value: Zea mays
  misc_feature: MA Experiment 108528 PARAMETER Experiment Name: Zm_Imbibed_Seeds_P Parameter: Plant Line Value: 35A19
  misc_feature: MA Experiment 108528 PARAMETER Experiment Name: Zm_Imbibed_Seeds_P Parameter: Tissue Value: Aerial vs. Embryo
  misc_feature: MA Experiment ID: 108530 Result: Up-regulated in Transcription
  misc_feature: MA Experiment 108530 PARAMETER Experiment Name: Zm_Imbibed_Seeds_P Parameter: Age (day) Value: 6 vs. 2
  misc_feature: MA Experiment 108530 PARAMETER Experiment Name: Zm_Imbibed_Seeds_P Parameter: Organism Value: Zea mays
  misc_feature: MA Experiment 108530 PARAMETER Experiment Name: Zm_Imbibed_Seeds_P Parameter: Plant Line Value: 35A19
  misc_feature: MA Experiment 108530 PARAMETER Experiment Name: Zm_Imbibed_Seeds_P Parameter: Tissue Value: Aerial vs. Embryo
  misc_feature: MA Experiment ID: 108536 Result: Down-regulated in Transcription
  misc_feature: MA Experiment 108536 PARAMETER Experiment Name: Zm_Meristem_P Parameter: Age (day) Value: 8
  misc_feature: MA Experiment 108536 PARAMETER Experiment Name: Zm_Meristem_P Parameter: Organism Value: Zea mays
  misc_feature: MA Experiment 108536 PARAMETER Experiment Name: Zm_Meristem_P Parameter: Plant Line Value: 35A19
  misc_feature: MA Experiment 108536 PARAMETER Experiment Name: Zm_Meristem_P Parameter: Tissue Value: Shoot Meristem vs. Above Shoot Meristem
  misc_feature: MA Experiment ID: 108545 Result: Up-regulated in Transcription
  misc_feature: MA Experiment 108545 PARAMETER Experiment Name: Zm_Imbibed_Seeds_P Parameter: Age (day) Value: 3 vs. 2
  misc_feature: MA Experiment 108545 PARAMETER Experiment Name: Zm_Imbibed_Seeds_P Parameter: Organism Value: Zea mays
  misc_feature: MA Experiment 108545 PARAMETER Experiment Name: Zm_Imbibed_Seeds_P Parameter: Plant Line Value: 35A19
  misc_feature: MA Experiment 108545 PARAMETER Experiment Name: Zm_Imbibed_Seeds_P Parameter: Tissue Value: Aerial vs. Embryo
  misc_feature: MA Experiment ID: 108546 Result: Down-regulated in Transcription
  misc_feature: MA Experiment 108546 PARAMETER Experiment Name: Zm_Imbibed_Seeds_P Parameter: Age (day) Value: 3 vs. 2
  misc_feature: MA Experiment 108546 PARAMETER Experiment Name: Zm_Imbibed_Seeds_P Parameter: Organism Value: Zea mays
  misc_feature: MA Experiment 108546 PARAMETER Experiment Name: Zm_Imbibed_Seeds_P Parameter: Plant Line Value: 35A19
  misc_feature: MA Experiment 108546 PARAMETER Experiment Name: Zm_Imbibed_Seeds_P Parameter: Tissue Value: Roots vs. Embryo
  misc_feature: MA Experiment ID: 108547 Result: Up-regulated in Transcription
  misc_feature: MA Experiment 108547 PARAMETER Experiment Name: Zm_Imbibed_Seeds_P Parameter: Age (day) Value: 4 vs. 2
  misc_feature: MA Experiment 108547 PARAMETER Experiment Name: Zm_Imbibed_Seeds_P Parameter: Organism Value: Zea mays
  misc_feature: MA Experiment 108547 PARAMETER Experiment Name: Zm_Imbibed_Seeds_P Parameter: Plant Line Value: 35A19
  misc_feature: MA Experiment 108547 PARAMETER Experiment Name: Zm_Imbibed_Seeds_P Parameter: Tissue Value: Aerial vs. Embryo
  misc_feature: MA Experiment ID: 20000626 Result: Down-regulated in Transcription
  misc_feature: MA Experiment 20000626 PARAMETER Experiment Name: Zm_Herbicide-Treatments_P Parameter: Timepoint (hr) Value: 12
  misc_feature: MA Experiment 20000626 PARAMETER Experiment Name: Zm_Herbicide-Treatments_P Parameter: Tissue Value: Aerial
  misc_feature: MA Experiment 20000626 PARAMETER Experiment Name: Zm_Herbicide-Treatments_P Parameter: Treatment Value: Roundup vs. No Treatment
  misc_feature: MA Experiment ID: 20000630 Result: Down-regulated in Transcription
  misc_feature: MA Experiment 20000630 PARAMETER Experiment Name: Zm_Herbicide-Treatments_P Parameter: Timepoint (hr) Value: 4
  misc_feature: MA Experiment 20000630 PARAMETER Experiment Name: Zm_Herbicide-Treatments_P Parameter: Tissue Value: Aerial
  misc_feature: MA Experiment 20000630 PARAMETER Experiment Name: Zm_Herbicide-Treatments_P Parameter: Treatment Value: Roundup vs. No Treatment
atcttccgagatttgtctgcgcccctgcggcgcgcatggcgccacgactgaccgtggccttgggcggcgctcgggcatgagtacatggcgctcggtggcctcgcgtcgcgttactcacccaccggcaccgcgccacggccgcgttcgtctcaacaggagccgatggccactctcgcgccacggccacatatcctcctcggcttgacaaggccgcagcccatagcgcttcgtgcctgcgccgccttctcccgctcccgccacgcgccagtcccaccgcgggccgcgcagccgcggcgcgtcttcctcggccttggcctgccttcatcgaccaggccacccgcatggcctccggcggcacctcgtcccgctctttcgttgccggagcgcggccgaggcaaggcgtttccccagtcgagcagattctcaagaatgtcgagtggccagatgagttccctttcaagcctgaggacttcagccgcttcgacgaatcatcagatactctgttctactcggttccacgttttgtcactcacattgatgaccaagcaatccaagctctcacagagtactattctgaagttcttcctccaagtaatactcctggggtggccattctggacatgtgcagcagctgggtcagccattatcctcccggttacagacaagagaagatcgtggggatgggtatgaatgaagatgaactgaaaaagaactcggtactgactcagtatgtcgtgcaagacctcaatgtgaacccaaagcttcctttcgaagataacacttttgatgttatcaccaatgtggttagtgtagattaccttacaaagccaatagatgtttttaaggagatgcgacgaatactcaagccaagcggccttgccataatgagcttttcaaaccggtgcttttggacaaaagctatatctatatggacctcaactggtgatgctgatcatgcatggatagttggtgcttacttccattatgttggaggttttgaacctccccaggcacttgatatatctcctaatccaggacgaactgacccaatgtatgttgtatgctcgagaaagaaaatagggtaactaaacaatatatttggcaagtgctatcaagaaacaaatagaaggaaaaatacaagaagcaagttgtttggccctgatcgcaggacctattggtgagctgatgtttccgtgagtaatgtaacgacagaaaaaagaagcaactactacataaactatttatagaagcggcagattcacttcataggttgtagcaactgtctttactaaaagtgtgtttggtttgaggaatgaagtgatccatcttcttcc

SEQ ID NO: 12649 - protein, 247 aa, Zea mays subsp. mays
  peptide (1)..(247): Ceres Seq. ID no. 12369103
  misc_feature (1)..(246): Homolog of NCBI NO: 34910520 NR Description: B1142C05.17 [Oryza sativa (japonica
  misc_feature (3)..(244): Homolog of NCBI NO: 14030675 NR Description: AT4g29590/T16L4_100 [Arabidopsis thaliana]
  misc_feature (3)..(244): Homolog of NCBI NO: 15233624 NR Description: putative protein; protein id: At4g29590.1
  misc_feature (3)..(244): Homolog of NCBI NO: 21536833 NR Description: unknown [Arabidopsis thaliana]
  misc_feature (41)..(246): Homolog of NCBI NO: 22970815 NR Description: hypothetical protein [Chloroflexus aurantiacus]
  misc_feature (40)..(245): Homolog of NCBI NO: 17232182 NR Description: hypothetical protein [Nostoc sp. PCC 7120]
  misc_feature (40)..(225): Homolog of NCBI NO: 23129867 NR Description: hypothetical protein [Nostoc punctiforme]
  misc_feature (41)..(245): Homolog of NCBI NO: 22298320 NR Description: ORF_ID:tlr0778~hypothetical protein
  misc_feature (42)..(229): Homolog of NCBI NO: 15232158 NR Description: hypothetical protein; protein id: At3g01660.1 thaliana] >gi|6016723|gb|AAF01549.1|AC009325_19 hypothetical
  misc_feature (45)..(216): Homolog of NCBI NO: 23042398 NR Description: hypothetical protein [Trichodesmium erythraeum
MASGGTSSRSFVAGARPRQGVSPVEQILKNVEWPDEFPFKPEDFSRFDESSDTLFYSVPRFVTHIDDQAIQALTEYYSEVLPPSNTPGVAILDMCSSWVSHYPPGYRQEKIVGMGMNEDELKKNSVLTQYVVQDLNVNPKLPFEDNTFDVITNVVSVDYLTKPIDVFKEMRRILKPSGLAIMSFSNRCFWTKAISIWTSTGDADHAWIVGAYFHYVGGFEPPQALDISPNPGRTDPMYVVCSRKKIG

SEQ ID NO: 12650 - protein, 201 aa, Zea mays subsp. mays
  peptide (1)..(201): Ceres Seq. ID no. 12369104
  misc_feature (27)..(77): Homolog of NCBI NO: 34910520 NR Description: B1142C05.17 [Oryza sativa (japonica
MALGGLASRYSPTGTAPRPRSSQQEPMATLAPRPHILLGLTRPQPIALRACAAFSRSRHAPVPPRAAQPRRVFLGLGLPSSTRPPAWPPAAPRPALSLPERGRGKAFPQSSRFSRMSSGQMSSLSSLRTSAASTNHQILCSTRFHVLSLTLMTKQSKLSQSTILKFFLQVILLGWPFWTCAAAGSAIILPVTDKRRSWGWV

SEQ ID NO: 12651 - protein, 175 aa, Zea mays subsp. mays
  peptide (1)..(175): Ceres Seq. ID no. 12369105
  misc_feature (1)..(51): Homolog of NCBI NO: 34910520 NR Description: B1142C05.17 [Oryza sativa (japonica
MATLAPRPHILLGLTRPQPIALRACAAFSRSRHAPVPPRAAQPRRVFLGLGLPSSTRPPAWPPAAPRPALSLPERGRGKAFPQSSRFSRMSSGQMSSLSSLRTSAASTNHQILCSTRFHVLSLTLMTKQSKLSQSTILKFFLQVILLGWPFWTCAAAGSAIILPVTDKRRSWGWV

SEQ ID NO: 12652 - DNA, 1620 bp, Zea mays subsp. mays
  misc_feature (1)..(1620): Ceres Seq. ID no. 12367514
  misc_feature: MA Experiment ID: 108522 Result: Down-regulated in Transcription
  misc_feature: MA Experiment 108522 PARAMETER Experiment Name: Zm_42deg_Heat_P Parameter: Age (day) Value: 8
  misc_feature: MA Experiment 108522 PARAMETER Experiment Name: Zm_42deg_Heat_P Parameter: Organism Value: Zea mays
  misc_feature: MA Experiment 108522 PARAMETER Experiment Name: Zm_42deg_Heat_P Parameter: Plant Line Value: 35A19
  misc_feature: MA Experiment 108522 PARAMETER Experiment Name: Zm_42deg_Heat_P Parameter: Temperature (deg C) Value: 42 vs. 22
  misc_feature: MA Experiment 108522 PARAMETER Experiment Name: Zm_42deg_Heat_P Parameter: Timepoint (hr) Value: 1
  misc_feature: MA Experiment 108522 PARAMETER Experiment Name: Zm_42deg_Heat_P Parameter: Tissue Value: Aerial
  misc_feature: MA Experiment ID: 108527 Result: Down-regulated in Transcription
  misc_feature: MA Experiment 108527 PARAMETER Experiment Name: Zm_5mM_NO_P Parameter: Age (day) Value: 8
  misc_feature: MA Experiment 108527 PARAMETER Experiment Name: Zm_5mM_NO_P Parameter: Organism Value: Zea mays
  misc_feature: MA Experiment 108527 PARAMETER Experiment Name: Zm_5mM_NO_P Parameter: Plant Line Value: 35A19
  misc_feature: MA Experiment 108527 PARAMETER Experiment Name: Zm_5mM_NO_P Parameter: Timepoint (hr) Value: 6
  misc_feature: MA Experiment 108527 PARAMETER Experiment Name: Zm_5mM_NO_P Parameter: Tissue Value: Aerial
  misc_feature: MA Experiment 108527 PARAMETER Experiment Name: Zm_5mM_NO_P Parameter: Treatment Value: 5mM NO vs. No Treatment
  misc_feature: MA Experiment ID: 108559 Result: Down-regulated in Transcription
  misc_feature: MA Experiment 108559 PARAMETER Experiment Name: Zm_5mM_NO_P Parameter: Age (day) Value: 8
  misc_feature: MA Experiment 108559 PARAMETER Experiment Name: Zm_5mM_NO_P Parameter: Organism Value: Zea mays
  misc_feature: MA Experiment 108559 PARAMETER Experiment Name: Zm_5mM_NO_P Parameter: Plant Line Value: 35A19
  misc_feature: MA Experiment 108559 PARAMETER Experiment Name: Zm_5mM_NO_P Parameter: Timepoint (hr) Value: 12
  misc_feature: MA Experiment 108559 PARAMETER Experiment Name: Zm_5mM_NO_P Parameter: Tissue Value: Aerial
  misc_feature: MA Experiment 108559 PARAMETER Experiment Name: Zm_5mM_NO_P Parameter: Treatment Value: 5mM NO vs. No Treatment
aatggccgcctcctccccttccacctcctcccctaatggcagatgctaggcggcggcgcccctcttgagaagtgaaagggaaagatttgttttgccgcccgcgccctgctcaggcgctccgcctcggtcgggccacacaaggtagcgccttccgcctcgttgcctgacccattcctgtttcgttcgaagcactgaagcagccccagaccgacgccaggcgcccaggccagtggtcgacgcctgtggtgagctgataggcgatgtcgtcaccgtctccggtgctggcaagggctgcgcgtctcacgtgtaggttgtgatctttctgcccagagatgtgcgatttgtcttcgcttgatctgagtgacagtaaaacggagaccggctagtgttgttcctgaaacctgttgatttatggggagccagacaatcgcatcacaggctgggggaggtggaagaggcatgggtagtagtggtggtgccggtgcagcgcaacgcgggcagatgcagagtctggcaagacaagggtctctgtataaccttacccttgatgaggtgcagagccatttgggagaacccctacacagcatgaaccttgaggagctgctgaagagtgtctttcctgatgacctggaccctgatggtggcactaccagccaatatgagcagagttcgggcctcttgcgacagggaagtatcacaatgccgcctgagctcagcaggagaactgtggacgaggtgtggaaggacatccaggatgcaccaaacagaaatgttggggagagtggtcggcggaagcgggagcggcagccaacgcttggagagatgacgcttgaggatttcttggtgaaagctggggttgtcgccgaaggatatctgaaggacttgaatggcataggcagtgtggaacaggttggtagcactggggctgcgggtttgacagcaggggcacaatggttagaccactatcagcagcggattacagctatcgagccccatcagcacaggcaacatagtttgccaggtgcttacataccgggtcagttaagccttcagtccctgaatgttggaccaagtgctattttggagtcatactctgatggccacatttcttcaccgatgatgggtgcactttctgattctccgatgcctggtagaaagcgtggttccccaggagatgtggctgataagttggtggagagaaggcagaagaggatgatcaagaatagggagtcagctgctcgttcaagggctaggaagcaggcatacactaatgaactggaaaacaaggtttctcgattagaagaggagaataagaagctaaccacgttaaaggagttggaaaatatacttttctctgagcctcttccggaacccaagtaccaactgaggagaaccggctcagcgactttctgattgtatgcagaatatcttgttttgctgtaggttgtaagtcctgtagcttactagcaggagccgagcatgtgctgtccgaggccttgctaccagtatagtatgtaaaatcttcaggacacatgtaggtggtcggagcttgtttacatggtgtgacttaacagatggatacatataactatgagaagtatgggagccctttctttggtg

SEQ ID NO: 12653 - protein, 333 aa, Zea mays subsp. mays
  peptide (1)..(333): Ceres Seq. ID no. 12367515
  misc_feature (258)..(316): Pfam Name: bZIP transcription factor Pfam Description: bZIP transcription factor
  misc_feature (6)..(308): Homolog of NCBI NO: 34909206 NR Description: putative promoter-binding factor-like protein
  misc_feature (32)..(187): Homolog of NCBI NO: 26451276 NR Description: putative bZIP transcription factor AtbZIP12 /
  misc_feature (236)..(332): Homolog of NCBI NO: 26451276 NR Description: putative bZIP transcription factor AtbZIP12 /
  misc_feature (32)..(187): Homolog of NCBI NO: 18405590 NR Description: bZIP family transcription factor; protein id: supported by cDNA: 114632., supported by cDNA: gi_13346156 thaliana] >gi|13346157|gb|AAK19602.1|AF334209_1 bZIP putative
  misc_feature (236)..(332): Homolog of NCBI NO: 18405590 NR Description: bZIP family transcription factor; protein id: supported by cDNA: 114632., supported by cDNA: gi_13346156 thaliana] >gi|13346157|gb|AAK19602.1|AF334209_1 bZIP putative
  misc_feature (53)..(187): Homolog of NCBI NO: 21694632 NR Description: basic leucine zipper transcription factor
  misc_feature (236)..(332): Homolog of NCBI NO: 21694632 NR Description: basic leucine zipper transcription factor
  misc_feature (59)..(187): Homolog of NCBI NO: 7487620 NR Description: probable bZIP transcription factor [imported] -
  misc_feature (236)..(332): Homolog of NCBI NO: 7487620 NR Description: probable bZIP transcription factor [imported] -
  misc_feature (82)..(333): Homolog of NCBI NO: 7489325 NR Description: Dc3 promoter-binding factor-3 - common sunflower
MGSQTIASQAGGGGRGMGSSGGAGAAQRGQMQSLARQGSLYNLTLDEVQSHLGEPLHSMNLEELLKSVFPDDLDPDGGTTSQYEQSSGLLRQGSITMPPELSRRTVDEVWKDIQDAPNRNVGESGRRKRERQPTLGEMTLEDFLVKAGVVAEGYLKDLNGIGSVEQVGSTGAAGLTAGAQWLDHYQQRITAIEPHQHRQHSLPGAYIPGQLSLQSLNVGPSAILESYSDGHISSPMMGALSDSPMPGRKRGSPGDVADKLVERRQKRMIKNRESAARSRARKQAYTNELENKVSRLEEENKKLTTLKELENILFSEPLPEPKYQLRRTGSATF

SEQ ID NO: 12654 - protein, 317 aa, Zea mays subsp. mays
  peptide (1)..(317): Ceres Seq. ID no. 12367516
  misc_feature (242)..(300): Pfam Name: bZIP transcription factor Pfam Description: bZIP transcription factor
  misc_feature (1)..(292): Homolog of NCBI NO: 34909206 NR Description: putative promoter-binding factor-like protein
  misc_feature (16)..(171): Homolog of NCBI NO: 26451276 NR Description: putative bZIP transcription factor AtbZIP12 /
  misc_feature (220)..(316): Homolog of NCBI NO: 26451276 NR Description: putative bZIP transcription factor AtbZIP12 /
  misc_feature (16)..(171): Homolog of NCBI NO: 18405590 NR Description: bZIP family transcription factor; protein id: supported by cDNA: 114632., supported by cDNA: gi_13346156 thaliana] >gi|13346157|gb|AAK19602.1|AF334209_1 bZIP putative
  misc_feature (220)..(316): Homolog of NCBI NO: 18405590 NR Description: bZIP family transcription factor; protein id: supported by cDNA: 114632., supported by cDNA: gi_13346156 thaliana] >gi|13346157|gb|AAK19602.1|AF334209_1 bZIP putative
  misc_feature (37)..(171): Homolog of NCBI NO: 21694632 NR Description: basic leucine zipper transcription factor
  misc_feature (220)..(316): Homolog of NCBI NO: 21694632 NR Description: basic leucine zipper transcription factor
  misc_feature (43)..(171): Homolog of NCBI NO: 7487620 NR Description: probable bZIP transcription factor [imported] -
  misc_feature (220)..(316): Homolog of NCBI NO: 7487620 NR Description: probable bZIP transcription factor [imported] -
  misc_feature (66)..(317): Homolog of NCBI NO: 7489325 NR Description: Dc3 promoter-binding factor-3 - common sunflower
MGSSGGAGAAQRGQMQSLARQGSLYNLTLDEVQSHLGEPLHSMNLEELLKSVFPDDLDPDGGTTSQYEQSSGLLRQGSITMPPELSRRTVDEVWKDIQDAPNRNVGESGRRKRERQPTLGEMTLEDFLVKAGVVAEGYLKDLNGIGSVEQVGSTGAAGLTAGAQWLDHYQQRITAIEPHQHRQHSLPGAYIPGQLSLQSLNVGPSAILESYSDGHISSPMMGALSDSPMPGRKRGSPGDVADKLVERRQKRMIKNRESAARSRARKQAYTNELENKVSRLEEENKKLTTLKELENILFSEPLPEPKYQLRRTGSATF

SEQ ID NO: 12655 - protein, 303 aa, Zea mays subsp. mays
  peptide (1)..(303): Ceres Seq. ID no. 12367517
  misc_feature (228)..(286): Pfam Name: bZIP transcription factor Pfam Description: bZIP transcription factor
  misc_feature (1)..(278): Homolog of NCBI NO: 34909206 NR Description: putative promoter-binding factor-like protein
  misc_feature (2)..(157): Homolog of NCBI NO: 26451276 NR Description: putative bZIP transcription factor AtbZIP12 /
  misc_feature (206)..(302): Homolog of NCBI NO: 26451276 NR Description: putative bZIP transcription factor AtbZIP12 /
  misc_feature (2)..(157): Homolog of NCBI NO: 18405590 NR Description: bZIP family transcription factor; protein id: supported by cDNA: 114632., supported by cDNA: gi_13346156 thaliana] >gi|13346157|gb|AAK19602.1|AF334209_1 bZIP putative
  misc_feature (206)..(302): Homolog of NCBI NO: 18405590 NR Description: bZIP family transcription factor; protein id: supported by cDNA: 114632., supported by cDNA: gi_13346156 thaliana] >gi|13346157|gb|AAK19602.1|AF334209_1 bZIP putative
  misc_feature (23)..(157): Homolog of NCBI NO: 21694632 NR Description: basic leucine zipper transcription factor
  misc_feature (206)..(302): Homolog of NCBI NO: 21694632 NR Description: basic leucine zipper transcription factor
  misc_feature (29)..(157): Homolog of NCBI NO: 7487620 NR Description: probable bZIP transcription factor [imported] -
  misc_feature (206)..(302): Homolog of NCBI NO: 7487620 NR Description: probable bZIP transcription factor [imported] -
  misc_feature (52)..(303): Homolog of NCBI NO: 7489325 NR Description: Dc3 promoter-binding factor-3 - common sunflower
MQSLARQGSLYNLTLDEVQSHLGEPLHSMNLEELLKSVFPDDLDPDGGTTSQYEQSSGLLRQGSITMPPELSRRTVDEVWKDIQDAPNRNVGESGRRKRERQPTLGEMTLEDFLVKAGVVAEGYLKDLNGIGSVEQVGSTGAAGLTAGAQWLDHYQQRITAIEPHQHRQHSLPGAYIPGQLSLQSLNVGPSAILESYSDGHISSPMMGALSDSPMPGRKRGSPGDVADKLVERRQKRMIKNRESAARSRARKQAYTNELENKVSRLEEENKKLTTLKELENILFSEPLPEPKYQLRRTGSATF

SEQ ID NO: 12656 - DNA, 1245 bp, Zea mays subsp. mays
  misc_feature (1)..(1245): Ceres Seq. ID no. 12343927
  misc_feature: MA Experiment ID: 108527 Result: Up-regulated in Transcription
  misc_feature: MA Experiment 108527 PARAMETER Experiment Name: Zm_5mM_NO_P Parameter: Age (day) Value: 8
  misc_feature: MA Experiment 108527 PARAMETER Experiment Name: Zm_5mM_NO_P Parameter: Organism Value: Zea mays
  misc_feature: MA Experiment 108527 PARAMETER Experiment Name: Zm_5mM_NO_P Parameter: Plant Line Value: 35A19
  misc_feature: MA Experiment 108527 PARAMETER Experiment Name: Zm_5mM_NO_P Parameter: Timepoint (hr) Value: 6
  misc_feature: MA Experiment 108527 PARAMETER Experiment Name: Zm_5mM_NO_P Parameter: Tissue Value: Aerial
  misc_feature: MA Experiment 108527 PARAMETER Experiment Name: Zm_5mM_NO_P Parameter: Treatment Value: 5mM NO vs. No Treatment
  misc_feature: MA Experiment ID: 108689 Result: Down-regulated in Transcription
  misc_feature: MA Experiment 108689 PARAMETER Experiment Name: Zm_Drought_Roots_P Parameter: Age (day) Value: 9
  misc_feature: MA Experiment 108689 PARAMETER Experiment Name: Zm_Drought_Roots_P Parameter: Organism Value: Zea mays
  misc_feature: MA Experiment 108689 PARAMETER Experiment Name: Zm_Drought_Roots_P Parameter: Plant Line Value: 35A19
  misc_feature: MA Experiment 108689 PARAMETER Experiment Name: Zm_Drought_Roots_P Parameter: Timepoint (hr) Value: 24
  misc_feature: MA Experiment 108689 PARAMETER Experiment Name: Zm_Drought_Roots_P Parameter: Tissue Value: Roots
  misc_feature: MA Experiment 108689 PARAMETER Experiment Name: Zm_Drought_Roots_P Parameter: Treatment Value: Drought vs. No Drought
  misc_feature: MA Experiment ID: 20000492 Result: Down-regulated in Transcription
  misc_feature: MA Experiment 20000492 PARAMETER Experiment Name: Zm_Hybrid_Seed_Dev_P Parameter: DAP Value: 12
  misc_feature: MA Experiment 20000492 PARAMETER Experiment Name: Zm_Hybrid_Seed_Dev_P Parameter: Organism Value: Zea mays
  misc_feature: MA Experiment 20000492 PARAMETER Experiment Name: Zm_Hybrid_Seed_Dev_P Parameter: Plant Line Value: 35A19
  misc_feature: MA Experiment 20000492 PARAMETER Experiment Name: Zm_Hybrid_Seed_Dev_P Parameter: Tissue Value: Fert Kernel vs. Unfert Floret
aaaacgttatgtttattcgatttcgtgtcctgtccgtttgacgaccgagccctgccccccttttccagtttccttctcccttcctgccgctgcggcggtggcggcaacgactcgcgcgggccggtcctaggttctcccggagcggttcggcgggatgggcacgccggagttccccaacctgggaaagcactgcagcgtcggagactgcaaccagatcgacttcctccccttcacctgcgaccgctgcgaccatgtcttttgccttgatcaccgaagttatacatcacaccaatgcccaaatgcaaacatgaaagacgtcactgtcctcatctgcccactctgtgctaaaggtgttcgcctcaatccaagtgaagacccaaatatcacctgggatactcatgttaacactgattgtgatccatcaaattaccaaaaagtgatgaagaaaaagaaatgccctgttcctgggtgcagagagacactgacattttccaacaccatcagatgcaaagattgcaccagagaacactgcctaaagcacagatttgggcctgatcataagtgcccaggaccaagaaaagtggattctggctttccctttgtaagcatgctaaggagaagtcagaaagcggagacacgctcaaatagcagtaacaacaatggttcttcgtggtggagctccagtcttgtgaatgcagcaacgaatttcaaatcatcagccgaagctggaatgcagaagctgagcaccgtgactagccaagccttccagaaggctaaggatgggatcgccccaaatagcagcagcagcagtggtgaccttgtggagcaatgtgttcactgcccagcaagattttccaccgtgggggccttaattgaacatgttgagaaatcccaccagatcaactcacaaccaagtcatggccgagtgacgattgatgtttgcccaaaatgcagcaaggcgttccgggatcctgtgttgcttgtggagcatgttgagaaggagcatggaggaacgtcaagagtgtagtgtaaagcttcgtgtgtgctcttaacctttgtaatgtgtaacttttcgttaccttttctcatttcatcaatttgattatactctacacttttgggctcaacatttgcccacaggacaagtatattacgctggattgaaggcaaagcagccattgtccatcattatagaaactgaagtaagatttgttaagaaaatgttaatatctgtcgcaactggtg

SEQ ID NO: 12657 - protein, 290 aa, Zea mays subsp. mays
  peptide (1)..(290): Ceres Seq. ID no. 12343928
  misc_feature (101)..(145): Pfam Name: AN1-like Zinc finger Pfam Description: AN1-like Zinc finger
  misc_feature (1)..(289): Homolog of NCBI NO: 33146779 NR Description: putative arsenite inducible RNA associated
  misc_feature (1)..(289): Homolog of NCBI NO: 30688811 NR Description: zinc finger protein (PMZ) -related [Arabidopsis >gi|17529076|gb|AAL38748.1| unknown protein [Arabidopsis >gi|20465575|gb|AAM20270.1| unknown protein [Arabidopsis
  misc_feature (1)..(252): Homolog of NCBI NO: 15230311 NR Description: putative protein; protein id: At3g57480.1
  misc_feature (1)..(137): Homolog of NCBI NO: 15232930 NR Description: zinc finger protein (PMZ), putative; protein id:
  misc_feature (5)..(225): Homolog of NCBI NO: 33416395 NR Description: Unknown (protein for MGC:66295) [Danio rerio]
  misc_feature (3)..(216): Homolog of NCBI NO: 31207325 NR Description: ENSANGP00000015397 [Anopheles gambiae]
  misc_feature (5)..(163): Homolog of NCBI NO: 24581431 NR Description: CG12795-PA [Drosophila melanogaster]
  misc_feature (5)..(161): Homolog of NCBI NO: 20270357 NR Description: hypothetical protein BC018415 [Homo sapiens]
  misc_feature (5)..(161): Homolog of NCBI NO: 21749694 NR Description: unnamed protein product [Homo sapiens]
  misc_feature (5)..(207): Homolog of NCBI NO: 21312112 NR Description: RIKEN cDNA 1110060O18 [Mus musculus]
MGTPEFPNLGKHCSVGDCNQIDFLPFTCDRCDHVFCLDHRSYTSHQCPNANMKDVTVLICPLCAKGVRLNPSEDPNITWDTHVNTDCDPSNYQKVMKKKKCPVPGCRETLTFSNTIRCKDCTREHCLKHRFGPDHKCPGPRKVDSGFPFVSMLRRSQKAETRSNSSNNNGSSWWSSSLVNAATNFKSSAEAGMQKLSTVTSQAFQKAKDGIAPNSSSSSGDLVEQCVHCPARFSTVGALIEHVEKSHQINSQPSHGRVTIDVCPKCSKAFRDPVLLVEHVEKEHGGTSRV

SEQ ID NO: 12658 - protein, 239 aa, Zea mays subsp. mays
  peptide (1)..(239): Ceres Seq. ID no. 12343929
  misc_feature (50)..(94): Pfam Name: AN1-like Zinc finger Pfam Description: AN1-like Zinc finger
  misc_feature (1)..(238): Homolog of NCBI NO: 33146779 NR Description: putative arsenite inducible RNA associated
  misc_feature (1)..(238): Homolog of NCBI NO: 30688811 NR Description: zinc finger protein (PMZ) -related [Arabidopsis >gi|17529076|gb|AAL38748.1| unknown protein [Arabidopsis >gi|20465575|gb|AAM20270.1| unknown protein [Arabidopsis
  misc_feature (1)..(201): Homolog of NCBI NO: 15230311 NR Description: putative protein; protein id: At3g57480.1
  misc_feature (1)..(86): Homolog of NCBI NO: 15232930 NR Description: zinc finger protein (PMZ), putative; protein id:
  misc_feature (1)..(174): Homolog of NCBI NO: 33416395 NR Description: Unknown (protein for MGC:66295) [Danio rerio]
  misc_feature (1)..(165): Homolog of NCBI NO: 31207325 NR Description: ENSANGP00000015397 [Anopheles gambiae]
  misc_feature (1)..(112): Homolog of NCBI NO: 24581431 NR Description: CG12795-PA [Drosophila melanogaster]
  misc_feature (1)..(110): Homolog of NCBI NO: 20270357 NR Description: hypothetical protein BC018415 [Homo sapiens]
  misc_feature (1)..(110): Homolog of NCBI NO: 21749694 NR Description: unnamed protein product [Homo sapiens]
  misc_feature (1)..(156): Homolog of NCBI NO: 21312112 NR Description: RIKEN cDNA 1110060O18 [Mus musculus]
MKDVTVLICPLCAKGVRLNPSEDPNITWDTHVNTDCDPSNYQKVMKKKKCPVPGCRETLTFSNTIRCKDCTREHCLKHRFGPDHKCPGPRKVDSGFPFVSMLRRSQKAETRSNSSNNNGSSWWSSSLVNAATNFKSSAEAGMQKLSTVTSQAFQKAKDGIAPNSSSSSGDLVEQCVHCPARFSTVGALIEHVEKSHQINSQPSHGRVTIDVCPKCSKAFRDPVLLVEHVEKEHGGTSRV

SEQ ID NO: 12659 - protein, 195 aa, Zea mays subsp. mays
  peptide (1)..(195): Ceres Seq. ID no. 12343930
  misc_feature (6)..(50): Pfam Name: AN1-like Zinc finger Pfam Description: AN1-like Zinc finger
  misc_feature (1)..(194): Homolog of NCBI NO: 33146779 NR Description: putative arsenite inducible RNA associated
  misc_feature (1)..(194): Homolog of NCBI NO: 30688811 NR Description: zinc finger protein (PMZ) -related [Arabidopsis >gi|17529076|gb|AAL38748.1| unknown protein [Arabidopsis >gi|20465575|gb|AAM20270.1| unknown protein [Arabidopsis
  misc_feature (1)..(157): Homolog of NCBI NO: 15230311 NR Description: putative protein; protein id: At3g57480.1
  misc_feature (1)..(42): Homolog of NCBI NO: 15232930 NR Description: zinc finger protein (PMZ), putative; protein id:
  misc_feature (1)..(130): Homolog of NCBI NO: 33416395 NR Description: Unknown (protein for MGC:66295) [Danio rerio]
  misc_feature (1)..(121): Homolog of NCBI NO: 31207325 NR Description: ENSANGP00000015397 [Anopheles gambiae]
  misc_feature (1)..(68): Homolog of NCBI NO: 24581431 NR Description: CG12795-PA [Drosophila melanogaster]
  misc_feature (1)..(66): Homolog of NCBI NO: 20270357 NR Description: hypothetical protein BC018415 [Homo sapiens]
  misc_feature (1)..(66): Homolog of NCBI NO: 21749694 NR Description: unnamed protein product [Homo sapiens]
  misc_feature (1)..(112): Homolog of NCBI NO: 21312112 NR Description: RIKEN cDNA 1110060O18 [Mus musculus]
MKKKKCPVPGCRETLTFSNTIRCKDCTREHCLKHRFGPDHKCPGPRKVDSGFPFVSMLRRSQKAETRSNSSNNNGSSWWSSSLVNAATNFKSSAEAGMQKLSTVTSQAFQKAKDGIAPNSSSSSGDLVEQCVHCPARFSTVGALIEHVEKSHQINSQPSHGRVTIDVCPKCSKAFRDPVLLVEHVEKEHGGTSRV

SEQ ID NO: 12660 - DNA, 1231 bp, Zea mays subsp. mays
  misc_feature (1)..(1231): Ceres Seq. ID no. 12344599
  misc_feature: MA Experiment ID: 108687 Result: Up-regulated in Transcription
  misc_feature: MA Experiment 108687 PARAMETER Experiment Name: Zm_Embryos-Flowers__P Parameter: Tissue Value: Embryo vs. Aerial+
  misc_feature: MA Experiment ID: 20000535 Result: Up-regulated in Transcription
  misc_feature: MA Experiment 20000535 PARAMETER Experiment Name: Zm_Hybrid_Seed_Dev_P Parameter: DAP Value: 30 vs. 12
  misc_feature: MA Experiment 20000535 PARAMETER Experiment Name: Zm_Hybrid_Seed_Dev_P Parameter: Organism Value: Zea mays
  misc_feature: MA Experiment 20000535 PARAMETER Experiment Name: Zm_Hybrid_Seed_Dev_P Parameter: Plant Line Value: 35A19
  misc_feature: MA Experiment 20000535 PARAMETER Experiment Name: Zm_Hybrid_Seed_Dev_P Parameter: Tissue Value: Embryo vs. Unfert Floret
agagttatgttcactccacaagacaatcacactagagtactggacggagtcgaggagcaggcgacaccttcaccgcttcggtaacggatcgacaggcgacagctcacagctggcggtggtttggctcggggacggggtgcggcggcctccgcgagcagttcggcagcgacacggcgcggggggtggggcgccttgctggctggtgtagcgtagtgcggggccacaacgaggaagcggtggcatccagcaggcaccatcagaaaaccacatggctcggcaaccttggagcaataatggccatagaaattccccttcaaattcattagatggaggagttcctggacccatgcctctggtccctttccaggaggaacttgcagttggttgtgaagagattcgtagaattgctgctgataatactcttgtgctagaggatattctgggccttaggcaagaattagctgtcattgaagacgagatccatatacttgccaaacaaaccattcccagacttcgtgttgataatgaaatggaatacagggatattatccagggaggcatgaagttagaggaacagatgcatgctcttaaacttatcaaggaagaagtgttggtcctaagttctgaaaagatggagttggaagctttgtgcaaagagctatctgtgaaggttcagtcattgtacagggagctggagcagatccaatccgagaacaagcagatacctgctataagagaagggttgcatgatatacaagaggagatttcgagggccaggatggcatacgagcatgagaaacgtgcaaaagttgagcttcttgaggagagtcaggccatagagagtgattttatcaacataaaaatggaagcacagagattgcggacagagctggagaagaggaggtctggtgtgttcaagcatcatgcatttggctcatactataaaagatagagcatggcattgcatcctccaactgataggtgggcgtcacaaagcgtagctaagggtttggtgtctattagagaaattaatcgaactcaggagtcaagaccaaatgcgtttgtctttcggatgagcagctgacatttatttgcgaacacgttgctattattatatctcattattaagtaggagtacaaattggacgattgaaagaagaatattatcaatttggtctttattgtactcctacttattttttctctcgaaaagtactcctacttatttttg

SEQ ID NO: 12661 - protein, 227 aa, Zea mays subsp. mays
  peptide (1)..(227): Ceres Seq. ID no. 12344600
  misc_feature (22)..(222): Homolog of NCBI NO: 38175471 NR Description: myosin-like protein [Oryza sativa (japonica
  misc_feature (42)..(208): Homolog of NCBI NO: 18405242 NR Description: expressed protein; protein id: At1g55170.1, by cDNA: 121378. [Arabidopsis thaliana]
  misc_feature (42)..(208): Homolog of NCBI NO: 25405799 NR Description: myosin-like protein, 97843-94399 [imported] -
  misc_feature (1)..(208): Homolog of NCBI NO: 30697468 NR Description: expressed protein [Arabidopsis thaliana]
  misc_feature (1)..(208): Homolog of NCBI NO: 25404669 NR Description: hypothetical protein F5A8.8 [imported] - thaliana >gi|4204281|gb|AAD10662.1| Hypothetical protein
  misc_feature (21)..(215): Homolog of NCBI NO: 28876008 NR Description: hypothetical protein [Oryza sativa (japonica
  misc_feature (15)..(223): Homolog of NCBI NO: 18400511 NR Description: expressed protein; protein id: At3g14750.1, by cDNA: gi_14334819, supported by cDNA: gi_15293200 [Arabidopsis >gi|14334820|gb|AAK59588.1| unknown protein [Arabidopsis
  misc_feature (15)..(223): Homolog of NCBI NO: 9294396 NR Description: gb|AAD10662.1~gene_id:MIE1.26~similar to unknown
  misc_feature (21)..(215): Homolog of NCBI NO: 33146484 NR Description: myosin-like protein [Oryza sativa (japonica
  misc_feature (33)..(213): Homolog of NCBI NO: 15240385 NR Description: putative protein; protein id: At5g61920.1 thaliana] >gi|9758391|dbj|BAB08878.1|
MARQPWSNNGHRNSPSNSLDGGVPGPMPLVPFQEELAVGCEEIRRIAADNTLVLEDILGLRQELAVIEDEIHILAKQTIPRLRVDNEMEYRDIIQGGMKLEEQMHALKLIKEEVLVLSSEKMELEALCKELSVKVQSLYRELEQIQSENKQIPAIREGLHDIQEEISRARMAYEHEKRAKVELLEESQAIESDFINIKMEAQRLRTELEKRRSGVFKHHAFGSYYKR

SEQ ID NO: 12662 - protein, 201 aa, Zea mays subsp. mays
  peptide (1)..(201): Ceres Seq. ID no. 12344601
  misc_feature (1)..(196): Homolog of NCBI NO: 38175471 NR Description: myosin-like protein [Oryza sativa (japonica
  misc_feature (16)..(182): Homolog of NCBI NO: 18405242 NR Description: expressed protein; protein id: At1g55170.1, by cDNA: 121378. [Arabidopsis thaliana]
  misc_feature (16)..(182): Homolog of NCBI NO: 25405799 NR Description: myosin-like protein, 97843-94399 [imported] -
  misc_feature (1)..(182): Homolog of NCBI NO: 30697468 NR Description: expressed protein [Arabidopsis thaliana]
  misc_feature (1)..(182): Homolog of NCBI NO: 25404669 NR Description: hypothetical protein F5A8.8 [imported] - thaliana >gi|4204281|gb|AAD10662.1| Hypothetical protein
  misc_feature (1)..(189): Homolog of NCBI NO: 28876008 NR Description: hypothetical protein [Oryza sativa (japonica
  misc_feature (1)..(197): Homolog of NCBI NO: 18400511 NR Description: expressed protein; protein id: At3g14750.1, by cDNA: gi_14334819, supported by cDNA: gi_15293200 [Arabidopsis >gi|14334820|gb|AAK59588.1| unknown protein [Arabidopsis
  misc_feature (1)..(197): Homolog of NCBI NO: 9294396 NR Description: gb|AAD10662.1~gene_id:MIE1.26~similar to unknown
  misc_feature (1)..(189): Homolog of NCBI NO: 33146484 NR Description: myosin-like protein [Oryza sativa (japonica
  misc_feature (7)..(187): Homolog of NCBI NO: 15240385 NR Description: putative protein; protein id: At5g61920.1 thaliana] >gi|9758391|dbj|BAB08878.1|
MPLVPFQEELAVGCEEIRRIAADNTLVLEDILGLRQELAVIEDEIHILAKQTIPRLRVDNEMEYRDIIQGGMKLEEQMHALKLIKEEVLVLSSEKMELEALCKELSVKVQSLYRELEQIQSENKQIPAIREGLHDIQEEISRARMAYEHEKRAKVELLEESQAIESDFINIKMEAQRLRTELEKRRSGVFKHHAFGSYYKR

SEQ ID NO: 12663 - protein, 140 aa, Zea mays subsp. mays
  peptide (1)..(140): Ceres Seq. ID no. 12344602
  misc_feature (1)..(135): Homolog of NCBI NO: 38175471 NR Description: myosin-like protein [Oryza sativa (japonica
  misc_feature (1)..(121): Homolog of NCBI NO: 18405242 NR Description: expressed protein; protein id: At1g55170.1, by cDNA: 121378. [Arabidopsis thaliana]
  misc_feature (1)..(121): Homolog of NCBI NO: 25405799 NR Description: myosin-like protein, 97843-94399 [imported] -
  misc_feature (1)..(121): Homolog of NCBI NO: 30697468 NR Description: expressed protein [Arabidopsis thaliana]
  misc_feature (1)..(121): Homolog of NCBI NO: 25404669 NR Description: hypothetical protein F5A8.8 [imported] - thaliana >gi|4204281|gb|AAD10662.1| Hypothetical protein
  misc_feature (1)..(128): Homolog of NCBI NO: 28876008 NR Description: hypothetical protein [Oryza sativa (japonica
  misc_feature (1)..(136): Homolog of NCBI NO: 18400511 NR Description: expressed protein; protein id: At3g14750.1, by cDNA: gi_14334819, supported by cDNA: gi_15293200 [Arabidopsis >gi|14334820|gb|AAK59588.1| unknown protein [Arabidopsis
  misc_feature (1)..(136): Homolog of NCBI NO: 9294396 NR Description: gb|AAD10662.1~gene_id:MIE1.26~similar to unknown
  misc_feature (1)..(128): Homolog of NCBI NO: 33146484 NR Description: myosin-like protein [Oryza sativa (japonica
  misc_feature (1)..(126): Homolog of NCBI NO: 15240385 NR Description: putative protein; protein id: At5g61920.1 thaliana] >gi|9758391|dbj|BAB08878.1|
MEYRDIIQGGMKLEEQMHALKLIKEEVLVLSSEKMELEALCKELSVKVQSLYRELEQIQSENKQIPAIREGLHDIQEEISRARMAYEHEKRAKVELLEESQAIESDFINIKMEAQRLRTELEKRRSGVFKHHAFGSYYKR

SEQ ID NO: 12664 - DNA, 809 bp, Zea mays subsp. mays
  misc_feature (1)..(809): Ceres Seq. ID no. 12462322
  misc_feature: MA Experiment ID: 108536 Result: Down-regulated in Transcription
  misc_feature: MA Experiment 108536 PARAMETER Experiment Name: Zm_Meristem_P Parameter: Age (day) Value: 8
  misc_feature: MA Experiment 108536 PARAMETER Experiment Name: Zm_Meristem_P Parameter: Organism Value: Zea mays
  misc_feature: MA Experiment 108536 PARAMETER Experiment Name: Zm_Meristem_P Parameter: Plant Line Value: 35A19
  misc_feature: MA Experiment 108536 PARAMETER Experiment Name: Zm_Meristem_P Parameter: Tissue Value: Shoot Meristem vs. Above Shoot Meristem
  misc_feature: MA Experiment ID: 108687 Result: Down-regulated in Transcription
  misc_feature: MA Experiment 108687 PARAMETER Experiment Name: Zm_Embryos-Flowers__P Parameter: Tissue Value: Embryo vs. Aerial+
  misc_feature: MA Experiment ID: 20000108 Result: Down-regulated in Transcription
  misc_feature: MA Experiment 20000108 PARAMETER Experiment Name: Zm_Root-Tips_P Parameter: Age (day) Value: 12
  misc_feature: MA Experiment 20000108 PARAMETER Experiment Name: Zm_Root-Tips_P Parameter: Organism Value: Zea mays
  misc_feature: MA Experiment 20000108 PARAMETER Experiment Name: Zm_Root-Tips_P Parameter: Tissue Value: Root tips vs. Root mid region    35
  misc_feature: MA Experiment 20000108 PARAMETER Experiment Name: Zm_Root-Tips_P Parameter: Tissue Value: Root tips vs. Root mid region   Sequence Listing-Misc Features (4)
  misc_feature: MA Experiment ID: 20000480 Result: Down-regulated in Transcription
  misc_feature: MA Experiment 20000480 PARAMETER Experiment Name: Zm_Drought_P Parameter: Age (day) Value: 11
  misc_feature: MA Experiment 20000480 PARAMETER Experiment Name: Zm_Drought_P Parameter: Organism Value: Zea mays
  misc_feature: MA Experiment 20000480 PARAMETER Experiment Name: Zm_Drought_P Parameter: Plant Line Value: 35A19
  misc_feature: MA Experiment 20000480 PARAMETER Experiment Name: Zm_Drought_P Parameter: Timepoint (hr) Value: 72
  misc_feature: MA Experiment 20000480 PARAMETER Experiment Name: Zm_Drought_P Parameter: Tissue Value: Aerial
  misc_feature: MA Experiment 20000480 PARAMETER Experiment Name: Zm_Drought_P Parameter: Treatment Value: Drought vs. No Drought
  misc_feature: MA Experiment ID: 20000535 Result: Down-regulated in Transcription
  misc_feature: MA Experiment 20000535 PARAMETER Experiment Name: Zm_Hybrid_Seed_Dev_P Parameter: DAP Value: 30 vs. 12
  misc_feature: MA Experiment 20000535 PARAMETER Experiment Name: Zm_Hybrid_Seed_Dev_P Parameter: Organism Value: Zea mays
  misc_feature: MA Experiment 20000535 PARAMETER Experiment Name: Zm_Hybrid_Seed_Dev_P Parameter: Plant Line Value: 35A19
  misc_feature: MA Experiment 20000535 PARAMETER Experiment Name: Zm_Hybrid_Seed_Dev_P Parameter: Tissue Value: Embryo vs. Unfert Floret
acatatctccatctcacccgcgcgcccacgcgcctccaccacgccatccatcgcaatggccgccgccgccgcgctcctcctcctcctgtgcgccgcgtctctcgcgtccgcagccgccgacgacgggttgacgaccttcaaggtgtacttccacgacgtcgtggcggggacgaacccgacggcggtgcgcatcgcgcaggcggcgtcctccaacacgtcgtccaccaacttcggcgcggtggtggccatcgacgacccgctgacgacgggtcccacgcgcgccgcgggcacggaggtgggccgcgcccagggcacctacacgttcgcggaccagcagacgttcggcctcctcatggtcatgaacttcgtgttcacggccggcgagcacaacggcagcacgctctccatccttggccgcaacgaggtgctcagcgacgtccgcgagatgagcatngtcggcggcagcggcaagttccgcatggcgcgcgggtacgtgcaggcgcacaccatcgactccggcgccacctccgggaccaccgtcgtccagtacaccgtcaacgtcaaggcctagctacctgttacgtacccttgcttgcgactccgggccgtggcttntcgtacgtccatccatatctccggctgctttgtacacaccttgtctgtcgtctttgagcgggattcggatttgcagagccgaatttactactaaagtttcaaaatttcacagagttgtagggtcgagaattaaatgtgtcgaaaacacgttagcgaccattnttanatagtttttgttggaattttgttggccc

SEQ ID NO: 12665 - protein, 223 aa, Zea mays subsp. mays
  peptide (1)..(223): Ceres Seq. ID no. 12462323
  misc_feature (152)..(152): Xaa is any aa, unknown or other
  misc_feature (205)..(205): Xaa is any aa, unknown or other
TYLHLTRAPTRLHHAIHRNGRRRRAPPPPVRRVSRVRSRRRRVDDLQGVLPRRRGGDEPDGGAHRAGGVLQHVVHQLRRGGGHRRPADDGSHARRGHGGGPRPGHLHVRGPADVRPPHGHELRVHGRRAQRQHALHPWPQRGAQRRPRDEHXRRQRQVPHGARVRAGAHHRLRRHLRDHRRPVHRQRQGLATCYVPLLATPGRGXSYVHPYLRLLCTHLVCRL

SEQ ID NO: 12666 - protein, 189 aa, Zea mays subsp. mays
  peptide (1)..(189): Ceres Seq. ID no. 12462324
  misc_feature (41)..(187): Pfam Name: Dirigent-like protein Pfam Description: Dirigent-like protein
  misc_feature (41)..(187): Homolog of NCBI NO: 15218836 NR Description: disease resistance response protein-related/
  misc_feature (41)..(185): Homolog of NCBI NO: 15238980 NR Description: disease resistance response protein-related; id: At5g42500.1, supported by cDNA: gi_20260391 [Arabidopsis
  misc_feature (41)..(185): Homolog of NCBI NO: 15219966 NR Description: disease resistance response protein-related; id: At1g22900.1 [Arabidopsis thaliana] >gi|25347090|pir||A86363
  misc_feature (43)..(183): Homolog of NCBI NO: 15217886 NR Description: disease resistance response protein-related/
  misc_feature (43)..(187): Homolog of NCBI NO: 15222673 NR Description: disease resistance response protein-related/
  misc_feature (43)..(187): Homolog of NCBI NO: 22135914 NR Description: unknown protein [Arabidopsis thaliana]
  misc_feature (43)..(169): Homolog of NCBI NO: 15239779 NR Description: disease resistance response protein-related/
  misc_feature (44)..(185): Homolog of NCBI NO: 15238982 NR Description: disease resistance response protein-related; id: At5g42510.1 [Arabidopsis thaliana] contains similarity to disease resistance response
  misc_feature (43)..(187): Homolog of NCBI NO: 15231302 NR Description: disease resistance response protein-related/
  misc_feature (43)..(169): Homolog of NCBI NO: 15231318 NR Description: disease resistance response protein-related/
  misc_feature (151)..(151): Xaa is any aa, unknown or other
HISISPARPRASTTPSIAMAAAAALLLLLCAASLASAAADDGLTTFKVYFHDVVAGTNPTAVRIAQAASSNTSSTNFGAVVAIDDPLTTGPTRAAGTEVGRAQGTYTFADQQTFGLLMVMNFVFTAGEHNGSTLSILGRNEVLSDVREMSXVGGSGKFRMARGYVQAHTIDSGATSGTTVVQYTVNVKA

SEQ ID NO: 12667 - protein, 171 aa, Zea mays subsp. mays
  peptide (1)..(171): Ceres Seq. ID no. 12462325
  misc_feature (23)..(169): Pfam Name: Dirigent-like protein Pfam Description: Dirigent-like protein
  misc_feature (25)..(165): Homolog of NCBI NO: 15217886 NR Description: disease resistance response protein-related/
  misc_feature (25)..(169): Homolog of NCBI NO: 15222673 NR Description: disease resistance response protein-related/
  misc_feature (25)..(169): Homolog of NCBI NO: 22135914 NR Description: unknown protein [Arabidopsis thaliana]
  misc_feature (25)..(151): Homolog of NCBI NO: 15239779 NR Description: disease resistance response protein-related/
  misc_feature (23)..(167): Homolog of NCBI NO: 15238980 NR Description: disease resistance response protein-related; id: At5g42500.1, supported by cDNA: gi_20260391 [Arabidopsis
  misc_feature (23)..(167): Homolog of NCBI NO: 15219966 NR Description: disease resistance response protein-related; id: At1g22900.1 [Arabidopsis thaliana] >gi|25347090|pir||A86363
  misc_feature (23)..(169): Homolog of NCBI NO: 15218836 NR Description: disease resistance response protein-related/
  misc_feature (26)..(167): Homolog of NCBI NO: 15238982 NR Description: disease resistance response protein-related; id: At5g42510.1 [Arabidopsis thaliana] contains similarity to disease resistance response
  misc_feature (25)..(169): Homolog of NCBI NO: 15231302 NR Description: disease resistance response protein-related/
  misc_feature (25)..(151): Homolog of NCBI NO: 15231318 NR Description: disease resistance response protein-related/
  misc_feature (133)..(133): Xaa is any aa, unknown or other
MAAAAALLLLLCAASLASAAADDGLTTFKVYFHDVVAGTNPTAVRIAQAASSNTSSTNFGAVVAIDDPLTTGPTRAAGTEVGRAQGTYTFADQQTFGLLMVMNFVFTAGEHNGSTLSILGRNEVLSDVREMSXVGGSGKFRMARGYVQAHTIDSGATSGTTVVQYTVNVKA

SEQ ID NO: 12668 - DNA, 1436 bp, Zea mays subsp. mays
  misc_feature (1)..(1436): Ceres Seq. ID no. 12414721
  misc_feature: MA Experiment ID: 108523 Result: Up-regulated in Transcription
  misc_feature: MA Experiment 108523 PARAMETER Experiment Name: Zm_42deg_Heat_P Parameter: Age (day) Value: 8
  misc_feature: MA Experiment 108523 PARAMETER Experiment Name: Zm_42deg_Heat_P Parameter: Organism Value: Zea mays
  misc_feature: MA Experiment 108523 PARAMETER Experiment Name: Zm_42deg_Heat_P Parameter: Plant Line Value: 35A19
  misc_feature: MA Experiment 108523 PARAMETER Experiment Name: Zm_42deg_Heat_P Parameter: Temperature (deg C) Value: 42 vs. 22
  misc_feature: MA Experiment 108523 PARAMETER Experiment Name: Zm_42deg_Heat_P Parameter: Timepoint (hr) Value: 6
  misc_feature: MA Experiment 108523 PARAMETER Experiment Name: Zm_42deg_Heat_P Parameter: Tissue Value: Aerial
aaaccgttggataaagacgctgcaaactgaatagggagcaagacggttccggagtccggactcaagtcccccaaaaatcccaatcgaacccgtccgcctatcgccccaaaccctcgcccagctcgaggtcctcgccgccggccgccggccgccgtctccgtccgaccgccgccatggctcgcaacgaggagaaggcgcagtcaatgctgaaccgcttcatcacgatgaagcaggaggagaagcgcaagccccgagagcgccggccctacctcgcctccgagtgccgggacctcgccgacgccgagcgctggcgctctgagatcctccgcgagatcggcgccaaggtcgccgagatccagaacgagggtctcggcgagcaccgcctccgcgacctcaacgacgagatcaacaaactcctccgcgagcgcggccactgggagcgccgcatcgtcgagctcggcggccgcgactactcccgcagctccaacgcgccgctcatgaccgacctcgacggcaacatagtcgccgtccccaacccctcgggtcgcggaccggggtaccgctactttggcgcggccaggaagctccctggcgtgcgggagctcttcgacaagccgcctgagatgcggaagcgacgcacccgctacgagatccacaagcgcatcaacgccgggtactacggatactatgacgatgaggacggcgtgctagagcgccttgagggccctgccgagaagcgcatgcgggaggagattgtttcagagtggcaccgtgtggaacgggtgcggcgggaggccatgaagggggtgatgagcggtgaggtggctgcggctggagggcgcagcggggaggctgctagagaggttctgtttgagggggtggaggaggaggtcgaagaggagaggaagcgcgaggaagagaagagagagagggagaaaggcgaggaagttgggagggaattcgttgcacatgtgccgctacctgatgaaaaggagattgagcgcatggtattagagaggaagaagaaggagctgcttagcaagtatgccagcgattccctgctggttgagcaggaggaggccaaggagatgctcaatgtccgacgctagaagacgactggccaattgaagctttcattgtgagctcaagacgagcactgaggtacaagaaggaacatcttttgaagtgctggcaccggggggaccaaagacattgttatgtaaaagaaaacaggtttgcctgaaatcacattttatgtgtttaatcagacttgagcgagtgatactggtgcctgtgtgccctgaacgaaggctagacttgtggtattgatgtgcctgtgtgcactgtaacttaactcgtatcatgtacagccattggctgcaatgcactgatcattgatcccttaaaatttcagtgatatagcaaaatctgatcgt

SEQ ID NO: 12669 - protein, 311 aa, Zea mays subsp. mays
  peptide (1)..(311): Ceres Seq. ID no. 12414722
  misc_feature (1)..(292): Pfam Name: Isy1-like splicing family Pfam Description: Isy1-like splicing family
  misc_feature (1)..(311): Homolog of NCBI NO: 15230193 NR Description: unknown protein; protein id: At3g18790.1, by cDNA: gi_18086380 [Arabidopsis thaliana] dbj|BAA86474.1~gene_id:MVE11.17~similar to unknown protein
  misc_feature (1)..(307): Homolog of NCBI NO: 13938521 NR Description: Unknown (protein for MGC:2431) [Homo sapiens]
  misc_feature (1)..(198): Homolog of NCBI NO: 17561262 NR Description: Putative protein, with 2 coiled coil domains, of origin (31.3 kD) [Caenorhabditis elegans] >gi|7504029|pir||T22548
  misc_feature (192)..(291): Homolog of NCBI NO: 17561262 NR Description: Putative protein, with 2 coiled coil domains, of origin (31.3 kD) [Caenorhabditis elegans] >gi|7504029|pir||T22548
  misc_feature (1)..(198): Homolog of NCBI NO: 39591921 NR Description: Hypothetical protein CBG23070 [Caenorhabditis
  misc_feature (192)..(291): Homolog of NCBI NO: 39591921 NR Description: Hypothetical protein CBG23070 [Caenorhabditis
  misc_feature (1)..(208): Homolog of NCBI NO: 34856385 NR Description: similar to RIKEN cDNA 5830446M03 [Rattus
  misc_feature (1)..(252): Homolog of NCBI NO: 20149316 NR Description: expressed sequence AU020769 [Mus musculus] RIKEN cDNA 5830446M03 gene [Mus musculus]
  misc_feature (1)..(208): Homolog of NCBI NO: 6330157 NR Description: KIAA1160 protein [Homo sapiens]
  misc_feature (1)..(208): Homolog of NCBI NO: 20149304 NR Description: KIAA1160 protein [Homo sapiens] Similar to RIKEN cDNA 5830446M03 gene [Homo sapiens]
MARNEEKAQSMLNRFITMKQEEKRKPRERRPYLASECRDLADAERWRSEILREIGAKVAEIQNEGLGEHRLRDLNDEINKLLRERGHWERRIVELGGRDYSRSSNAPLMTDLDGNIVAVPNPSGRGPGYRYFGAARKLPGVRELFDKPPEMRKRRTRYEIHKRINAGYYGYYDDEDGVLERLEGPAEKRMREEIVSEWHRVERVRREAMKGVMSGEVAAAGGRSGEAAREVLFEGVEEEVEEERKREEEKREREKGEEVGREFVAHVPLPDEKEIERMVLERKKKELLSKYASDSLLVEQEEAKEMLNVRR

SEQ ID NO: 12670 - protein, 301 aa, Zea mays subsp. mays
  peptide (1)..(301): Ceres Seq. ID no. 12414723
  misc_feature (1)..(282): Pfam Name: Isy1-like splicing family Pfam Description: Isy1-like splicing family
  misc_feature (1)..(301): Homolog of NCBI NO: 15230193 NR Description: unknown protein; protein id: At3g18790.1, by cDNA: gi_18086380 [Arabidopsis thaliana] dbj|BAA86474.1~gene_id:MVE11.17~similar to unknown protein
  misc_feature (1)..(297): Homolog of NCBI NO: 13938521 NR Description: Unknown (protein for MGC:2431) [Homo sapiens]
  misc_feature (1)..(188): Homolog of NCBI NO: 17561262 NR Description: Putative protein, with 2 coiled coil domains, of origin (31.3 kD) [Caenorhabditis elegans] >gi|7504029|pir||T22548
  misc_feature (182)..(281): Homolog of NCBI NO: 17561262 NR Description: Putative protein, with 2 coiled coil domains, of origin (31.3 kD) [Caenorhabditis elegans] >gi|7504029|pir||T22548
  misc_feature (1)..(188): Homolog of NCBI NO: 39591921 NR Description: Hypothetical protein CBG23070 [Caenorhabditis
  misc_feature (182)..(281): Homolog of NCBI NO: 39591921 NR Description: Hypothetical protein CBG23070 [Caenorhabditis
  misc_feature (1)..(198): Homolog of NCBI NO: 34856385 NR Description: similar to RIKEN cDNA 5830446M03 [Rattus
  misc_feature (1)..(242): Homolog of NCBI NO: 20149316 NR Description: expressed sequence AU020769 [Mus musculus] RIKEN cDNA 5830446M03 gene [Mus musculus]
  misc_feature (1)..(198): Homolog of NCBI NO: 6330157 NR Description: KIAA1160 protein [Homo sapiens]
  misc_feature (1)..(198): Homolog of NCBI NO: 20149304 NR Description: KIAA1160 protein [Homo sapiens] Similar to RIKEN cDNA 5830446M03 gene [Homo sapiens]
MLNRFITMKQEEKRKPRERRPYLASECRDLADAERWRSEILREIGAKVAEIQNEGLGEHRLRDLNDEINKLLRERGHWERRIVELGGRDYSRSSNAPLMTDLDGNIVAVPNPSGRGPGYRYFGAARKLPGVRELFDKPPEMRKRRTRYEIHKRINAGYYGYYDDEDGVLERLEGPAEKRMREEIVSEWHRVERVRREAMKGVMSGEVAAAGGRSGEAAREVLFEGVEEEVEEERKREEEKREREKGEEVGREFVAHVPLPDEKEIERMVLERKKKELLSKYASDSLLVEQEEAKEMLNVRR

SEQ ID NO: 12671 - protein, 294 aa, Zea mays subsp. mays
  peptide (1)..(294): Ceres Seq. ID no. 12414724
  misc_feature (1)..(275): Pfam Name: Isy1-like splicing family Pfam Description: Isy1-like splicing family
  misc_feature (1)..(294): Homolog of NCBI NO: 15230193 NR Description: unknown protein; protein id: At3g18790.1, by cDNA: gi_18086380 [Arabidopsis thaliana] dbj|BAA86474.1~gene_id:MVE11.17~similar to unknown protein
  misc_feature (1)..(290): Homolog of NCBI NO: 13938521 NR Description: Unknown (protein for MGC:2431) [Homo sapiens]
  misc_feature (1)..(181): Homolog of NCBI NO: 17561262 NR Description: Putative protein, with 2 coiled coil domains, of origin (31.3 kD) [Caenorhabditis elegans] >gi|7504029|pir||T22548
  misc_feature (175)..(274): Homolog of NCBI NO: 17561262 NR Description: Putative protein, with 2 coiled coil domains, of origin (31.3 kD) [Caenorhabditis elegans] >gi|7504029|pir||T22548
  misc_feature (1)..(181): Homolog of NCBI NO: 39591921 NR Description: Hypothetical protein CBG23070 [Caenorhabditis
  misc_feature (175)..(274): Homolog of NCBI NO: 39591921 NR Description: Hypothetical protein CBG23070 [Caenorhabditis
  misc_feature (1)..(191): Homolog of NCBI NO: 34856385 NR Description: similar to RIKEN cDNA 5830446M03 [Rattus
  misc_feature (1)..(235): Homolog of NCBI NO: 20149316 NR Description: expressed sequence AU020769 [Mus musculus] RIKEN cDNA 5830446M03 gene [Mus musculus]
  misc_feature (1)..(191): Homolog of NCBI NO: 6330157 NR Description: KIAA1160 protein [Homo sapiens]
  misc_feature (1)..(191): Homolog of NCBI NO: 20149304 NR Description: KIAA1160 protein [Homo sapiens] Similar to RIKEN cDNA 5830446M03 gene [Homo sapiens]
MKQEEKRKPRERRPYLASECRDLADAERWRSEILREIGAKVAEIQNEGLGEHRLRDLNDEINKLLRERGHWERRIVELGGRDYSRSSNAPLMTDLDGNIVAVPNPSGRGPGYRYFGAARKLPGVRELFDKPPEMRKRRTRYEIHKRINAGYYGYYDDEDGVLERLEGPAEKRMREEIVSEWHRVERVRREAMKGVMSGEVAAAGGRSGEAAREVLFEGVEEEVEEERKREEEKREREKGEEVGREFVAHVPLPDEKEIERMVLERKKKELLSKYASDSLLVEQEEAKEMLNVRR

SEQ ID NO: 12672 - DNA, 1913 bp, Zea mays subsp. mays
  misc_feature (1)..(1913): Ceres Seq. ID no. 12414708
  misc_feature: MA Experiment ID: 108559 Result: Down-regulated in Transcription
  misc_feature: MA Experiment 108559 PARAMETER Experiment Name: Zm_5mM_NO_P Parameter: Age (day) Value: 8
  misc_feature: MA Experiment 108559 PARAMETER Experiment Name: Zm_5mM_NO_P Parameter: Organism Value: Zea mays
  misc_feature: MA Experiment 108559 PARAMETER Experiment Name: Zm_5mM_NO_P Parameter: Plant Line Value: 35A19
  misc_feature: MA Experiment 108559 PARAMETER Experiment Name: Zm_5mM_NO_P Parameter: Timepoint (hr) Value: 12
  misc_feature: MA Experiment 108559 PARAMETER Experiment Name: Zm_5mM_NO_P Parameter: Tissue Value: Aerial
  misc_feature: MA Experiment 108559 PARAMETER Experiment Name: Zm_5mM_NO_P Parameter: Treatment Value: 5mM NO vs. No Treatment
  misc_feature: MA Experiment ID: 20000478 Result: Down-regulated in Transcription
  misc_feature: MA Experiment 20000478 PARAMETER Experiment Name: Zm_5mM_SA_P Parameter: Age (day) Value: 11
  misc_feature: MA Experiment 20000478 PARAMETER Experiment Name: Zm_5mM_SA_P Parameter: Organism Value: Zea mays
  misc_feature: MA Experiment 20000478 PARAMETER Experiment Name: Zm_5mM_SA_P Parameter: Plant Line Value: 35A19
  misc_feature: MA Experiment 20000478 PARAMETER Experiment Name: Zm_5mM_SA_P Parameter: Timepoint (hr) Value: 72
  misc_feature: MA Experiment 20000478 PARAMETER Experiment Name: Zm_5mM_SA_P Parameter: Tissue Value: Aerial
  misc_feature: MA Experiment 20000478 PARAMETER Experiment Name: Zm_5mM_SA_P Parameter: Treatment Value: 5mM SA vs. No Treatment
  misc_feature: MA Experiment ID: 20000479 Result: Down-regulated in Transcription
  misc_feature: MA Experiment 20000479 PARAMETER Experiment Name: Zm_Drought_P Parameter: Age (day) Value: 10
  misc_feature: MA Experiment 20000479 PARAMETER Experiment Name: Zm_Drought_P Parameter: Organism Value: Zea mays
  misc_feature: MA Experiment 20000479 PARAMETER Experiment Name: Zm_Drought_P Parameter: Plant Line Value: 35A19
  misc_feature: MA Experiment 20000479 PARAMETER Experiment Name: Zm_Drought_P Parameter: Timepoint (hr) Value: 48
  misc_feature: MA Experiment 20000479 PARAMETER Experiment Name: Zm_Drought_P Parameter: Tissue Value: Aerial
  misc_feature: MA Experiment 20000479 PARAMETER Experiment Name: Zm_Drought_P Parameter: Treatment Value: Drought vs. No Drought
  misc_feature: MA Experiment ID: 20000480 Result: Down-regulated in Transcription
  misc_feature: MA Experiment 20000480 PARAMETER Experiment Name: Zm_Drought_P Parameter: Age (day) Value: 11
  misc_feature: MA Experiment 20000480 PARAMETER Experiment Name: Zm_Drought_P Parameter: Organism Value: Zea mays
  misc_feature: MA Experiment 20000480 PARAMETER Experiment Name: Zm_Drought_P Parameter: Plant Line Value: 35A19
  misc_feature: MA Experiment 20000480 PARAMETER Experiment Name: Zm_Drought_P Parameter: Timepoint (hr) Value: 72
  misc_feature: MA Experiment 20000480 PARAMETER Experiment Name: Zm_Drought_P Parameter: Tissue Value: Aerial
  misc_feature: MA Experiment 20000480 PARAMETER Experiment Name: Zm_Drought_P Parameter: Treatment Value: Drought vs. No Drought
  misc_feature: MA Experiment ID: 20000630 Result: Down-regulated in Transcription
  misc_feature: MA Experiment 20000630 PARAMETER Experiment Name: Zm_Herbicide-Treatments_P Parameter: Timepoint (hr) Value: 4
  misc_feature: MA Experiment 20000630 PARAMETER Experiment Name: Zm_Herbicide-Treatments_P Parameter: Tissue Value: Aerial
  misc_feature: MA Experiment 20000630 PARAMETER Experiment Name: Zm_Herbicide-Treatments_P Parameter: Treatment Value: Roundup vs. No Treatment
aaagagagaagggagaggcgagggagctcaccaggagagaggggcctgtgcgtgagcattgagcaaagcaaaggaagcagtacatacatacatatttctctcgctcgctcgcagagaggcccggccggccggctccatgcaacaagggaggacgacgagcggtggcggtgggcgatgatgatgatgatgatggcgggggagcacgtgctggccgctctgggcaccctactgctggcctcgctcctgaccctggtgctgaaccacttcctgcccttgcttctgaaccccaaggcccccaggggaagcttcgggtggccgctcctcggcgagacgctcaggttcctcacgccgcacgcctccaacacgctgggcggcttcctcgaggatcactgctccaggtatgggcgggtgttcaagtcccacctgttctgcaccccgacggtggtgtcctgcgaccaggacctcaaccacttcatcctgcagaacgaggagcggctgttccagtgcagctacccgaggccgatccatggcatcctgggcaagtcctccatgctcgtcgtcctgggcgaggaccacaagcgcctcaggaacctggccctcgccctcgtcacctccaccaagctcaagcccagctacctaggcgacatcgagaagatcgcgctgcacgtcgtcggcgcatggcgacggcacggcagcagcggcggcgtcagggtcgtcgcattctgcgaggaggcaagaaagttcgcattcagtgtgatagtgaagcaggtgctggggctgtcgccagaggagccggtcactgcaaggatactggaggacttcctggccttcatgaagggactcatctccttccccctctacatcccagggaccccatatgccaaggctgtccgggcgagagagaggatatccagcactgtgaagggcatcatcaaggagcggaggagcgctgggtcatggaacaagcagggcgacttccttgacgtgctgctgtcaagcaacgagctatctgacgaggagaaagtgagctttgtgctggactccctgctgggagggtatgagaccacctcgctcctcatctccatggtcgtttatttccttggccagtctgctcaagatctggacctggttaagagggagcacgacagcataagatccaacaaaggcaaggaggagtgcttgacttcagaagactacaagaagatggaatatacccaacaagtcatcaacgaggcgctgagatgcggcaacatcgtcaagttcgtccaccggaaggcgctgaaagacgtcaaatacaaagagtatctgattccatctggctggaaggtcctaccggtcttcactgccgttcatctgaacccctcacttcatggagacgcgcagcagtttcagccctgtaggtgggagggcacaagccaagggacaagcaagaggtttacaccgttcggtggtggcccccggctctgcccaggatcagagctcgctaaagtggagactgctttcttcctccatcaccttgtcctcaattatagatggagaattgatggcgatgacattccaatggcatacccgtatgtggagtttcagagaggtctgccaatagaaatcgagccaacgtcccctgaatcttgactgtcctggagctacagccatcagttatcacaccagagagaaaaggggaaggtgcatggagtatacatgaatggtcagtgacagatctcacaagtgaaggaacactgagggcgcgtgctagtagctagcatatgaggcagctgagactgtaatttaatgtacatggtgtagatatattttgtccatggcaattgcttgaagtggctgattcacttcaccctgtaaaacattctccagtggtttcaactgctatcctataaaaaagaagggcccctgtgttt

SEQ ID NO: 12673 - protein, 543 aa, Zea mays subsp. mays
  peptide (1)..(543): Ceres Seq. ID no. 12414709
  misc_feature (295)..(535): Homolog of NCBI NO: 32487441 NR Description: OSJNBa0016O02.25 [Oryza sativa (japonica
  misc_feature (63)..(263): Homolog of NCBI NO: 32487441 NR Description: OSJNBa0016O02.25 [Oryza sativa (japonica
  misc_feature (104)..(539): Homolog of NCBI NO: 22326806 NR Description: cytochrome p450 family; protein id: At5g14400.1
  misc_feature (62)..(315): Homolog of NCBI NO: 2935342 NR Description: steroid 22-alpha-hydroxylase; DWF4; CYP90B1
  misc_feature (62)..(315): Homolog of NCBI NO: 15229822 NR Description: steroid 22-alpha-hydroxylase (DWF4); protein id:
  misc_feature (325)..(536): Homolog of NCBI NO: 2935342 NR Description: steroid 22-alpha-hydroxylase; DWF4; CYP90B1
  misc_feature (325)..(536): Homolog of NCBI NO: 15229822 NR Description: steroid 22-alpha-hydroxylase (DWF4); protein id:
  misc_feature (104)..(340): Homolog of NCBI NO: 11357546 NR Description: hypothetical protein F18O22.190 - Arabidopsis >gi|7573465|emb|CAB87779.1| putative protein [Arabidopsis
  misc_feature (380)..(539): Homolog of NCBI NO: 11357546 NR Description: hypothetical protein F18O22.190 - Arabidopsis >gi|7573465|emb|CAB87779.1| putative protein [Arabidopsis
  misc_feature (99)..(536): Homolog of NCBI NO: 34902330 NR Description: Putative steroid 22-alpha-hydroxylase [Oryza
KERRERRGSSPGERGLCVSIEQSKGSSTYIHISLARSQRGPAGRLHATREDDERWRWAMMMMMMAGEHVLAALGTLLLASLLTLVLNHFLPLLLNPKAPRGSFGWPLLGETLRFLTPHASNTLGGFLEDHCSRYGRVFKSHLFCTPTVVSCDQDLNHFILQNEERLFQCSYPRPIHGILGKSSMLVVLGEDHKRLRNLALALVTSTKLKPSYLGDIEKIALHVVGAWRRHGSSGGVRVVAFCEEARKFAFSVIVKQVLGLSPEEPVTARILEDFLAFMKGLISFPLYIPGTPYAKAVRARERISSTVKGIIKERRSAGSWNKQGDFLDVLLSSNELSDEEKVSFVLDSLLGGYETTSLLISMVVYFLGQSAQDLDLVKREHDSIRSNKGKEECLTSEDYKKMEYTQQVINEALRCGNIVKFVHRKALKDVKYKEYLIPSGWKVLPVFTAVHLNPSLHGDAQQFQPCRWEGTSQGTSKRFTPFGGGPRLCPGSELAKVETAFFLHHLVLNYRWRIDGDDIPMAYPYVEFQRGLPIEIEPTSPES

SEQ ID NO: 12674 - protein, 485 aa, Zea mays subsp. mays
  peptide (1)..(485): Ceres Seq. ID no. 12414710
  misc_feature (237)..(477): Homolog of NCBI NO: 32487441 NR Description: OSJNBa0016O02.25 [Oryza sativa (japonica
  misc_feature (5)..(205): Homolog of NCBI NO: 32487441 NR Description: OSJNBa0016O02.25 [Oryza sativa (japonica
  misc_feature (46)..(481): Homolog of NCBI NO: 22326806 NR Description: cytochrome p450 family; protein id: At5g14400.1
  misc_feature (4)..(257): Homolog of NCBI NO: 2935342 NR Description: steroid 22-alpha-hydroxylase; DWF4; CYP90B1
  misc_feature (4)..(257): Homolog of NCBI NO: 15229822 NR Description: steroid 22-alpha-hydroxylase (DWF4); protein id:
  misc_feature (267)..(478): Homolog of NCBI NO: 2935342 NR Description: steroid 22-alpha-hydroxylase; DWF4; CYP90B1
  misc_feature (267)..(478): Homolog of NCBI NO: 15229822 NR Description: steroid 22-alpha-hydroxylase (DWF4); protein id:
  misc_feature (46)..(282): Homolog of NCBI NO: 11357546 NR Description: hypothetical protein F18O22.190 - Arabidopsis >gi|7573465|emb|CAB87779.1| putative protein [Arabidopsis
  misc_feature (322)..(481): Homolog of NCBI NO: 11357546 NR Description: hypothetical protein F18O22.190 - Arabidopsis >gi|7573465|emb|CAB87779.1| putative protein [Arabidopsis
  misc_feature (41)..(478): Homolog of NCBI NO: 34902330 NR Description: Putative steroid 22-alpha-hydroxylase [Oryza
MMMMMMAGEHVLAALGTLLLASLLTLVLNHFLPLLLNPKAPRGSFGWPLLGETLRFLTPHASNTLGGFLEDHCSRYGRVFKSHLFCTPTVVSCDQDLNHFILQNEERLFQCSYPRPIHGILGKSSMLVVLGEDHKRLRNLALALVTSTKLKPSYLGDIEKIALHVVGAWRRHGSSGGVRVVAFCEEARKFAFSVIVKQVLGLSPEEPVTARILEDFLAFMKGLISFPLYIPGTPYAKAVRARERISSTVKGIIKERRSAGSWNKQGDFLDVLLSSNELSDEEKVSFVLDSLLGGYETTSLLISMVVYFLGQSAQDLDLVKREHDSIRSNKGKEECLTSEDYKKMEYTQQVINEALRCGNIVKFVHRKALKDVKYKEYLIPSGWKVLPVFTAVHLNPSLHGDAQQFQPCRWEGTSQGTSKRFTPFGGGPRLCPGSELAKVETAFFLHHLVLNYRWRIDGDDIPMAYPYVEFQRGLPIEIEPTSPES

SEQ ID NO: 12675 - protein, 484 aa, Zea mays subsp. mays
  peptide (1)..(484): Ceres Seq. ID no. 12414711
  misc_feature (236)..(476): Homolog of NCBI NO: 32487441 NR Description: OSJNBa0016O02.25 [Oryza sativa (japonica
  misc_feature (4)..(204): Homolog of NCBI NO: 32487441 NR Description: OSJNBa0016O02.25 [Oryza sativa (japonica
  misc_feature (45)..(480): Homolog of NCBI NO: 22326806 NR Description: cytochrome p450 family; protein id: At5g14400.1
  misc_feature (3)..(256): Homolog of NCBI NO: 2935342 NR Description: steroid 22-alpha-hydroxylase; DWF4; CYP90B1
  misc_feature (3)..(256): Homolog of NCBI NO: 15229822 NR Description: steroid 22-alpha-hydroxylase (DWF4); protein id:
  misc_feature (266)..(477): Homolog of NCBI NO: 2935342 NR Description: steroid 22-alpha-hydroxylase; DWF4; CYP90B1
  misc_feature (266)..(477): Homolog of NCBI NO: 15229822 NR Description: steroid 22-alpha-hydroxylase (DWF4); protein id:
  misc_feature (45)..(281): Homolog of NCBI NO: 11357546 NR Description: hypothetical protein F18O22.190 - Arabidopsis >gi|7573465|emb|CAB87779.1| putative protein [Arabidopsis
  misc_feature (321)..(480): Homolog of NCBI NO: 11357546 NR Description: hypothetical protein F18O22.190 - Arabidopsis >gi|7573465|emb|CAB87779.1| putative protein [Arabidopsis
  misc_feature (40)..(477): Homolog of NCBI NO: 34902330 NR Description: Putative steroid 22-alpha-hydroxylase [Oryza
MMMMMAGEHVLAALGTLLLASLLTLVLNHFLPLLLNPKAPRGSFGWPLLGETLRFLTPHASNTLGGFLEDHCSRYGRVFKSHLFCTPTVVSCDQDLNHFILQNEERLFQCSYPRPIHGILGKSSMLVVLGEDHKRLRNLALALVTSTKLKPSYLGDIEKIALHVVGAWRRHGSSGGVRVVAFCEEARKFAFSVIVKQVLGLSPEEPVTARILEDFLAFMKGLISFPLYIPGTPYAKAVRARERISSTVKGIIKERRSAGSWNKQGDFLDVLLSSNELSDEEKVSFVLDSLLGGYETTSLLISMVVYFLGQSAQDLDLVKREHDSIRSNKGKEECLTSEDYKKMEYTQQVINEALRCGNIVKFVHRKALKDVKYKEYLIPSGWKVLPVFTAVHLNPSLHGDAQQFQPCRWEGTSQGTSKRFTPFGGGPRLCPGSELAKVETAFFLHHLVLNYRWRIDGDDIPMAYPYVEFQRGLPIEIEPTSPES

SEQ ID NO: 12676 - DNA, 855 bp, Zea mays subsp. mays
  misc_feature (1)..(855): Ceres Seq. ID no. 12365042
  misc_feature: MA Experiment ID: 108523 Result: Up-regulated in Transcription
  misc_feature: MA Experiment 108523 PARAMETER Experiment Name: Zm_42deg_Heat_P Parameter: Age (day) Value: 8
  misc_feature: MA Experiment 108523 PARAMETER Experiment Name: Zm_42deg_Heat_P Parameter: Organism Value: Zea mays
  misc_feature: MA Experiment 108523 PARAMETER Experiment Name: Zm_42deg_Heat_P Parameter: Plant Line Value: 35A19
  misc_feature: MA Experiment 108523 PARAMETER Experiment Name: Zm_42deg_Heat_P Parameter: Temperature (deg C) Value: 42 vs. 22
  misc_feature: MA Experiment 108523 PARAMETER Experiment Name: Zm_42deg_Heat_P Parameter: Timepoint (hr) Value: 6
  misc_feature: MA Experiment 108523 PARAMETER Experiment Name: Zm_42deg_Heat_P Parameter: Tissue Value: Aerial
  misc_feature: MA Experiment ID: 108534 Result: Down-regulated in Transcription
  misc_feature: MA Experiment 108534 PARAMETER Experiment Name: Zm_4deg_Cold_P Parameter: Age (hr) Value: 8
  misc_feature: MA Experiment 108534 PARAMETER Experiment Name: Zm_4deg_Cold_P Parameter: Organism Value: Zea mays
  misc_feature: MA Experiment 108534 PARAMETER Experiment Name: Zm_4deg_Cold_P Parameter: Plant Line Value: 35A19
  misc_feature: MA Experiment 108534 PARAMETER Experiment Name: Zm_4deg_Cold_P Parameter: Temperature (deg C) Value: 4 vs. 22
  misc_feature: MA Experiment 108534 PARAMETER Experiment Name: Zm_4deg_Cold_P Parameter: Timepoint (hr) Value: 6
  misc_feature: MA Experiment 108534 PARAMETER Experiment Name: Zm_4deg_Cold_P Parameter: Tissue Value: Aerial
attcatgatggcaatggcacagagagaggtgagtccagcgttcatcctctttacgtctcccgcgtttcgttccctggctggtacggtacccgtcgtcgtgcgaacccaagacacccgcagagtgctcgaccaaatgcgacactaggttaggtgcttctactccacggcgatcacccagctgctacccaactgtcgcaggccgacgcgccgagcgagggcgccgccgccgccgtctccggcgtcatggcggtgaagctcaaggacctggtcccggccgcgaccaacacggtgaacacgacgttcatcgtgctcgacaaggcggcgccgtcgacccgccgacagggcggcgccagggaggagacgtgcctggcgctggtggcggacgagaccgcggcggcgcacttcctgctgtggggcgccgagtgcggcgcgttcgagccgggcgacatcgtgcggctcacggacggcatcttctcgtaccacagggggaacgtcctggtgctgcgggcgggccgccgcgggcgcgccgagaaggtgggcgagttcgccatgctcttcgtggagacccccaacatgagcgagctccagtgggggcccgaccccagcgacggccggaggatggtgcaggaggccgtcgtctcgccttactcccagatcttcaagccgctgcggtgatcttcttactactgagaaacatgatactaggggtacgaacttacgatgaagaagaacgaaaaagaagggcttaaagctctgtctgtcttccaaagtgacaaggttacagcttacaacatgttcaaccatacaattatatcttccactgtgcaattatatgtttcattcacagtttgctgc

SEQ ID NO: 12677 - protein, 143 aa, Zea mays subsp. mays
  peptide (1)..(143): Ceres Seq. ID no. 12365043
  misc_feature (19)..(111): Pfam Name: OB-fold nucleic acid binding domain Pfam Description: OB-fold nucleic acid binding domain
  misc_feature (1)..(143): Homolog of NCBI NO: 34898750 NR Description: hypothetical protein~similar to Arabidopsis
  misc_feature (1)..(143): Homolog of NCBI NO: 34898746 NR Description: hypothetical protein~similar to Arabidopsis
  misc_feature (1)..(142): Homolog of NCBI NO: 15242865 NR Description: unknown protein; protein id: At5g63690.1 thaliana] >gi|10177050|dbj|BAB10462.1| gene_id:MBK5.17~unknown
  misc_feature (5)..(113): Homolog of NCBI NO: 13129048 NR Description: hypothetical protein MGC2731 [Homo sapiens] Unknown (protein for MGC:2731) [Homo sapiens]
  misc_feature (5)..(113): Homolog of NCBI NO: 28076937 NR Description: RIKEN cDNA 2610036N15 [Mus musculus]
  misc_feature (5)..(113): Homolog of NCBI NO: 34862206 NR Description: similar to RIKEN cDNA 2610036N15 [Rattus
  misc_feature (5)..(113): Homolog of NCBI NO: 16877754 NR Description: Similar to RIKEN cDNA 4930434H03 gene [Homo
  misc_feature (5)..(113): Homolog of NCBI NO: 30844321 NR Description: RIKEN cDNA 5830411E10 [Mus musculus]
  misc_feature (5)..(113): Homolog of NCBI NO: 26340138 NR Description: unnamed protein product [Mus musculus]
  misc_feature (30)..(113): Homolog of NCBI NO: 20071811 NR Description: Similar to RIKEN cDNA 4930434H03 gene [Mus
MAVKLKDLVPAATNTVNTTFIVLDKAAPSTRRQGGAREETCLALVADETAAAHFLLWGAECGAFEPGDIVRLTDGIFSYHRGNVLVLRAGRRGRAEKVGEFAMLFVETPNMSELQWGPDPSDGRRMVQEAVVSPYSQIFKPLR

SEQ ID NO: 12678 - DNA, 967 bp, Zea mays subsp. mays
  misc_feature (1)..(967): Ceres Seq. ID no. 12343734
  misc_feature: MA Experiment ID: 108528 Result: Up-regulated in Transcription
  misc_feature: MA Experiment 108528 PARAMETER Experiment Name: Zm_Imbibed_Seeds_P Parameter: Age (day) Value: 5 vs. 2
  misc_feature: MA Experiment 108528 PARAMETER Experiment Name: Zm_Imbibed_Seeds_P Parameter: Organism Value: Zea mays
  misc_feature: MA Experiment 108528 PARAMETER Experiment Name: Zm_Imbibed_Seeds_P Parameter: Plant Line Value: 35A19
  misc_feature: MA Experiment 108528 PARAMETER Experiment Name: Zm_Imbibed_Seeds_P Parameter: Tissue Value: Aerial vs. Embryo
  misc_feature: MA Experiment ID: 108529 Result: Down-regulated in Transcription
  misc_feature: MA Experiment 108529 PARAMETER Experiment Name: Zm_Imbibed_Seeds_P Parameter: Age (day) Value: 5 vs. 2
  misc_feature: MA Experiment 108529 PARAMETER Experiment Name: Zm_Imbibed_Seeds_P Parameter: Organism Value: Zea mays
  misc_feature: MA Experiment 108529 PARAMETER Experiment Name: Zm_Imbibed_Seeds_P Parameter: Plant Line Value: 35A19
  misc_feature: MA Experiment 108529 PARAMETER Experiment Name: Zm_Imbibed_Seeds_P Parameter: Tissue Value: Roots vs. Embryo
  misc_feature: MA Experiment ID: 108530 Result: Up-regulated in Transcription
  misc_feature: MA Experiment 108530 PARAMETER Experiment Name: Zm_Imbibed_Seeds_P Parameter: Age (day) Value: 6 vs. 2
  misc_feature: MA Experiment 108530 PARAMETER Experiment Name: Zm_Imbibed_Seeds_P Parameter: Organism Value: Zea mays
  misc_feature: MA Experiment 108530 PARAMETER Experiment Name: Zm_Imbibed_Seeds_P Parameter: Plant Line Value: 35A19
  misc_feature: MA Experiment 108530 PARAMETER Experiment Name: Zm_Imbibed_Seeds_P Parameter: Tissue Value: Aerial vs. Embryo
  misc_feature: MA Experiment ID: 108536 Result: Down-regulated in Transcription
  misc_feature: MA Experiment 108536 PARAMETER Experiment Name: Zm_Meristem_P Parameter: Age (day) Value: 8
  misc_feature: MA Experiment 108536 PARAMETER Experiment Name: Zm_Meristem_P Parameter: Organism Value: Zea mays
  misc_feature: MA Experiment 108536 PARAMETER Experiment Name: Zm_Meristem_P Parameter: Plant Line Value: 35A19
  misc_feature: MA Experiment 108536 PARAMETER Experiment Name: Zm_Meristem_P Parameter: Tissue Value: Shoot Meristem vs. Above Shoot Meristem
  misc_feature: MA Experiment ID: 108543 Result: Up-regulated in Transcription
  misc_feature: MA Experiment ID: 108545 Result: Up-regulated in Transcription
  misc_feature: MA Experiment 108545 PARAMETER Experiment Name: Zm_Imbibed_Seeds_P Parameter: Age (day) Value: 3 vs. 2
  misc_feature: MA Experiment 108545 PARAMETER Experiment Name: Zm_Imbibed_Seeds_P Parameter: Organism Value: Zea mays
  misc_feature: MA Experiment 108545 PARAMETER Experiment Name: Zm_Imbibed_Seeds_P Parameter: Plant Line Value: 35A19
  misc_feature: MA Experiment 108545 PARAMETER Experiment Name: Zm_Imbibed_Seeds_P Parameter: Tissue Value: Aerial vs. Embryo
  misc_feature: MA Experiment ID: 108546 Result: Down-regulated in Transcription
  misc_feature: MA Experiment 108546 PARAMETER Experiment Name: Zm_Imbibed_Seeds_P Parameter: Age (day) Value: 3 vs. 2
  misc_feature: MA Experiment 108546 PARAMETER Experiment Name: Zm_Imbibed_Seeds_P Parameter: Organism Value: Zea mays
  misc_feature: MA Experiment 108546 PARAMETER Experiment Name: Zm_Imbibed_Seeds_P Parameter: Plant Line Value: 35A19
  misc_feature: MA Experiment 108546 PARAMETER Experiment Name: Zm_Imbibed_Seeds_P Parameter: Tissue Value: Roots vs. Embryo
  misc_feature: MA Experiment ID: 108547 Result: Up-regulated in Transcription
  misc_feature: MA Experiment 108547 PARAMETER Experiment Name: Zm_Imbibed_Seeds_P Parameter: Age (day) Value: 4 vs. 2
  misc_feature: MA Experiment 108547 PARAMETER Experiment Name: Zm_Imbibed_Seeds_P Parameter: Organism Value: Zea mays
  misc_feature: MA Experiment 108547 PARAMETER Experiment Name: Zm_Imbibed_Seeds_P Parameter: Plant Line Value: 35A19
  misc_feature: MA Experiment 108547 PARAMETER Experiment Name: Zm_Imbibed_Seeds_P Parameter: Tissue Value: Aerial vs. Embryo
  misc_feature: MA Experiment ID: 108559 Result: Down-regulated in Transcription
  misc_feature: MA Experiment 108559 PARAMETER Experiment Name: Zm_5mM_NO_P Parameter: Age (day) Value: 8
  misc_feature: MA Experiment 108559 PARAMETER Experiment Name: Zm_5mM_NO_P Parameter: Organism Value: Zea mays
  misc_feature: MA Experiment 108559 PARAMETER Experiment Name: Zm_5mM_NO_P Parameter: Plant Line Value: 35A19
  misc_feature: MA Experiment 108559 PARAMETER Experiment Name: Zm_5mM_NO_P Parameter: Timepoint (hr) Value: 12
  misc_feature: MA Experiment 108559 PARAMETER Experiment Name: Zm_5mM_NO_P Parameter: Tissue Value: Aerial
  misc_feature: MA Experiment 108559 PARAMETER Experiment Name: Zm_5mM_NO_P Parameter: Treatment Value: 5mM NO vs. No Treatment
  misc_feature: MA Experiment ID: 20000492 Result: Up-regulated in Transcription
  misc_feature: MA Experiment 20000492 PARAMETER Experiment Name: Zm_Hybrid_Seed_Dev_P Parameter: DAP Value: 12
  misc_feature: MA Experiment 20000492 PARAMETER Experiment Name: Zm_Hybrid_Seed_Dev_P Parameter: Organism Value: Zea mays
  misc_feature: MA Experiment 20000492 PARAMETER Experiment Name: Zm_Hybrid_Seed_Dev_P Parameter: Plant Line Value: 35A19
  misc_feature: MA Experiment 20000492 PARAMETER Experiment Name: Zm_Hybrid_Seed_Dev_P Parameter: Tissue Value: Fert Kernel vs. Unfert Floret
  misc_feature: MA Experiment ID: 20000626 Result: Down-regulated in Transcription
  misc_feature: MA Experiment 20000626 PARAMETER Experiment Name: Zm_Herbicide-Treatments_P Parameter: Timepoint (hr) Value: 12
  misc_feature: MA Experiment 20000626 PARAMETER Experiment Name: Zm_Herbicide-Treatments_P Parameter: Tissue Value: Aerial
  misc_feature: MA Experiment 20000626 PARAMETER Experiment Name: Zm_Herbicide-Treatments_P Parameter: Treatment Value: Roundup vs. No Treatment
cccaatcctcccgccgcggcgacgccttcccctccctccttcctccgtcccatgctccgccgctgacacgttggcccgacttaaccttacgatggccgccgcctccgccatcaccgccgtctccggcgttgtgcttccccaaaccttcctatccccccggtcgccgccgccgcaggtcctagccgtggcctcctcattccgccggctctccttgtgcgcttcccctcgccggatcactcacataatcccccgcgctgatgcaagtgccgaagctggagaaccggagcctgtcactgcttcagatgaatccgaagaggaggtggccgaggggtctgtcgctgtggcggagggggaggaaccgacgccgccgagcaagccgaaggttaagttcggcgaaataattgggattctgaataagcagttcattgaggaggctgagaaggtgaagactgtaccggatctgaggcctggcgatatcattgagcttaggatgcaacggcccaacaaaaggagattgtcgctctttaagggcataatcatcgcaaagcacaaagctggtgttcacaccacaatccgtgtcagaaggatcattgctggtgtaggagttgagattaccttcccagtgtactcacccaggatcaaggaaatcacggttatcaggcacaagaaagtgaggagagcaaagttgtactacctgaaagacaagcttccccgcttttcaacattcaagtgaaatcagatatgctgacagaacgactttttccaccaccatctcgatttctcttaaacctttttttttcacttccctatcgatatcatcatatttcactgtaatctctgggtatcagatgtgtaatatctacagctttatatcatacttggcttagtgcaatgttttgtttgttgtcagtgtacaaaattcatactagcaccttgttattatgaatttgcaaatacaaggttatgc

SEQ ID NO: 12679 - protein, 243 aa, Zea mays subsp. mays
  peptide (1)..(243): Ceres Seq. ID no. 12343735
  misc_feature (135)..(243): Pfam Name: Ribosomal protein L19 Pfam Description: Ribosomal protein L19
  misc_feature (32)..(243): Homolog of NCBI NO: 14140122 NR Description: putative plastid ribosomal protein L19 precursor
  misc_feature (30)..(243): Homolog of NCBI NO: 8809601 NR Description: contains similarity to plastid ribosomal protein
  misc_feature (30)..(243): Homolog of NCBI NO: 21592584 NR Description: contains similarity to plastid ribosomal protein
  misc_feature (30)..(243): Homolog of NCBI NO: 18422764 NR Description: putative protein; protein id: At5g47190.1, by cDNA: 30034. [Arabidopsis thaliana] unknown protein [Arabidopsis thaliana]
  misc_feature (89)..(243): Homolog of NCBI NO: 18414915 NR Description: putative protein; protein id: At4g17560.1, by cDNA: 2161., supported by cDNA: gi_17065489, supported by gi_20148592 [Arabidopsis thaliana] >gi|17065490|gb|AAL32899.1|
  misc_feature (70)..(243): Homolog of NCBI NO: 7582403 NR Description: plastid ribosomal protein L19 precursor [Spinacia
  misc_feature (72)..(236): Homolog of NCBI NO: 15234249 NR Description: putative protein; protein id: At4g11630.1, by cDNA: gi_14994248, supported by cDNA: gi_16974528, supported cDNA: gi_19699145 [Arabidopsis thaliana] >gi|7487679|pir||T04210
  misc_feature (133)..(236): Homolog of NCBI NO: 15239778 NR Description: putative protein; protein id: At5g11750.1, by cDNA: gi_14030716 [Arabidopsis thaliana]
  misc_feature (133)..(236): Homolog of NCBI NO: 18395422 NR Description: expressed protein; protein id: At1g24240.1, by cDNA: gi_15146227 [Arabidopsis thaliana]
  misc_feature (100)..(243): Homolog of NCBI NO: 33239924 NR Description: Ribosomal protein L19 [Prochlorococcus marinus marinus str. CCMP1375] >gi|33237450|gb|AAP99518.1| Ribosomal
PILPPRRRLPLPPSSVPCSAADTLARLNLTMAAASAITAVSGVVLPQTFLSPRSPPPQVLAVASSFRRLSLCASPRRITHIIPRADASAEAGEPEPVTASDESEEEVAEGSVAVAEGEEPTPPSKPKVKFGEIIGILNKQFIEEAEKVKTVPDLRPGDIIELRMQRPNKRRLSLFKGIIIAKHKAGVHTTIRVRRIIAGVGVEITFPVYSPRIKEITVIRHKKVRRAKLYYLKDKLPRFSTFK

SEQ ID NO: 12680 - protein, 213 aa, Zea mays subsp. mays
  peptide (1)..(213): Ceres Seq. ID no. 12343736
  misc_feature (105)..(213): Pfam Name: Ribosomal protein L19 Pfam Description: Ribosomal protein L19
  misc_feature (2)..(213): Homolog of NCBI NO: 14140122 NR Description: putative plastid ribosomal protein L19 precursor
  misc_feature (1)..(213): Homolog of NCBI NO: 8809601 NR Description: contains similarity to plastid ribosomal protein
  misc_feature (1)..(213): Homolog of NCBI NO: 21592584 NR Description: contains similarity to plastid ribosomal protein
  misc_feature (1)..(213): Homolog of NCBI NO: 18422764 NR Description: putative protein; protein id: At5g47190.1, by cDNA: 30034. [Arabidopsis thaliana] unknown protein [Arabidopsis thaliana]
  misc_feature (59)..(213): Homolog of NCBI NO: 18414915 NR Description: putative protein; protein id: At4g17560.1, by cDNA: 2161., supported by cDNA: gi_17065489, supported by gi_20148592 [Arabidopsis thaliana] >gi|17065490|gb|AAL32899.1|
  misc_feature (40)..(213): Homolog of NCBI NO: 7582403 NR Description: plastid ribosomal protein L19 precursor [Spinacia
  misc_feature (42)..(206): Homolog of NCBI NO: 15234249 NR Description: putative protein; protein id: At4g11630.1, by cDNA: gi_14994248, supported by cDNA: gi_16974528, supported cDNA: gi_19699145 [Arabidopsis thaliana] >gi|7487679|pir||T04210
  misc_feature (103)..(206): Homolog of NCBI NO: 15239778 NR Description: putative protein; protein id: At5g11750.1, by cDNA: gi_14030716 [Arabidopsis thaliana]
  misc_feature (103)..(206): Homolog of NCBI NO: 18395422 NR Description: expressed protein; protein id: At1g24240.1, by cDNA: gi_15146227 [Arabidopsis thaliana]
  misc_feature (70)..(213): Homolog of NCBI NO: 33239924 NR Description: Ribosomal protein L19 [Prochlorococcus marinus marinus str. CCMP1375] >gi|33237450|gb|AAP99518.1| Ribosomal
MAAASAITAVSGVVLPQTFLSPRSPPPQVLAVASSFRRLSLCASPRRITHIIPRADASAEAGEPEPVTASDESEEEVAEGSVAVAEGEEPTPPSKPKVKFGEIIGILNKQFIEEAEKVKTVPDLRPGDIIELRMQRPNKRRLSLFKGIIIAKHKAGVHTTIRVRRIIAGVGVEITFPVYSPRIKEITVIRHKKVRRAKLYYLKDKLPRFSTFK

SEQ ID NO: 12681 - DNA, 1038 bp, Zea mays subsp. mays
  misc_feature (1)..(1038): Ceres Seq. ID no. 12344880
  misc_feature: MA Experiment ID: 108528 Result: Up-regulated in Transcription
  misc_feature: MA Experiment 108528 PARAMETER Experiment Name: Zm_Imbibed_Seeds_P Parameter: Age (day) Value: 5 vs. 2
  misc_feature: MA Experiment 108528 PARAMETER Experiment Name: Zm_Imbibed_Seeds_P Parameter: Organism Value: Zea mays
  misc_feature: MA Experiment 108528 PARAMETER Experiment Name: Zm_Imbibed_Seeds_P Parameter: Plant Line Value: 35A19
  misc_feature: MA Experiment 108528 PARAMETER Experiment Name: Zm_Imbibed_Seeds_P Parameter: Tissue Value: Aerial vs. Embryo
  misc_feature: MA Experiment ID: 108530 Result: Up-regulated in Transcription
  misc_feature: MA Experiment 108530 PARAMETER Experiment Name: Zm_Imbibed_Seeds_P Parameter: Age (day) Value: 6 vs. 2
  misc_feature: MA Experiment 108530 PARAMETER Experiment Name: Zm_Imbibed_Seeds_P Parameter: Organism Value: Zea mays
  misc_feature: MA Experiment 108530 PARAMETER Experiment Name: Zm_Imbibed_Seeds_P Parameter: Plant Line Value: 35A19
  misc_feature: MA Experiment 108530 PARAMETER Experiment Name: Zm_Imbibed_Seeds_P Parameter: Tissue Value: Aerial vs. Embryo
  misc_feature: MA Experiment ID: 108545 Result: Up-regulated in Transcription
  misc_feature: MA Experiment 108545 PARAMETER Experiment Name: Zm_Imbibed_Seeds_P Parameter: Age (day) Value: 3 vs. 2
  misc_feature: MA Experiment 108545 PARAMETER Experiment Name: Zm_Imbibed_Seeds_P Parameter: Organism Value: Zea mays
  misc_feature: MA Experiment 108545 PARAMETER Experiment Name: Zm_Imbibed_Seeds_P Parameter: Plant Line Value: 35A19
  misc_feature: MA Experiment 108545 PARAMETER Experiment Name: Zm_Imbibed_Seeds_P Parameter: Tissue Value: Aerial vs. Embryo
  misc_feature: MA Experiment ID: 108547 Result: Up-regulated in Transcription
  misc_feature: MA Experiment 108547 PARAMETER Experiment Name: Zm_Imbibed_Seeds_P Parameter: Age (day) Value: 4 vs. 2
  misc_feature: MA Experiment 108547 PARAMETER Experiment Name: Zm_Imbibed_Seeds_P Parameter: Organism Value: Zea mays
  misc_feature: MA Experiment 108547 PARAMETER Experiment Name: Zm_Imbibed_Seeds_P Parameter: Plant Line Value: 35A19
  misc_feature: MA Experiment 108547 PARAMETER Experiment Name: Zm_Imbibed_Seeds_P Parameter: Tissue Value: Aerial vs. Embryo
  misc_feature: MA Experiment ID: 20000480 Result: Down-regulated in Transcription
  misc_feature: MA Experiment 20000480 PARAMETER Experiment Name: Zm_Drought_P Parameter: Age (day) Value: 11
  misc_feature: MA Experiment 20000480 PARAMETER Experiment Name: Zm_Drought_P Parameter: Organism Value: Zea mays
  misc_feature: MA Experiment 20000480 PARAMETER Experiment Name: Zm_Drought_P Parameter: Plant Line Value: 35A19
  misc_feature: MA Experiment 20000480 PARAMETER Experiment Name: Zm_Drought_P Parameter: Timepoint (hr) Value: 72
  misc_feature: MA Experiment 20000480 PARAMETER Experiment Name: Zm_Drought_P Parameter: Tissue Value: Aerial
  misc_feature: MA Experiment 20000480 PARAMETER Experiment Name: Zm_Drought_P Parameter: Treatment Value: Drought vs. No Drought
  misc_feature: MA Experiment ID: 20000492 Result: Up-regulated in Transcription
  misc_feature: MA Experiment 20000492 PARAMETER Experiment Name: Zm_Hybrid_Seed_Dev_P Parameter: DAP Value: 12
  misc_feature: MA Experiment 20000492 PARAMETER Experiment Name: Zm_Hybrid_Seed_Dev_P Parameter: Organism Value: Zea mays
  misc_feature: MA Experiment 20000492 PARAMETER Experiment Name: Zm_Hybrid_Seed_Dev_P Parameter: Plant Line Value: 35A19
  misc_feature: MA Experiment 20000492 PARAMETER Experiment Name: Zm_Hybrid_Seed_Dev_P Parameter: Tissue Value: Fert Kernel vs. Unfert Floret
  misc_feature: MA Experiment ID: 20000626 Result: Down-regulated in Transcription
  misc_feature: MA Experiment 20000626 PARAMETER Experiment Name: Zm_Herbicide-Treatments_P Parameter: Timepoint (hr) Value: 12
  misc_feature: MA Experiment 20000626 PARAMETER Experiment Name: Zm_Herbicide-Treatments_P Parameter: Tissue Value: Aerial
  misc_feature: MA Experiment 20000626 PARAMETER Experiment Name: Zm_Herbicide-Treatments_P Parameter: Treatment Value: Roundup vs. No Treatment
aaggcaggctgcgacgtcacggtttggaacaggaccaagagcaagtgcgatcccctcctcagtctcggtgccaagtacgagcctacaccggcccaagtcgcttcatcttgtgacgtgacattcgcgatgctcgctgatccacaaagcgcggctgaggttgcatgtgggtccagtggagctgctgaagggttggcccctgggaaaggctatgtcgatgtgtcgacggttgatggtgctacatccaagctgattggtgaacgcattacaagtactggagcatctttccttgaggctccagtttcaggctcgaaaaaaccagcagaagatgggctgctcatctttcttactgcaggtgatgagtccttgtacaagagagtggcgcccctccttgatgtcatggggaagtcaaggttttatcttggcgatgtaggcaatggtgctgcaatgaagctcgtggttaacatggtcatgggggagcatgatggtttccttctcagaagggttgctcctgagtgaaaaagtcggtttagacccgaatactctcgtcgaggttatttcccagggtgctatcagtgcccccatgttctctctcaagggcccatccatggttaaagctgcatatcctcctgcatttcctctgaagcatcaacagaaggacttgaggctcgcattggccctggcggaatcggtgtcccagtccattcctacagttgcagctgcgaacgagctgtacaaggctgcaaaatcgctcggccttagtgaccacgacttctcggcggttattgaagcgctgaaagccaaagtgcagagccagagctcacaatagtagttgcctgttcagcagagctcacagtagttgttgcctcttcagcagctaccattgaggcagcattttgtctcgatggatgaagttgacacttaggaaaatttctcaagatcgctacagaaaagtctcagaacaatacaatttctgtattcgtaaatattttctcaaacatcacaacgacgacatttccttaaggaagaaaaaaaactttc

SEQ ID NO: 12682 - protein, 171 aa, Zea mays subsp. mays
  peptide (1)..(171): Ceres Seq. ID no. 12344881
  misc_feature (1)..(142): Pfam Name: NAD binding domain of 6-phosphogluconate dehydrogenase Pfam Description: NAD binding domain of 6-phosphogluconate
  misc_feature (1)..(158): Homolog of NCBI NO: 18394513 NR Description: Expressed protein; protein id: At1g17650.1, by cDNA: 17110., supported by cDNA: gi_20260471 [Arabidopsis >gi|20260472|gb|AAM13134.1| unknown protein [Arabidopsis
  misc_feature (52)..(158): Homolog of NCBI NO: 8778467 NR Description: F1L3.35 [Arabidopsis thaliana]
  misc_feature (1)..(54): Homolog of NCBI NO: 8778467 NR Description: F1L3.35 [Arabidopsis thaliana]
  misc_feature (2)..(158): Homolog of NCBI NO: 34914300 NR Description: putative gamma hydroxybutyrate dehydrogenase
  misc_feature (1)..(158): Homolog of NCBI NO: 15375068 NR Description: gamma hydroxybutyrate dehydrogenase [Arabidopsis
  misc_feature (1)..(158): Homolog of NCBI NO: 18404556 NR Description: expressed protein; protein id: At3g25530.1, by cDNA: gi_15146313, supported by cDNA: gi_15375067 [Arabidopsis
  misc_feature (3)..(158): Homolog of NCBI NO: 29368238 NR Description: gamma hydroxybutyrate dehydrogenase-like protein
  misc_feature (1)..(158): Homolog of NCBI NO: 23054597 NR Description: hypothetical protein [Geobacter metallireducens]
  misc_feature (1)..(159): Homolog of NCBI NO: 39996474 NR Description: 3-hydroxyisobutyrate dehydrogenase family protein
  misc_feature (1)..(158): Homolog of NCBI NO: 13277568 NR Description: Similar to RIKEN cDNA 3930401K13 gene [Homo
KAGCDVTVWNRTKSKCDPLLSLGAKYEPTPAQVASSCDVTFAMLADPQSAAEVACGSSGAAEGLAPGKGYVDVSTVDGATSKLIGERITSTGASFLEAPVSGSKKPAEDGLLIFLTAGDESLYKRVAPLLDVMGKSRFYLGDVGNGAAMKLVVNMVMGEHDGFLLRRVAPE

SEQ ID NO: 12683 - protein, 129 aa, Zea mays subsp. mays
  peptide (1)..(129): Ceres Seq. ID no. 12344882
  misc_feature (1)..(100): Pfam Name: NAD binding domain of 6-phosphogluconate dehydrogenase Pfam Description: NAD binding domain of 6-phosphogluconate
  misc_feature (1)..(116): Homolog of NCBI NO: 18394513 NR Description: Expressed protein; protein id: At1g17650.1, by cDNA: 17110., supported by cDNA: gi_20260471 [Arabidopsis >gi|20260472|gb|AAM13134.1| unknown protein [Arabidopsis
  misc_feature (10)..(116): Homolog of NCBI NO: 8778467 NR Description: F1L3.35 [Arabidopsis thaliana]
  misc_feature (1)..(12): Homolog of NCBI NO: 8778467 NR Description: F1L3.35 [Arabidopsis thaliana]
  misc_feature (1)..(116): Homolog of NCBI NO: 34914300 NR Description: putative gamma hydroxybutyrate dehydrogenase
  misc_feature (1)..(116): Homolog of NCBI NO: 15375068 NR Description: gamma hydroxybutyrate dehydrogenase [Arabidopsis
  misc_feature (1)..(116): Homolog of NCBI NO: 18404556 NR Description: expressed protein; protein id: At3g25530.1, by cDNA: gi_15146313, supported by cDNA: gi_15375067 [Arabidopsis
  misc_feature (1)..(116): Homolog of NCBI NO: 29368238 NR Description: gamma hydroxybutyrate dehydrogenase-like protein
  misc_feature (1)..(116): Homolog of NCBI NO: 23054597 NR Description: hypothetical protein [Geobacter metallireducens]
  misc_feature (1)..(117): Homolog of NCBI NO: 39996474 NR Description: 3-hydroxyisobutyrate dehydrogenase family protein
  misc_feature (1)..(116): Homolog of NCBI NO: 13277568 NR Description: Similar to RIKEN cDNA 3930401K13 gene [Homo
MLADPQSAAEVACGSSGAAEGLAPGKGYVDVSTVDGATSKLIGERITSTGASFLEAPVSGSKKPAEDGLLIFLTAGDESLYKRVAPLLDVMGKSRFYLGDVGNGAAMKLVVNMVMGEHDGFLLRRVAPE

SEQ ID NO: 12684 - protein, 115 aa, Zea mays subsp. mays
  peptide (1)..(115): Ceres Seq. ID no. 12344883
  misc_feature (1)..(107): Homolog of NCBI NO: 18394513 NR Description: Expressed protein; protein id: At1g17650.1, by cDNA: 17110., supported by cDNA: gi_20260471 [Arabidopsis >gi|20260472|gb|AAM13134.1| unknown protein [Arabidopsis
  misc_feature (1)..(107): Homolog of NCBI NO: 8778467 NR Description: F1L3.35 [Arabidopsis thaliana]
  misc_feature (1)..(112): Homolog of NCBI NO: 34914300 NR Description: putative gamma hydroxybutyrate dehydrogenase
  misc_feature (1)..(106): Homolog of NCBI NO: 15375068 NR Description: gamma hydroxybutyrate dehydrogenase [Arabidopsis
  misc_feature (1)..(106): Homolog of NCBI NO: 18404556 NR Description: expressed protein; protein id: At3g25530.1, by cDNA: gi_15146313, supported by cDNA: gi_15375067 [Arabidopsis
  misc_feature (1)..(106): Homolog of NCBI NO: 29368238 NR Description: gamma hydroxybutyrate dehydrogenase-like protein
  misc_feature (1)..(106): Homolog of NCBI NO: 23054597 NR Description: hypothetical protein [Geobacter metallireducens]
  misc_feature (1)..(106): Homolog of NCBI NO: 39996474 NR Description: 3-hydroxyisobutyrate dehydrogenase family protein
  misc_feature (1)..(104): Homolog of NCBI NO: 13277568 NR Description: Similar to RIKEN cDNA 3930401K13 gene [Homo
  misc_feature (1)..(104): Homolog of NCBI NO: 20891625 NR Description: RIKEN cDNA 3930401K13 [Mus musculus]
MMVSFSEGLLLSEKVGLDPNTLVEVISQGAISAPMFSLKGPSMVKAAYPPAFPLKHQQKDLRLALALAESVSQSIPTVAAANELYKAAKSLGLSDHDFSAVIEALKAKVQSQSSQ

SEQ ID NO: 12685 - DNA, 1412 bp, Zea mays subsp. mays; identical to SEQ ID NO: 7183
  misc_feature (1)..(1412): Ceres Seq. ID no. 12556700
  misc_feature: MA Experiment ID: 108504 Result: Down-regulated in Transcription
  misc_feature: MA Experiment 108504 PARAMETER Experiment Name: Zm_Drought_P Parameter: Age (day) Value: 8
  misc_feature: MA Experiment 108504 PARAMETER Experiment Name: Zm_Drought_P Parameter: Organism Value: Zea mays
  misc_feature: MA Experiment 108504 PARAMETER Experiment Name: Zm_Drought_P Parameter: Plant Line Value: 35A19
  misc_feature: MA Experiment 108504 PARAMETER Experiment Name: Zm_Drought_P Parameter: Timepoint (hr) Value: 12
  misc_feature: MA Experiment 108504 PARAMETER Experiment Name: Zm_Drought_P Parameter: Tissue Value: Aerial
  misc_feature: MA Experiment 108504 PARAMETER Experiment Name: Zm_Drought_P Parameter: Treatment Value: Drought vs. No Drought
  misc_feature: MA Experiment ID: 108535 Result: Up-regulated in Transcription
  misc_feature: MA Experiment 108535 PARAMETER Experiment Name: Zm_Meristem_P Parameter: Age (day) Value: 8
  misc_feature: MA Experiment 108535 PARAMETER Experiment Name: Zm_Meristem_P Parameter: Organism Value: Zea mays
  misc_feature: MA Experiment 108535 PARAMETER Experiment Name: Zm_Meristem_P Parameter: Plant Line Value: 35A19
  misc_feature: MA Experiment 108535 PARAMETER Experiment Name: Zm_Meristem_P Parameter: Tissue Value: Root Meristem vs. Above Root Meristem
  misc_feature: MA Experiment ID: 108536 Result: Down-regulated in Transcription
  misc_feature: MA Experiment 108536 PARAMETER Experiment Name: Zm_Meristem_P Parameter: Age (day) Value: 8
  misc_feature: MA Experiment 108536 PARAMETER Experiment Name: Zm_Meristem_P Parameter: Organism Value: Zea mays
  misc_feature: MA Experiment 108536 PARAMETER Experiment Name: Zm_Meristem_P Parameter: Plant Line Value: 35A19
  misc_feature: MA Experiment 108536 PARAMETER Experiment Name: Zm_Meristem_P Parameter: Tissue Value: Shoot Meristem vs. Above Shoot Meristem
  misc_feature: MA Experiment ID: 108556 Result: Down-regulated in Transcription
  misc_feature: MA Experiment 108556 PARAMETER Experiment Name: Zm_Drought_P Parameter: Age (day) Value: 9
  misc_feature: MA Experiment 108556 PARAMETER Experiment Name: Zm_Drought_P Parameter: Organism Value: Zea mays
  misc_feature: MA Experiment 108556 PARAMETER Experiment Name: Zm_Drought_P Parameter: Plant Line Value: 35A19
  misc_feature: MA Experiment 108556 PARAMETER Experiment Name: Zm_Drought_P Parameter: Timepoint (hr) Value: 24
  misc_feature: MA Experiment 108556 PARAMETER Experiment Name: Zm_Drought_P Parameter: Tissue Value: Aerial
  misc_feature: MA Experiment 108556 PARAMETER Experiment Name: Zm_Drought_P Parameter: Treatment Value: Drought vs. No Drought
  misc_feature: MA Experiment ID: 20000108 Result: Up-regulated in Transcription
  misc_feature: MA Experiment 20000108 PARAMETER Experiment Name: Zm_Root-Tips_P Parameter: Age (day) Value: 12
  misc_feature: MA Experiment 20000108 PARAMETER Experiment Name: Zm_Root-Tips_P Parameter: Organism Value: Zea mays
  misc_feature: MA Experiment 20000108 PARAMETER Experiment Name: Zm_Root-Tips_P Parameter: Tissue Value: Root tips vs. Root mid region    35
  misc_feature: MA Experiment 20000108 PARAMETER Experiment Name: Zm_Root-Tips_P Parameter: Tissue Value: Root tips vs. Root mid region   Sequence Listing-Misc Features (4)
  misc_feature: MA Experiment ID: 20000479 Result: Down-regulated in Transcription
  misc_feature: MA Experiment 20000479 PARAMETER Experiment Name: Zm_Drought_P Parameter: Age (day) Value: 10
  misc_feature: MA Experiment 20000479 PARAMETER Experiment Name: Zm_Drought_P Parameter: Organism Value: Zea mays
  misc_feature: MA Experiment 20000479 PARAMETER Experiment Name: Zm_Drought_P Parameter: Plant Line Value: 35A19
  misc_feature: MA Experiment 20000479 PARAMETER Experiment Name: Zm_Drought_P Parameter: Timepoint (hr) Value: 48
  misc_feature: MA Experiment 20000479 PARAMETER Experiment Name: Zm_Drought_P Parameter: Tissue Value: Aerial
  misc_feature: MA Experiment 20000479 PARAMETER Experiment Name: Zm_Drought_P Parameter: Treatment Value: Drought vs. No Drought
  misc_feature: MA Experiment ID: 20000480 Result: Down-regulated in Transcription
  misc_feature: MA Experiment 20000480 PARAMETER Experiment Name: Zm_Drought_P Parameter: Age (day) Value: 11
  misc_feature: MA Experiment 20000480 PARAMETER Experiment Name: Zm_Drought_P Parameter: Organism Value: Zea mays
  misc_feature: MA Experiment 20000480 PARAMETER Experiment Name: Zm_Drought_P Parameter: Plant Line Value: 35A19
  misc_feature: MA Experiment 20000480 PARAMETER Experiment Name: Zm_Drought_P Parameter: Timepoint (hr) Value: 72
  misc_feature: MA Experiment 20000480 PARAMETER Experiment Name: Zm_Drought_P Parameter: Tissue Value: Aerial
  misc_feature: MA Experiment 20000480 PARAMETER Experiment Name: Zm_Drought_P Parameter: Treatment Value: Drought vs. No Drought
  misc_feature: MA Experiment ID: 20000492 Result: Up-regulated in Transcription
  misc_feature: MA Experiment 20000492 PARAMETER Experiment Name: Zm_Hybrid_Seed_Dev_P Parameter: DAP Value: 12
  misc_feature: MA Experiment 20000492 PARAMETER Experiment Name: Zm_Hybrid_Seed_Dev_P Parameter: Organism Value: Zea mays
  misc_feature: MA Experiment 20000492 PARAMETER Experiment Name: Zm_Hybrid_Seed_Dev_P Parameter: Plant Line Value: 35A19
  misc_feature: MA Experiment 20000492 PARAMETER Experiment Name: Zm_Hybrid_Seed_Dev_P Parameter: Tissue Value: Fert Kernel vs. Unfert Floret

SEQ ID NO: 12686 - protein, 365 aa, Zea mays subsp. mays; identical to SEQ ID NO: 7184
  peptide (1)..(365): Ceres Seq. ID no. 12556701
  misc_feature (69)..(365): Homolog of NCBI NO: 2130089 NR Description: 2-oxoglutarate/malate translocator (clone OMT103),
  misc_feature (69)..(365): Homolog of NCBI NO: 2130090 NR Description: 2-oxoglutarate/malate translocator (clones OMT134
  misc_feature (72)..(365): Homolog of NCBI NO: 19913109 NR Description: dicarboxylate/tricarboxylate carrier [Nicotiana
  misc_feature (77)..(365): Homolog of NCBI NO: 7489246 NR Description: oxoglutarate/malate translocator - potato
  misc_feature (74)..(365): Homolog of NCBI NO: 15241167 NR Description: mitochondrial 2-oxoglutarate/malate translocator, protein id: At5g19760.1, supported by cDNA: 19510., supported by gi_13430481, supported by cDNA: gi_15810536 [Arabidopsis
  misc_feature (77)..(365): Homolog of NCBI NO: 10798640 NR Description: mitochondrial 2-oxoglutarate/malate carrier
  misc_feature (77)..(365): Homolog of NCBI NO: 19913105 NR Description: dicarboxylate/tricarboxylate carrier [Nicotiana
  misc_feature (77)..(365): Homolog of NCBI NO: 19913107 NR Description: dicarboxylate/tricarboxylate carrier [Nicotiana
  misc_feature (141)..(365): Homolog of NCBI NO: 19913111 NR Description: dicarboxylate/tricarboxylate carrier [Nicotiana
  misc_feature (148)..(365): Homolog of NCBI NO: 2331139 NR Description: 2-oxoglutarate/malate translocator [Oryza sativa]
  misc_feature (74)..(365): Homolog of NCBI NO: 15241167 NR Description: mitochondrial 2-oxoglutarate/malate translocator, protein id: At5g19760.1, supported by cDNA: 19510., supported by gi_13430481, supported by cDNA: gi_15810536 [Arabidopsis
  misc_feature (77)..(365): Homolog of NCBI NO: 10798640 NR Description: mitochondrial 2-oxoglutarate/malate carrier
  misc_feature (77)..(365): Homolog of NCBI NO: 19913105 NR Description: dicarboxylate/tricarboxylate carrier [Nicotiana
  misc_feature (77)..(365): Homolog of NCBI NO: 19913107 NR Description: dicarboxylate/tricarboxylate carrier [Nicotiana
  misc_feature (141)..(365): Homolog of NCBI NO: 19913111 NR Description: dicarboxylate/tricarboxylate carrier [Nicotiana
  misc_feature (148)..(365): Homolog of NCBI NO: 2331139 NR Description: 2-oxoglutarate/malate translocator [Oryza sativa]
  misc_feature (69)..(365): Homolog of NCBI NO: 2130089 NR Description: 2-oxoglutarate/malate translocator (clone OMT103),
  misc_feature (69)..(365): Homolog of NCBI NO: 2130090 NR Description: 2-oxoglutarate/malate translocator (clones OMT134
  misc_feature (72)..(365): Homolog of NCBI NO: 19913109 NR Description: dicarboxylate/tricarboxylate carrier [Nicotiana
  misc_feature (77)..(365): Homolog of NCBI NO: 7489246 NR Description: oxoglutarate/malate translocator - potato

SEQ ID NO: 12687 - protein, 273 aa, Zea mays subsp. mays; identical to SEQ ID NO: 7185
  peptide (1)..(273): Ceres Seq. ID no. 12556702
  misc_feature (1)..(273): Homolog of NCBI NO: 2130089 NR Description: 2-oxoglutarate/malate translocator (clone OMT103),
  misc_feature (1)..(273): Homolog of NCBI NO: 2130090 NR Description: 2-oxoglutarate/malate translocator (clones OMT134
  misc_feature (1)..(273): Homolog of NCBI NO: 19913109 NR Description: dicarboxylate/tricarboxylate carrier [Nicotiana
  misc_feature (1)..(273): Homolog of NCBI NO: 7489246 NR Description: oxoglutarate/malate translocator - potato
  misc_feature (1)..(273): Homolog of NCBI NO: 15241167 NR Description: mitochondrial 2-oxoglutarate/malate translocator, protein id: At5g19760.1, supported by cDNA: 19510., supported by gi_13430481, supported by cDNA: gi_15810536 [Arabidopsis
  misc_feature (1)..(273): Homolog of NCBI NO: 10798640 NR Description: mitochondrial 2-oxoglutarate/malate carrier
  misc_feature (1)..(273): Homolog of NCBI NO: 19913105 NR Description: dicarboxylate/tricarboxylate carrier [Nicotiana
  misc_feature (1)..(273): Homolog of NCBI NO: 19913107 NR Description: dicarboxylate/tricarboxylate carrier [Nicotiana
  misc_feature (49)..(273): Homolog of NCBI NO: 19913111 NR Description: dicarboxylate/tricarboxylate carrier [Nicotiana
  misc_feature (56)..(273): Homolog of NCBI NO: 2331139 NR Description: 2-oxoglutarate/malate translocator [Oryza sativa]
  misc_feature (1)..(273): Homolog of NCBI NO: 2130089 NR Description: 2-oxoglutarate/malate translocator (clone OMT103),
  misc_feature (1)..(273): Homolog of NCBI NO: 2130090 NR Description: 2-oxoglutarate/malate translocator (clones OMT134
  misc_feature (1)..(273): Homolog of NCBI NO: 19913109 NR Description: dicarboxylate/tricarboxylate carrier [Nicotiana
  misc_feature (1)..(273): Homolog of NCBI NO: 7489246 NR Description: oxoglutarate/malate translocator - potato
  misc_feature (1)..(273): Homolog of NCBI NO: 15241167 NR Description: mitochondrial 2-oxoglutarate/malate translocator, protein id: At5g19760.1, supported by cDNA: 19510., supported by gi_13430481, supported by cDNA: gi_15810536 [Arabidopsis
  misc_feature (1)..(273): Homolog of NCBI NO: 10798640 NR Description: mitochondrial 2-oxoglutarate/malate carrier
  misc_feature (1)..(273): Homolog of NCBI NO: 19913105 NR Description: dicarboxylate/tricarboxylate carrier [Nicotiana
  misc_feature (1)..(273): Homolog of NCBI NO: 19913107 NR Description: dicarboxylate/tricarboxylate carrier [Nicotiana
  misc_feature (49)..(273): Homolog of NCBI NO: 19913111 NR Description: dicarboxylate/tricarboxylate carrier [Nicotiana
  misc_feature (56)..(273): Homolog of NCBI NO: 2331139 NR Description: 2-oxoglutarate/malate translocator [Oryza sativa]

SEQ ID NO: 12688 - protein, 262 aa, Zea mays subsp. mays; identical to SEQ ID NO: 7186
  peptide (1)..(262): Ceres Seq. ID no. 12556703
  misc_feature (1)..(262): Homolog of NCBI NO: 2130089 NR Description: 2-oxoglutarate/malate translocator (clone OMT103),
  misc_feature (1)..(262): Homolog of NCBI NO: 2130090 NR Description: 2-oxoglutarate/malate translocator (clones OMT134
  misc_feature (1)..(262): Homolog of NCBI NO: 19913109 NR Description: dicarboxylate/tricarboxylate carrier [Nicotiana
  misc_feature (1)..(262): Homolog of NCBI NO: 7489246 NR Description: oxoglutarate/malate translocator - potato
  misc_feature (1)..(262): Homolog of NCBI NO: 15241167 NR Description: mitochondrial 2-oxoglutarate/malate translocator, protein id: At5g19760.1, supported by cDNA: 19510., supported by gi_13430481, supported by cDNA: gi_15810536 [Arabidopsis
  misc_feature (1)..(262): Homolog of NCBI NO: 10798640 NR Description: mitochondrial 2-oxoglutarate/malate carrier
  misc_feature (1)..(262): Homolog of NCBI NO: 19913105 NR Description: dicarboxylate/tricarboxylate carrier [Nicotiana
  misc_feature (1)..(262): Homolog of NCBI NO: 19913107 NR Description: dicarboxylate/tricarboxylate carrier [Nicotiana
  misc_feature (38)..(262): Homolog of NCBI NO: 19913111 NR Description: dicarboxylate/tricarboxylate carrier [Nicotiana
  misc_feature (45)..(262): Homolog of NCBI NO: 2331139 NR Description: 2-oxoglutarate/malate translocator [Oryza sativa]
  misc_feature (1)..(262): Homolog of NCBI NO: 2130089 NR Description: 2-oxoglutarate/malate translocator (clone OMT103),
  misc_feature (1)..(262): Homolog of NCBI NO: 2130090 NR Description: 2-oxoglutarate/malate translocator (clones OMT134
  misc_feature (1)..(262): Homolog of NCBI NO: 19913109 NR Description: dicarboxylate/tricarboxylate carrier [Nicotiana
  misc_feature (1)..(262): Homolog of NCBI NO: 7489246 NR Description: oxoglutarate/malate translocator - potato
  misc_feature (1)..(262): Homolog of NCBI NO: 15241167 NR Description: mitochondrial 2-oxoglutarate/malate translocator, protein id: At5g19760.1, supported by cDNA: 19510., supported by gi_13430481, supported by cDNA: gi_15810536 [Arabidopsis
  misc_feature (1)..(262): Homolog of NCBI NO: 10798640 NR Description: mitochondrial 2-oxoglutarate/malate carrier
  misc_feature (1)..(262): Homolog of NCBI NO: 19913105 NR Description: dicarboxylate/tricarboxylate carrier [Nicotiana
  misc_feature (1)..(262): Homolog of NCBI NO: 19913107 NR Description: dicarboxylate/tricarboxylate carrier [Nicotiana
  misc_feature (38)..(262): Homolog of NCBI NO: 19913111 NR Description: dicarboxylate/tricarboxylate carrier [Nicotiana
  misc_feature (45)..(262): Homolog of NCBI NO: 2331139 NR Description: 2-oxoglutarate/malate translocator [Oryza sativa]

SEQ ID NO: 12689 - DNA, 1980 bp, Zea mays subsp. mays
  misc_feature (1)..(1980): Ceres Seq. ID no. 12450491
  misc_feature: MA Experiment ID: 108535 Result: Up-regulated in Transcription
  misc_feature: MA Experiment 108535 PARAMETER Experiment Name: Zm_Meristem_P Parameter: Age (day) Value: 8
  misc_feature: MA Experiment 108535 PARAMETER Experiment Name: Zm_Meristem_P Parameter: Organism Value: Zea mays
  misc_feature: MA Experiment 108535 PARAMETER Experiment Name: Zm_Meristem_P Parameter: Plant Line Value: 35A19
  misc_feature: MA Experiment 108535 PARAMETER Experiment Name: Zm_Meristem_P Parameter: Tissue Value: Root Meristem vs. Above Root Meristem
  misc_feature: MA Experiment ID: 108544 Result: Down-regulated in Transcription
  misc_feature: MA Experiment ID: 108689 Result: Down-regulated in Transcription
  misc_feature: MA Experiment 108689 PARAMETER Experiment Name: Zm_Drought_Roots_P Parameter: Age (day) Value: 9
  misc_feature: MA Experiment 108689 PARAMETER Experiment Name: Zm_Drought_Roots_P Parameter: Organism Value: Zea mays
  misc_feature: MA Experiment 108689 PARAMETER Experiment Name: Zm_Drought_Roots_P Parameter: Plant Line Value: 35A19
  misc_feature: MA Experiment 108689 PARAMETER Experiment Name: Zm_Drought_Roots_P Parameter: Timepoint (hr) Value: 24
  misc_feature: MA Experiment 108689 PARAMETER Experiment Name: Zm_Drought_Roots_P Parameter: Tissue Value: Roots
  misc_feature: MA Experiment 108689 PARAMETER Experiment Name: Zm_Drought_Roots_P Parameter: Treatment Value: Drought vs. No Drought
  misc_feature: MA Experiment ID: 20000534 Result: Down-regulated in Transcription
  misc_feature: MA Experiment 20000534 PARAMETER Experiment Name: Zm_Hybrid_Pollen_P Parameter: Age (day) Value: 8
  misc_feature: MA Experiment 20000534 PARAMETER Experiment Name: Zm_Hybrid_Pollen_P Parameter: Organism Value: Zea mays
  misc_feature: MA Experiment 20000534 PARAMETER Experiment Name: Zm_Hybrid_Pollen_P Parameter: Plant Line Value: 35A19
  misc_feature: MA Experiment 20000534 PARAMETER Experiment Name: Zm_Hybrid_Pollen_P Parameter: Tissue Value: Pollen vs. Aerial
aaaccttctcccctttcctcagaccccaggccccagcccggcaagcagacatgggcaaccgtgcgtcgcgccaccaccgccaagccgccgagcagcaaccggcgacgccgaccctgccgaagccccagccccagatccagccgccgcctccgcctccgccgacgcagacgcagcagtaccagcaggcgccgccgcagtcgcagcagaagccgaagccggcggcggacgtgggggcggtggggcgcgtgctggggcggcccatggaggacgtgcgcgcgacctacactttcggccgcgagctcgggcggggccagttcggggtcacctacctcgtcacgcactcggagaccgggcagcgcttcgcctgcaagtccatcgccacgcggaagctcgtccaccgcgacgacattgaggacgtgcgccgggaggtgcagatcatgcaccacctcacgggccaccgcaacatcgtcgagctccggggagcatacgaggacaggcactcggtcaaccttgttatggagctctgcgagggcggggagctcttcgaccgcatcatagccaagggccactacaccgagcgagccgccgcctcgctctgccgcgagatcgtcgccgtcgtccacagctgccactccatgggggtcttccatcgggatctcaagcccgagaacttcctgttcctcaataacaaggaggactccccgctcaaggccacggacttcggtctctccgtcttcttcaagcacggggagacgtttaaggatcttgtgggaagtgcatattatgttgctcctgaggtactgaaacggaaatatggggcagaggctgacatatggagtgctggggtcattctttacatccttctgtctggtgttcctcctttttgggcagagaatgaggatggcatatttgatgctgtcttgcgcggtcacatcgatttctcttctgacccttggccttcaatatccaatggtgcaaaggatttggttaagaagatgctgcgacaagacccaaaagaacgcctgactgctgctgaaattttgaaccacccatggattagagaggatggagaggccccagataagccacttgacattactgtcattggtagaatgaaacagttcagggcaatgaacaagctcaagaaagttgcattgaaggttgtggctgagaacttatcagatgaagagattatgggcctaaaagaaatgttcagatccctggatacagataacagtgggacaattactcttgaagagctaagatctggtttaccaaaacttggtacaaaaatttctgaatcagaaattaaacaattgatggaggcggctgatgttgatggaaatggtaccattgattatgcggagtttatatcagccacaatgcatttgaatagattggagaaggaagaccacatactcaaagcttttgaatatttcgataaggatcacagcggatacataaccgtagatgagttggaagaagctttgaagaagtatgatatgggagatgacaaaactataaaagaaatcattgctgaagtagatacagatcatgatggaagaattaattaccaggagtttgttgccatgatgaggaacaacagccctgagattgttccaaatcggaggcgcatgttctaactgtcatggacaatcacattgaatactttcaagaacaatctgcccttagacataatctttgtcccattttctttttggaacagccgttaagaagactccttaatttgagatccatgtctctgctgcccggacctgtttgtcccaaaatagggtggtgttatagtgattcgtacttgatgctttgagcttcatggactcttgcgtggcaatgtttatccccattgtacgtctggttgttctgctgcttcgatctgaggctttctttaggtgtaaacggatatctgaattattaggataaatttaatattttaaaatagatatgtataaaatttgatgc

SEQ ID NO: 12690 - protein, 546 aa, Zea mays subsp. mays
  peptide (1)..(546): Ceres Seq. ID no. 12450492
  misc_feature (94)..(352): Pfam Name: Protein kinase domain Pfam Description: Protein kinase domain
  misc_feature (94)..(352): Pfam Name: Protein kinase domain Pfam Description: Protein kinase domain
  misc_feature (80)..(545): Homolog of NCBI NO: 15236560 NR Description: calcium-dependent protein kinase (CDPK6); protein At4g23650.1, supported by cDNA: 37278., supported by cDNA: supported by cDNA: gi_15450436, supported by cDNA: gi_17386099,
  misc_feature (80)..(545): Homolog of NCBI NO: 15450437 NR Description: AT4g23650/F9D16_120 [Arabidopsis thaliana]
  misc_feature (25)..(544): Homolog of NCBI NO: 14970920 NR Description: calcium dependent calmodulin independent protein
  misc_feature (17)..(544): Homolog of NCBI NO: 18175903 NR Description: putative calcium-dependent protein kinase
  misc_feature (17)..(544): Homolog of NCBI NO: 15239888 NR Description: calcium-dependent protein kinase; protein id:
  misc_feature (80)..(545): Homolog of NCBI NO: 15450437 NR Description: AT4g23650/F9D16_120 [Arabidopsis thaliana]
  misc_feature (17)..(544): Homolog of NCBI NO: 18175903 NR Description: putative calcium-dependent protein kinase
  misc_feature (12)..(532): Homolog of NCBI NO: 23616997 NR Description: CDP2_ORYSA Calcium-dependent protein kinase
  misc_feature (21)..(535): Homolog of NCBI NO: 7428009 NR Description: calcium-dependent protein kinase (EC 2.7.1.-) 1 -
  misc_feature (80)..(544): Homolog of NCBI NO: 5162877 NR Description: calcium-dependent protein kinase [Marchantia
  misc_feature (80)..(544): Homolog of NCBI NO: 5162878 NR Description: calcium-dependent protein kinase [Marchantia
  misc_feature (63)..(544): Homolog of NCBI NO: 15239716 NR Description: calcium-dependent protein kinase - like; protein
  misc_feature (17)..(544): Homolog of NCBI NO: 15239888 NR Description: calcium-dependent protein kinase; protein id:
  misc_feature (25)..(544): Homolog of NCBI NO: 14970920 NR Description: calcium dependent calmodulin independent protein
  misc_feature (80)..(545): Homolog of NCBI NO: 15236560 NR Description: calcium-dependent protein kinase (CDPK6); protein At4g23650.1, supported by cDNA: 37278., supported by cDNA: supported by cDNA: gi_15450436, supported by cDNA: gi_17386099,
  misc_feature (63)..(544): Homolog of NCBI NO: 15239716 NR Description: calcium-dependent protein kinase - like; protein
  misc_feature (80)..(544): Homolog of NCBI NO: 5162878 NR Description: calcium-dependent protein kinase [Marchantia
  misc_feature (80)..(544): Homolog of NCBI NO: 5162877 NR Description: calcium-dependent protein kinase [Marchantia
  misc_feature (21)..(535): Homolog of NCBI NO: 7428009 NR Description: calcium-dependent protein kinase (EC 2.7.1.-) 1 -
  misc_feature (12)..(532): Homolog of NCBI NO: 23616997 NR Description: CDP2_ORYSA Calcium-dependent protein kinase
TFSPFLRPQAPARQADMGNRASRHHRQAAEQQPATPTLPKPQPQIQPPPPPPPTQTQQYQQAPPQSQQKPKPAADVGAVGRVLGRPMEDVRATYTFGRELGRGQFGVTYLVTHSETGQRFACKSIATRKLVHRDDIEDVRREVQIMHHLTGHRNIVELRGAYEDRHSVNLVMELCEGGELFDRIIAKGHYTERAAASLCREIVAVVHSCHSMGVFHRDLKPENFLFLNNKEDSPLKATDFGLSVFFKHGETFKDLVGSAYYVAPEVLKRKYGAEADIWSAGVILYILLSGVPPFWAENEDGIFDAVLRGHIDFSSDPWPSISNGAKDLVKKMLRQDPKERLTAAEILNHPWIREDGEAPDKPLDITVIGRMKQFRAMNKLKKVALKVVAENLSDEEIMGLKEMFRSLDTDNSGTITLEELRSGLPKLGTKISESEIKQLMEAADVDGNGTIDYAEFISATMHLNRLEKEDHILKAFEYFDKDHSGYITVDELEEALKKYDMGDDKTIKEIIAEVDTDHDGRINYQEFVAMMRNNSPEIVPNRRRMF

SEQ ID NO: 12691 - protein, 530 aa, Zea mays subsp. mays
  peptide (1)..(530): Ceres Seq. ID no. 12450493
  misc_feature (78)..(336): Pfam Name: Protein kinase domain Pfam Description: Protein kinase domain
  misc_feature (78)..(336): Pfam Name: Protein kinase domain Pfam Description: Protein kinase domain
  misc_feature (64)..(529): Homolog of NCBI NO: 15236560 NR Description: calcium-dependent protein kinase (CDPK6); protein At4g23650.1, supported by cDNA: 37278., supported by cDNA: supported by cDNA: gi_15450436, supported by cDNA: gi_17386099,
  misc_feature (64)..(529): Homolog of NCBI NO: 15450437 NR Description: AT4g23650/F9D16_120 [Arabidopsis thaliana]
  misc_feature (9)..(528): Homolog of NCBI NO: 14970920 NR Description: calcium dependent calmodulin independent protein
  misc_feature (1)..(528): Homolog of NCBI NO: 18175903 NR Description: putative calcium-dependent protein kinase
  misc_feature (1)..(528): Homolog of NCBI NO: 15239888 NR Description: calcium-dependent protein kinase; protein id:
  misc_feature (64)..(529): Homolog of NCBI NO: 15450437 NR Description: AT4g23650/F9D16_120 [Arabidopsis thaliana]
  misc_feature (1)..(528): Homolog of NCBI NO: 18175903 NR Description: putative calcium-dependent protein kinase
  misc_feature (1)..(516): Homolog of NCBI NO: 23616997 NR Description: CDP2_ORYSA Calcium-dependent protein kinase
  misc_feature (5)..(519): Homolog of NCBI NO: 7428009 NR Description: calcium-dependent protein kinase (EC 2.7.1.-) 1 -
  misc_feature (64)..(528): Homolog of NCBI NO: 5162877 NR Description: calcium-dependent protein kinase [Marchantia
  misc_feature (64)..(528): Homolog of NCBI NO: 5162878 NR Description: calcium-dependent protein kinase [Marchantia
  misc_feature (47)..(528): Homolog of NCBI NO: 15239716 NR Description: calcium-dependent protein kinase - like; protein
  misc_feature (1)..(528): Homolog of NCBI NO: 15239888 NR Description: calcium-dependent protein kinase; protein id:
  misc_feature (9)..(528): Homolog of NCBI NO: 14970920 NR Description: calcium dependent calmodulin independent protein
  misc_feature (64)..(529): Homolog of NCBI NO: 15236560 NR Description: calcium-dependent protein kinase (CDPK6); protein At4g23650.1, supported by cDNA: 37278., supported by cDNA: supported by cDNA: gi_15450436, supported by cDNA: gi_17386099,
  misc_feature (47)..(528): Homolog of NCBI NO: 15239716 NR Description: calcium-dependent protein kinase - like; protein
  misc_feature (64)..(528): Homolog of NCBI NO: 5162878 NR Description: calcium-dependent protein kinase [Marchantia
  misc_feature (64)..(528): Homolog of NCBI NO: 5162877 NR Description: calcium-dependent protein kinase [Marchantia
  misc_feature (5)..(519): Homolog of NCBI NO: 7428009 NR Description: calcium-dependent protein kinase (EC 2.7.1.-) 1 -
  misc_feature (1)..(516): Homolog of NCBI NO: 23616997 NR Description: CDP2_ORYSA Calcium-dependent protein kinase
MGNRASRHHRQAAEQQPATPTLPKPQPQIQPPPPPPPTQTQQYQQAPPQSQQKPKPAADVGAVGRVLGRPMEDVRATYTFGRELGRGQFGVTYLVTHSETGQRFACKSIATRKLVHRDDIEDVRREVQIMHHLTGHRNIVELRGAYEDRHSVNLVMELCEGGELFDRIIAKGHYTERAAASLCREIVAVVHSCHSMGVFHRDLKPENFLFLNNKEDSPLKATDFGLSVFFKHGETFKDLVGSAYYVAPEVLKRKYGAEADIWSAGVILYILLSGVPPFWAENEDGIFDAVLRGHIDFSSDPWPSISNGAKDLVKKMLRQDPKERLTAAEILNHPWIREDGEAPDKPLDITVIGRMKQFRAMNKLKKVALKVVAENLSDEEIMGLKEMFRSLDTDNSGTITLEELRSGLPKLGTKISESEIKQLMEAADVDGNGTIDYAEFISATMHLNRLEKEDHILKAFEYFDKDHSGYITVDELEEALKKYDMGDDKTIKEIIAEVDTDHDGRINYQEFVAMMRNNSPEIVPNRRRMF

SEQ ID NO: 12692 - protein, 460 aa, Zea mays subsp. mays
  peptide (1)..(460): Ceres Seq. ID no. 12450494
  misc_feature (8)..(266): Pfam Name: Protein kinase domain Pfam Description: Protein kinase domain
  misc_feature (8)..(266): Pfam Name: Protein kinase domain Pfam Description: Protein kinase domain
  misc_feature (1)..(459): Homolog of NCBI NO: 15236560 NR Description: calcium-dependent protein kinase (CDPK6); protein At4g23650.1, supported by cDNA: 37278., supported by cDNA: supported by cDNA: gi_15450436, supported by cDNA: gi_17386099,
  misc_feature (1)..(459): Homolog of NCBI NO: 15450437 NR Description: AT4g23650/F9D16_120 [Arabidopsis thaliana]
  misc_feature (1)..(458): Homolog of NCBI NO: 14970920 NR Description: calcium dependent calmodulin independent protein
  misc_feature (1)..(458): Homolog of NCBI NO: 18175903 NR Description: putative calcium-dependent protein kinase
  misc_feature (1)..(458): Homolog of NCBI NO: 15239888 NR Description: calcium-dependent protein kinase; protein id:
  misc_feature (1)..(459): Homolog of NCBI NO: 15450437 NR Description: AT4g23650/F9D16_120 [Arabidopsis thaliana]
  misc_feature (1)..(458): Homolog of NCBI NO: 18175903 NR Description: putative calcium-dependent protein kinase
  misc_feature (1)..(446): Homolog of NCBI NO: 23616997 NR Description: CDP2_ORYSA Calcium-dependent protein kinase
  misc_feature (1)..(449): Homolog of NCBI NO: 7428009 NR Description: calcium-dependent protein kinase (EC 2.7.1.-) 1 -
  misc_feature (1)..(458): Homolog of NCBI NO: 5162877 NR Description: calcium-dependent protein kinase [Marchantia
  misc_feature (1)..(458): Homolog of NCBI NO: 5162878 NR Description: calcium-dependent protein kinase [Marchantia
  misc_feature (1)..(458): Homolog of NCBI NO: 15239716 NR Description: calcium-dependent protein kinase - like; protein
  misc_feature (1)..(458): Homolog of NCBI NO: 15239888 NR Description: calcium-dependent protein kinase; protein id:
  misc_feature (1)..(458): Homolog of NCBI NO: 14970920 NR Description: calcium dependent calmodulin independent protein
  misc_feature (1)..(459): Homolog of NCBI NO: 15236560 NR Description: calcium-dependent protein kinase (CDPK6); protein At4g23650.1, supported by cDNA: 37278., supported by cDNA: supported by cDNA: gi_15450436, supported by cDNA: gi_17386099,
  misc_feature (1)..(458): Homolog of NCBI NO: 15239716 NR Description: calcium-dependent protein kinase - like; protein
  misc_feature (1)..(458): Homolog of NCBI NO: 5162878 NR Description: calcium-dependent protein kinase [Marchantia
  misc_feature (1)..(458): Homolog of NCBI NO: 5162877 NR Description: calcium-dependent protein kinase [Marchantia
  misc_feature (1)..(449): Homolog of NCBI NO: 7428009 NR Description: calcium-dependent protein kinase (EC 2.7.1.-) 1 -
  misc_feature (1)..(446): Homolog of NCBI NO: 23616997 NR Description: CDP2_ORYSA Calcium-dependent protein kinase
MEDVRATYTFGRELGRGQFGVTYLVTHSETGQRFACKSIATRKLVHRDDIEDVRREVQIMHHLTGHRNIVELRGAYEDRHSVNLVMELCEGGELFDRIIAKGHYTERAAASLCREIVAVVHSCHSMGVFHRDLKPENFLFLNNKEDSPLKATDFGLSVFFKHGETFKDLVGSAYYVAPEVLKRKYGAEADIWSAGVILYILLSGVPPFWAENEDGIFDAVLRGHIDFSSDPWPSISNGAKDLVKKMLRQDPKERLTAAEILNHPWIREDGEAPDKPLDITVIGRMKQFRAMNKLKKVALKVVAENLSDEEIMGLKEMFRSLDTDNSGTITLEELRSGLPKLGTKISESEIKQLMEAADVDGNGTIDYAEFISATMHLNRLEKEDHILKAFEYFDKDHSGYITVDELEEALKKYDMGDDKTIKEIIAEVDTDHDGRINYQEFVAMMRNNSPEIVPNRRRMF

SEQ ID NO: 12693 - DNA, 1549 bp, Zea mays subsp. mays
  misc_feature (1)..(1549): Ceres Seq. ID no. 12414516
  misc_feature: MA Experiment ID: 108543 Result: Up-regulated in Transcription
atggacacttggacacctgccttctctccttccttccatccattcctccctgtctccgccctcttctcactcccgtaggccgtggtgccgccgccgactgctgggaccgccctacaccaagtgcccaggtcatcttcgggccattcgccggcgacgagcaccaccaggtgtgccaggttgaccgagctatggacagcctgtggcatcttggggacgagctccgcggngcagcccaaggtggtggaggaccgccagtggtctctcatgacgtccaagctggcggagatcaccaggtccaagggcgagaggatgaacactgtccctgacgccaagcagtgggacaagacgtcctaccagcttcacgacgacagcaggatgggccacatcaacctcggcctcatgaaccttgatctcaagatgaacgaggctgccgccatgaagctccccttccgtggcatgccctataacatgaaccagatgtacctcaaggggagcaatgccaattccaatgtcaatgcgttcaagatgaatgttggggtcaacaagtactccaatagtccaaacgggaaagacgccaatgggaaaaacaatggcggcaacaacaacaatgggagcgccaacggcacttctgtggctgacaagcgcttcaagacattgccgacgagtgagatgctaccgaggaatgaagtccttggtggatacatctttgtctgcaacaacgataccatgcaggaggatctcaagaggcagctttttggtttgccagcaagatatcgtgattcagtccgagcaatcactcctggcttgcctcttttcctctataactacacaacccaccagcttcatggggtatttgaggctgccagttttggtgggtccaatatcgatcctactgcatgggaggataagaagtgtaaaggtgaatctagattcccagcgcaggtgaggatctgcattaggaagctgtgcaagccgttggaagaggattccttcaggccagttttgcaccattatgatgggccaaagttccgccttgagctctccatcgcggagacattgtcactgctagacctatgcgggaaggaaggcatctgagctgtcgaggaggtggtggtggttgccttgtgagcttctagtaaataccaatcatctttgtatgttttgtggatggtggttggcaacgttgtttatttatgcacaagctgctgctggtttcgggatggaaggaaggacctggtccctgaaacaagctgcggagagtgatcctgtcagtgtattgtgtctggcgtggtcaagaaccaaatcaatgttggaccgaccgactgagagtttggagtgtgtatgttttgctattactcttatctctagtagagtgtgggtatacctgggcagaatgtgtccccaaaagttgggggcctgtctgtgtactgtgtgcgatggacgccctaagtaaaaaaagggcaggtgatggtcgtgctccaggtttgtgttttgtactctgttgtaccttgaacctcctttgcgttttgcctaatcagagaatgagtgc

SEQ ID NO: 12694 - protein, 276 aa, Zea mays subsp. mays
  peptide (1)..(276): Ceres Seq. ID no. 12414517
  misc_feature (1)..(275): Homolog of NCBI NO: 2369766 NR Description: hypothetical protein [Citrus x paradisi]
  misc_feature (1)..(275): Homolog of NCBI NO: 15232081 NR Description: gda-1, putative; protein id: At3g27090.1, by cDNA: 3049., supported by cDNA: gi_16604449 [Arabidopsis >gi|9279632|dbj|BAB01090.1| contains similarity to unknown
  misc_feature (1)..(275): Homolog of NCBI NO: 21592623 NR Description: gda-1, putative [Arabidopsis thaliana]
  misc_feature (59)..(275): Homolog of NCBI NO: 21665866 NR Description: GDA2 protein [Pisum sativum]
  misc_feature (89)..(270): Homolog of NCBI NO: 584825 NR Description: B2 PROTEIN >gi|322726|pir||S32124 B2 protein -
  misc_feature (17)..(270): Homolog of NCBI NO: 18422167 NR Description: putative protein; protein id: At5g42050.1, by cDNA: 6903., supported by cDNA: gi_19424060, supported by gi_21281017 [Arabidopsis thaliana] >gi|19424061|gb|AAL87257.1|
  misc_feature (74)..(270): Homolog of NCBI NO: 9757950 NR Description: gene_id:MJC20.15~similar to unknown
  misc_feature (81)..(264): Homolog of NCBI NO: 34913876 NR Description: B1156H12.22 [Oryza sativa (japonica
  misc_feature (155)..(239): Homolog of NCBI NO: 7488804 NR Description: gda-1 protein - garden pea
  misc_feature (124)..(270): Homolog of NCBI NO: 34896110 NR Description: P0701D05.9 [Oryza sativa (japonica
MTSKLAEITRSKGERMNTVPDAKQWDKTSYQLHDDSRMGHINLGLMNLDLKMNEAAAMKLPFRGMPYNMNQMYLKGSNANSNVNAFKMNVGVNKYSNSPNGKDANGKNNGGNNNNGSANGTSVADKRFKTLPTSEMLPRNEVLGGYIFVCNNDTMQEDLKRQLFGLPARYRDSVRAITPGLPLFLYNYTTHQLHGVFEAASFGGSNIDPTAWEDKKCKGESRFPAQVRICIRKLCKPLEEDSFRPVLHHYDGPKFRLELSIAETLSLLDLCGKEGI

SEQ ID NO: 12695 - protein, 261 aa, Zea mays subsp. mays
  peptide (1)..(261): Ceres Seq. ID no. 12414518
  misc_feature (1)..(260): Homolog of NCBI NO: 2369766 NR Description: hypothetical protein [Citrus x paradisi]
  misc_feature (1)..(260): Homolog of NCBI NO: 15232081 NR Description: gda-1, putative; protein id: At3g27090.1, by cDNA: 3049., supported by cDNA: gi_16604449 [Arabidopsis >gi|9279632|dbj|BAB01090.1| contains similarity to unknown
  misc_feature (1)..(260): Homolog of NCBI NO: 21592623 NR Description: gda-1, putative [Arabidopsis thaliana]
  misc_feature (44)..(260): Homolog of NCBI NO: 21665866 NR Description: GDA2 protein [Pisum sativum]
  misc_feature (74)..(255): Homolog of NCBI NO: 584825 NR Description: B2 PROTEIN >gi|322726|pir||S32124 B2 protein -
  misc_feature (2)..(255): Homolog of NCBI NO: 18422167 NR Description: putative protein; protein id: At5g42050.1, by cDNA: 6903., supported by cDNA: gi_19424060, supported by gi_21281017 [Arabidopsis thaliana] >gi|19424061|gb|AAL87257.1|
  misc_feature (59)..(255): Homolog of NCBI NO: 9757950 NR Description: gene_id:MJC20.15~similar to unknown
  misc_feature (66)..(249): Homolog of NCBI NO: 34913876 NR Description: B1156H12.22 [Oryza sativa (japonica
  misc_feature (140)..(224): Homolog of NCBI NO: 7488804 NR Description: gda-1 protein - garden pea
  misc_feature (109)..(255): Homolog of NCBI NO: 34896110 NR Description: P0701D05.9 [Oryza sativa (japonica
MNTVPDAKQWDKTSYQLHDDSRMGHINLGLMNLDLKMNEAAAMKLPFRGMPYNMNQMYLKGSNANSNVNAFKMNVGVNKYSNSPNGKDANGKNNGGNNNNGSANGTSVADKRFKTLPTSEMLPRNEVLGGYIFVCNNDTMQEDLKRQLFGLPARYRDSVRAITPGLPLFLYNYTTHQLHGVFEAASFGGSNIDPTAWEDKKCKGESRFPAQVRICIRKLCKPLEEDSFRPVLHHYDGPKFRLELSIAETLSLLDLCGKEGI

SEQ ID NO: 12696 - protein, 239 aa, Zea mays subsp. mays
  peptide (1)..(239): Ceres Seq. ID no. 12414519
  misc_feature (37)..(233): Homolog of NCBI NO: 9757950 NR Description: gene_id:MJC20.15~similar to unknown
  misc_feature (44)..(227): Homolog of NCBI NO: 34913876 NR Description: B1156H12.22 [Oryza sativa (japonica
  misc_feature (118)..(202): Homolog of NCBI NO: 7488804 NR Description: gda-1 protein - garden pea
  misc_feature (87)..(233): Homolog of NCBI NO: 34896110 NR Description: P0701D05.9 [Oryza sativa (japonica
  misc_feature (1)..(238): Homolog of NCBI NO: 2369766 NR Description: hypothetical protein [Citrus x paradisi]
  misc_feature (1)..(238): Homolog of NCBI NO: 15232081 NR Description: gda-1, putative; protein id: At3g27090.1, by cDNA: 3049., supported by cDNA: gi_16604449 [Arabidopsis >gi|9279632|dbj|BAB01090.1| contains similarity to unknown
  misc_feature (1)..(238): Homolog of NCBI NO: 21592623 NR Description: gda-1, putative [Arabidopsis thaliana]
  misc_feature (22)..(238): Homolog of NCBI NO: 21665866 NR Description: GDA2 protein [Pisum sativum]
  misc_feature (52)..(233): Homolog of NCBI NO: 584825 NR Description: B2 PROTEIN >gi|322726|pir||S32124 B2 protein -
  misc_feature (1)..(233): Homolog of NCBI NO: 18422167 NR Description: putative protein; protein id: At5g42050.1, by cDNA: 6903., supported by cDNA: gi_19424060, supported by gi_21281017 [Arabidopsis thaliana] >gi|19424061|gb|AAL87257.1|
MGHINLGLMNLDLKMNEAAAMKLPFRGMPYNMNQMYLKGSNANSNVNAFKMNVGVNKYSNSPNGKDANGKNNGGNNNNGSANGTSVADKRFKTLPTSEMLPRNEVLGGYIFVCNNDTMQEDLKRQLFGLPARYRDSVRAITPGLPLFLYNYTTHQLHGVFEAASFGGSNIDPTAWEDKKCKGESRFPAQVRICIRKLCKPLEEDSFRPVLHHYDGPKFRLELSIAETLSLLDLCGKEGI

SEQ ID NO: 12697 - DNA, 1164 bp, Zea mays subsp. mays
  misc_feature (1)..(1164): Ceres Seq. ID no. 12414536
  misc_feature: MA Experiment ID: 20000480 Result: Down-regulated in Transcription
  misc_feature: MA Experiment 20000480 PARAMETER Experiment Name: Zm_Drought_P Parameter: Age (day) Value: 11
  misc_feature: MA Experiment 20000480 PARAMETER Experiment Name: Zm_Drought_P Parameter: Organism Value: Zea mays
  misc_feature: MA Experiment 20000480 PARAMETER Experiment Name: Zm_Drought_P Parameter: Plant Line Value: 35A19
  misc_feature: MA Experiment 20000480 PARAMETER Experiment Name: Zm_Drought_P Parameter: Timepoint (hr) Value: 72
  misc_feature: MA Experiment 20000480 PARAMETER Experiment Name: Zm_Drought_P Parameter: Tissue Value: Aerial
  misc_feature: MA Experiment 20000480 PARAMETER Experiment Name: Zm_Drought_P Parameter: Treatment Value: Drought vs. No Drought
gaccccgcacaccgacgacgaagagaggagaggaggcggagccgagagctcgagcccaaccgcgcaactcacttccccgtcgcgatttgcattgccctcctcttggcccccgatctcgccgtgccctacccccagacccgctccgccgccaccggagagatcgcgccccccattcccacaatctaatgcttccgtccctcgaggagccgagccctccgcgcggccgtgggatggggcggtgacaacaccggtgagtggcgtggggcagggagccggtggcgaggggcatatcatggtgcagtgcctggacggggtgaggcagctgctcgcggtcctgctcaagtgctgcgacgtcgagctcaagcagccgcccgggctcgaggaccctcaggttctcgcgagggagaccgtcttcagcgtgagcgaagtcgaggctctctacgagctgttcaagaagataagcagtgctgtcatcgatgatgggctgattaacaaggaggagtttcagttggcactatttaagaccagcaagaaggagagcctgttcgcagaccgcgtatttgatttgtttgacacaaagcacaatggaattttaggatttgaagaatttgctcgtgctctctcagtatttcatcctaatgctccccttgatgagaaaattgacttttcattccggctgtatgatctcaagcagcaaggctacattgagagacaagaggttaagcagatggttgttgctacacttgctgagtcaggaatgaatctttcagatgaaattgtagagagtataattgacaagacatttgaggaggcagacacaaaacatgatggaaggattgacaaggaagagtggcgcagtctagtcagtcggcatccatctttgctgaagaacatgactcttcagtacctcaaggacatcaccacaacatttccaagctttgtctttcactcccaagttgatgataactgattttcatgggattattttggcaagaagcattagaagatattctcgtggggttctgatatggttttctttttcaattattgggttgttggattgactgagatcgtagtgctcataagtatgttggatgttggattcgagaactcaaatcttttgtcaaccatgtttctttcatttgcatgtctggatgcgcttgg

SEQ ID NO: 12698 - protein, 322 aa, Zea mays subsp. mays
  peptide (1)..(322): Ceres Seq. ID no. 12414537
  misc_feature (182)..(210): Pfam Name: EF hand Pfam Description: EF hand
  misc_feature (98)..(321): Homolog of NCBI NO: 16924116 NR Description: putative calcineurin B-like protein [Oryza sativa]
  misc_feature (98)..(321): Homolog of NCBI NO: 22137326 NR Description: calcineurin B [Pisum sativum]
  misc_feature (98)..(321): Homolog of NCBI NO: 15236778 NR Description: calcineurin B-like protein 3; protein id: supported by cDNA: gi_18253012, supported by cDNA: gi_3309085
  misc_feature (98)..(321): Homolog of NCBI NO: 15241101 NR Description: calcineurin B-like protein 2 (gb|AAC26009.1); id: At5g55990.2, supported by cDNA: 37280., supported by cDNA: supported by cDNA: gi_3309083 [Arabidopsis thaliana] protein 2
  misc_feature (98)..(321): Homolog of NCBI NO: 30687272 NR Description: calcineurin B-like protein 3 (CBL3) [Arabidopsis
  misc_feature (98)..(321): Homolog of NCBI NO: 21593228 NR Description: calcineurin B-like protein 2 [Arabidopsis
  misc_feature (128)..(316): Homolog of NCBI NO: 38493047 NR Description: Chain A, The Crystal Structure Of The Calcium
  misc_feature (97)..(321): Homolog of NCBI NO: 18414640 NR Description: expressed protein; protein id: At4g16350.1, by cDNA: gi_11065942, supported by cDNA: gi_13448026 [Arabidopsis
  misc_feature (97)..(321): Homolog of NCBI NO: 13448027 NR Description: SOS3-like calcium binding protein [Arabidopsis
  misc_feature (121)..(321): Homolog of NCBI NO: 18414931 NR Description: calcineurin B-like protein 1; protein id: supported by cDNA: gi_3309081 [Arabidopsis thaliana]
TPHTDDEERRGGGAESSSPTAQLTSPSRFALPSSWPPISPCPTPRPAPPPPERSRPPFPQSNASVPRGAEPSARPWDGAVTTPVSGVGQGAGGEGHIMVQCLDGVRQLLAVLLKCCDVELKQPPGLEDPQVLARETVFSVSEVEALYELFKKISSAVIDDGLINKEEFQLALFKTSKKESLFADRVFDLFDTKHNGILGFEEFARALSVFHPNAPLDEKIDFSFRLYDLKQQGYIERQEVKQMVVATLAESGMNLSDEIVESIIDKTFEEADTKHDGRIDKEEWRSLVSRHPSLLKNMTLQYLKDITTTFPSFVFHSQVDDN

SEQ ID NO: 12699 - protein, 225 aa, Zea mays subsp. mays
  peptide (1)..(225): Ceres Seq. ID no. 12414538
  misc_feature (85)..(113): Pfam Name: EF hand Pfam Description: EF hand
  misc_feature (1)..(224): Homolog of NCBI NO: 16924116 NR Description: putative calcineurin B-like protein [Oryza sativa]
  misc_feature (1)..(224): Homolog of NCBI NO: 22137326 NR Description: calcineurin B [Pisum sativum]
  misc_feature (1)..(224): Homolog of NCBI NO: 15236778 NR Description: calcineurin B-like protein 3; protein id: supported by cDNA: gi_18253012, supported by cDNA: gi_3309085
  misc_feature (1)..(224): Homolog of NCBI NO: 15241101 NR Description: calcineurin B-like protein 2 (gb|AAC26009.1); id: At5g55990.2, supported by cDNA: 37280., supported by cDNA: supported by cDNA: gi_3309083 [Arabidopsis thaliana] protein 2
  misc_feature (1)..(224): Homolog of NCBI NO: 30687272 NR Description: calcineurin B-like protein 3 (CBL3) [Arabidopsis
  misc_feature (1)..(224): Homolog of NCBI NO: 21593228 NR Description: calcineurin B-like protein 2 [Arabidopsis
  misc_feature (31)..(219): Homolog of NCBI NO: 38493047 NR Description: Chain A, The Crystal Structure Of The Calcium
  misc_feature (1)..(224): Homolog of NCBI NO: 18414640 NR Description: expressed protein; protein id: At4g16350.1, by cDNA: gi_11065942, supported by cDNA: gi_13448026 [Arabidopsis
  misc_feature (1)..(224): Homolog of NCBI NO: 13448027 NR Description: SOS3-like calcium binding protein [Arabidopsis
  misc_feature (24)..(224): Homolog of NCBI NO: 18414931 NR Description: calcineurin B-like protein 1; protein id: supported by cDNA: gi_3309081 [Arabidopsis thaliana]
MVQCLDGVRQLLAVLLKCCDVELKQPPGLEDPQVLARETVFSVSEVEALYELFKKISSAVIDDGLINKEEFQLALFKTSKKESLFADRVFDLFDTKHNGILGFEEFARALSVFHPNAPLDEKIDFSFRLYDLKQQGYIERQEVKQMVVATLAESGMNLSDEIVESIIDKTFEEADTKHDGRIDKEEWRSLVSRHPSLLKNMTLQYLKDITTTFPSFVFHSQVDDN

SEQ ID NO: 12700 - DNA, 1112 bp, Zea mays subsp. mays
  misc_feature (1)..(1112): Ceres Seq. ID no. 12351804
  misc_feature: MA Experiment ID: 108527 Result: Up-regulated in Transcription
  misc_feature: MA Experiment 108527 PARAMETER Experiment Name: Zm_5mM_NO_P Parameter: Age (day) Value: 8
  misc_feature: MA Experiment 108527 PARAMETER Experiment Name: Zm_5mM_NO_P Parameter: Organism Value: Zea mays
  misc_feature: MA Experiment 108527 PARAMETER Experiment Name: Zm_5mM_NO_P Parameter: Plant Line Value: 35A19
  misc_feature: MA Experiment 108527 PARAMETER Experiment Name: Zm_5mM_NO_P Parameter: Timepoint (hr) Value: 6
  misc_feature: MA Experiment 108527 PARAMETER Experiment Name: Zm_5mM_NO_P Parameter: Tissue Value: Aerial
  misc_feature: MA Experiment 108527 PARAMETER Experiment Name: Zm_5mM_NO_P Parameter: Treatment Value: 5mM NO vs. No Treatment
  misc_feature: MA Experiment ID: 108536 Result: Up-regulated in Transcription
  misc_feature: MA Experiment 108536 PARAMETER Experiment Name: Zm_Meristem_P Parameter: Age (day) Value: 8
  misc_feature: MA Experiment 108536 PARAMETER Experiment Name: Zm_Meristem_P Parameter: Organism Value: Zea mays
  misc_feature: MA Experiment 108536 PARAMETER Experiment Name: Zm_Meristem_P Parameter: Plant Line Value: 35A19
  misc_feature: MA Experiment 108536 PARAMETER Experiment Name: Zm_Meristem_P Parameter: Tissue Value: Shoot Meristem vs. Above Shoot Meristem
  misc_feature: MA Experiment ID: 108543 Result: Up-regulated in Transcription
  misc_feature: MA Experiment ID: 108559 Result: Up-regulated in Transcription
  misc_feature: MA Experiment 108559 PARAMETER Experiment Name: Zm_5mM_NO_P Parameter: Age (day) Value: 8
  misc_feature: MA Experiment 108559 PARAMETER Experiment Name: Zm_5mM_NO_P Parameter: Organism Value: Zea mays
  misc_feature: MA Experiment 108559 PARAMETER Experiment Name: Zm_5mM_NO_P Parameter: Plant Line Value: 35A19
  misc_feature: MA Experiment 108559 PARAMETER Experiment Name: Zm_5mM_NO_P Parameter: Timepoint (hr) Value: 12
  misc_feature: MA Experiment 108559 PARAMETER Experiment Name: Zm_5mM_NO_P Parameter: Tissue Value: Aerial
  misc_feature: MA Experiment 108559 PARAMETER Experiment Name: Zm_5mM_NO_P Parameter: Treatment Value: 5mM NO vs. No Treatment
  misc_feature: MA Experiment ID: 20000535 Result: Down-regulated in Transcription
  misc_feature: MA Experiment 20000535 PARAMETER Experiment Name: Zm_Hybrid_Seed_Dev_P Parameter: DAP Value: 30 vs. 12
  misc_feature: MA Experiment 20000535 PARAMETER Experiment Name: Zm_Hybrid_Seed_Dev_P Parameter: Organism Value: Zea mays
  misc_feature: MA Experiment 20000535 PARAMETER Experiment Name: Zm_Hybrid_Seed_Dev_P Parameter: Plant Line Value: 35A19
  misc_feature: MA Experiment 20000535 PARAMETER Experiment Name: Zm_Hybrid_Seed_Dev_P Parameter: Tissue Value: Embryo vs. Unfert Floret
aagttcaggcagtttcgtgcccttttcttctccaccagctcaaagctgaacgcggcatccttcctttcctcccctcttctgcccccatttcgttcctttcacaccggggaccggcgagcagagccgcgcacagcagaacgcggaagcaagaggaggcgatcgactactcgaccagccctctccgtgtctccgatggcggctcgcgtcctcgcggccctcgcccttgccctcgccctcgccctcgtcgccgtacccgctcccacgcgggcgtccaacgacgagggggacgcgctctacgcgctgcggcagcggctgtcggaccccaacggcgtgctgcagagctgggatcccacgctcgtcaccccctgcacctggttccacatctcctgcgaccaggtcggccgcgtcgtccgcctggacttgggcaactccaacgtctccggctccatcggccctgagctcggccgccttgtcaacctcaagtacctggagctgtacaggaacaaccttgacggcgagatccccaaggaattgggcaacctcaagaacctgatcagcttggatctgtatgccaacaagctcacgggaggaatccccaagtcactctccaagctcgactcactcagattcatgcgcttgaacaacaacaagcttacaggatcaattccaagggagtttgccaagctctccaacctgaaagtcatcgatttgtctaacaatgatctctgtggaactatccctgttgatgggcctttctcaacctttcctctccgaagctttgagaacaacagcaggctcaacggtccagagctacaaggattggttccttatgattttggatgttagatgccgatcaacaatgtaccaccttccccagttgaaagggggaaagacaagatagtattatcaatagaaacctagcttcaagaatgtcgtgactatatatatgtatgatattaagactagatttgataagggtggcatagcaagtcctgatattctgtgtgcattcagaatagctgcttttatgcccttgtgttgatattttgcaaaccaaaacaaactgttctgaaacgagggcacatattgttcatgaataaatttgagcctcc

SEQ ID NO: 12701 - protein, 281 aa, Zea mays subsp. mays
  peptide (1)..(281): Ceres Seq. ID no. 12351805
  misc_feature (231)..(263): Pfam Name: Leucine Rich Repeat Pfam Description: Leucine Rich Repeat
  misc_feature (65)..(281): Homolog of NCBI NO: 34896972 NR Description: putative leucine-rich repeat protein [Oryza
  misc_feature (71)..(281): Homolog of NCBI NO: 34903344 NR Description: unnamed protein product [Oryza sativa (japonica group)] >gi|6498429|dbj|BAA87832.1| unnamed protein product
  misc_feature (62)..(281): Homolog of NCBI NO: 34146800 NR Description: At3g43740 [Arabidopsis thaliana]
  misc_feature (70)..(281): Homolog of NCBI NO: 15242153 NR Description: leucine-rich repeat protein; protein id: supported by cDNA: gi_13358181, supported by cDNA: gi_13899096, by cDNA: gi_20148426 [Arabidopsis thaliana]
  misc_feature (65)..(281): Homolog of NCBI NO: 29468120 NR Description: leucine-rich repeat protein [Oryza sativa]
  misc_feature (90)..(281): Homolog of NCBI NO: 30385250 NR Description: leucine-rich repeat protein [x Citrofortunella
  misc_feature (65)..(281): Homolog of NCBI NO: 27497122 NR Description: floral organ regulator 1 [Oryza sativa (japonica
  misc_feature (79)..(281): Homolog of NCBI NO: 7489030 NR Description: leucine-rich repeat protein LRP - tomato
  misc_feature (67)..(281): Homolog of NCBI NO: 21740899 NR Description: OSJNBa0036B21.13 [Oryza sativa (japonica
  misc_feature (65)..(281): Homolog of NCBI NO: 13897320 NR Description: somatic embryogenesis receptor-like kinase 2 [Zea
KFRQFRALFFSTSSKLNAASFLSSPLLPPFRSFHTGDRRAEPRTAERGSKRRRSTTRPALSVSPMAARVLAALALALALALVAVPAPTRASNDEGDALYALRQRLSDPNGVLQSWDPTLVTPCTWFHISCDQVGRVVRLDLGNSNVSGSIGPELGRLVNLKYLELYRNNLDGEIPKELGNLKNLISLDLYANKLTGGIPKSLSKLDSLRFMRLNNNKLTGSIPREFAKLSNLKVIDLSNNDLCGTIPVDGPFSTFPLRSFENNSRLNGPELQGLVPYDFGC

SEQ ID NO: 12702 - protein, 217 aa, Zea mays subsp. mays; identical to SEQ ID NO: 11158
  peptide (1)..(217): Ceres Seq. ID no. 12351806
  misc_feature (167)..(199): Pfam Name: Leucine Rich Repeat Pfam Description: Leucine Rich Repeat
  misc_feature (1)..(217): Homolog of NCBI NO: 34896972 NR Description: putative leucine-rich repeat protein [Oryza
  misc_feature (7)..(217): Homolog of NCBI NO: 34903344 NR Description: unnamed protein product [Oryza sativa (japonica group)] >gi|6498429|dbj|BAA87832.1| unnamed protein product
  misc_feature (1)..(217): Homolog of NCBI NO: 34146800 NR Description: At3g43740 [Arabidopsis thaliana]
  misc_feature (6)..(217): Homolog of NCBI NO: 15242153 NR Description: leucine-rich repeat protein; protein id: supported by cDNA: gi_13358181, supported by cDNA: gi_13899096, by cDNA: gi_20148426 [Arabidopsis thaliana]
  misc_feature (1)..(217): Homolog of NCBI NO: 29468120 NR Description: leucine-rich repeat protein [Oryza sativa]
  misc_feature (26)..(217): Homolog of NCBI NO: 30385250 NR Description: leucine-rich repeat protein [x Citrofortunella
  misc_feature (1)..(217): Homolog of NCBI NO: 27497122 NR Description: floral organ regulator 1 [Oryza sativa (japonica
  misc_feature (15)..(217): Homolog of NCBI NO: 7489030 NR Description: leucine-rich repeat protein LRP - tomato
  misc_feature (3)..(217): Homolog of NCBI NO: 21740899 NR Description: OSJNBa0036B21.13 [Oryza sativa (japonica
  misc_feature (1)..(217): Homolog of NCBI NO: 13897320 NR Description: somatic embryogenesis receptor-like kinase 2 [Zea

SEQ ID NO: 12703 - protein, 151 aa, Zea mays subsp. mays
  peptide (1)..(151): Ceres Seq. ID no. 12351807
VQAVSCPFLLHQLKAERGILPFLPSSAPISFLSHRGPASRAAHSRTRKQEEAIDYSTSPLRVSDGGSRPRGPRPCPRPRPRRRTRSHAGVQRRGGRALRAAAAAVGPQRRAAELGSHARHPLHLVPHLLRPGRPRRPPGLGQLQRLRLHRP

SEQ ID NO: 12704 - DNA, 812 bp, Zea mays subsp. mays
  misc_feature (1)..(812): Ceres Seq. ID no. 12351463
  misc_feature: MA Experiment ID: 108515 Result: Up-regulated in Transcription
  misc_feature: MA Experiment 108515 PARAMETER Experiment Name: Zm_2mM_SA_P Parameter: Age (day) Value: 8
  misc_feature: MA Experiment 108515 PARAMETER Experiment Name: Zm_2mM_SA_P Parameter: Organism Value: Zea mays
  misc_feature: MA Experiment 108515 PARAMETER Experiment Name: Zm_2mM_SA_P Parameter: Plant Line Value: 35A19
  misc_feature: MA Experiment 108515 PARAMETER Experiment Name: Zm_2mM_SA_P Parameter: Timepoint (hr) Value: 12
  misc_feature: MA Experiment 108515 PARAMETER Experiment Name: Zm_2mM_SA_P Parameter: Tissue Value: Aerial
  misc_feature: MA Experiment 108515 PARAMETER Experiment Name: Zm_2mM_SA_P Parameter: Treatment Value: 2mM SA vs. No Treatment
  misc_feature: MA Experiment ID: 108535 Result: Up-regulated in Transcription
  misc_feature: MA Experiment 108535 PARAMETER Experiment Name: Zm_Meristem_P Parameter: Age (day) Value: 8
  misc_feature: MA Experiment 108535 PARAMETER Experiment Name: Zm_Meristem_P Parameter: Organism Value: Zea mays
  misc_feature: MA Experiment 108535 PARAMETER Experiment Name: Zm_Meristem_P Parameter: Plant Line Value: 35A19
  misc_feature: MA Experiment 108535 PARAMETER Experiment Name: Zm_Meristem_P Parameter: Tissue Value: Root Meristem vs. Above Root Meristem
  misc_feature: MA Experiment ID: 108544 Result: Down-regulated in Transcription
  misc_feature: MA Experiment ID: 108559 Result: Up-regulated in Transcription
  misc_feature: MA Experiment 108559 PARAMETER Experiment Name: Zm_5mM_NO_P Parameter: Age (day) Value: 8
  misc_feature: MA Experiment 108559 PARAMETER Experiment Name: Zm_5mM_NO_P Parameter: Organism Value: Zea mays
  misc_feature: MA Experiment 108559 PARAMETER Experiment Name: Zm_5mM_NO_P Parameter: Plant Line Value: 35A19
  misc_feature: MA Experiment 108559 PARAMETER Experiment Name: Zm_5mM_NO_P Parameter: Timepoint (hr) Value: 12
  misc_feature: MA Experiment 108559 PARAMETER Experiment Name: Zm_5mM_NO_P Parameter: Tissue Value: Aerial
  misc_feature: MA Experiment 108559 PARAMETER Experiment Name: Zm_5mM_NO_P Parameter: Treatment Value: 5mM NO vs. No Treatment
  misc_feature: MA Experiment ID: 20000492 Result: Up-regulated in Transcription
  misc_feature: MA Experiment 20000492 PARAMETER Experiment Name: Zm_Hybrid_Seed_Dev_P Parameter: DAP Value: 12
  misc_feature: MA Experiment 20000492 PARAMETER Experiment Name: Zm_Hybrid_Seed_Dev_P Parameter: Organism Value: Zea mays
  misc_feature: MA Experiment 20000492 PARAMETER Experiment Name: Zm_Hybrid_Seed_Dev_P Parameter: Plant Line Value: 35A19
  misc_feature: MA Experiment 20000492 PARAMETER Experiment Name: Zm_Hybrid_Seed_Dev_P Parameter: Tissue Value: Fert Kernel vs. Unfert Floret
ctcaccaagaaagaaaaacagacacacgtcactgttcgccttgtccggtcgtttctgctccattcctcctcctgcaagccgcaaaggaatcaggcggagtggcgcgatgggagagcaggtcgtgacggagcagatccagcggaagctggaggaggtcaacgctaccgtccaacagcacctcgcgggtgtccaggaccacatcaacttcaccatgcagcaagcatacttcaagtgcgcatatggttgctttgatcggcgccatactcaggaagcgatcagcaactgtgtggagaattgtagtgtgcctgtccttgctgccaacaatatttttgagagtgagatggccaagtttcagggaatgttgaaccggtcattgagggtctgtcaagataagtttgaagctgccaatctccagaagttgaaatcagatgcaactcgggaactggaatcctgtgtcaacagatctattgatgacagcctcagggtccttccgcatgtggtggatcagatcaagtccaccctcaaaatcaattagaggcactattacttttagcaaatgaaccagatatagttgagaatgtttcatattcacattcgctgcataactccacattttcagagctcttaccgatattgatagaacatgatcaccctatcgtagttttttggattctgctcttaccacctagtcctggcatgtcaacagcgtcgacattttgaactctactgagaacacagcttaggcattgaaaggctggatgaacttgttgtgctacatgtacaagaatactcttacgtcttgtgattttttg

SEQ ID NO: 12705 - protein, 177 aa, Zea mays subsp. mays
  peptide (1)..(177): Ceres Seq. ID no. 12351464
  misc_feature (44)..(172): Pfam Name: Eukaryotic protein of unknown function (DUF842) Pfam Description: Eukaryotic protein of unknown function (DUF842)
  misc_feature (35)..(176): Homolog of NCBI NO: 18402744 NR Description: expressed protein; protein id: At2g31725.1, by cDNA: 25159. [Arabidopsis thaliana] expressed protein [Arabidopsis thaliana]
  misc_feature (35)..(176): Homolog of NCBI NO: 15221245 NR Description: hypothetical Protein; protein id: At1g05730.1
  misc_feature (38)..(176): Homolog of NCBI NO: 15224344 NR Description: hypothetical protein; protein id: At2g43720.1, by cDNA: gi_18491242 [Arabidopsis thaliana]
  misc_feature (32)..(153): Homolog of NCBI NO: 15221247 NR Description: hypothetical protein; protein id: At1g05740.1
  misc_feature (41)..(174): Homolog of NCBI NO: 19922546 NR Description: CG5327 gene product [Drosophila melanogaster]
  misc_feature (41)..(174): Homolog of NCBI NO: 14249520 NR Description: hypothetical protein FLJ14668 [Homo sapiens]
  misc_feature (71)..(174): Homolog of NCBI NO: 27712200 NR Description: similar to RIKEN cDNA 2010309E21 [Mus musculus]
  misc_feature (71)..(174): Homolog of NCBI NO: 15929034 NR Description: hypothetical protein FLJ14668 [Homo sapiens]
  misc_feature (71)..(174): Homolog of NCBI NO: 13385042 NR Description: RIKEN cDNA 2010309E21 [Mus musculus] unnamed protein product [Mus musculus] unnamed protein product [Mus musculus]
  misc_feature (71)..(174): Homolog of NCBI NO: 15489002 NR Description: Unknown (protein for IMAGE:3493774) [Mus musculus]
SPRKKNRHTSLFALSGRFCSIPPPASRKGIRRSGAMGEQVVTEQIQRKLEEVNATVQQHLAGVQDHINFTMQQAYFKCAYGCFDRRHTQEAISNCVENCSVPVLAANNIFESEMAKFQGMLNRSLRVCQDKFEAANLQKLKSDATRELESCVNRSIDDSLRVLPHVVDQIKSTLKIN

SEQ ID NO: 12706 - protein, 142 aa, Zea mays subsp. mays
  peptide (1)..(142): Ceres Seq. ID no. 12351465
  misc_feature (9)..(137): Pfam Name: Eukaryotic protein of unknown function (DUF842) Pfam Description: Eukaryotic protein of unknown function (DUF842)
  misc_feature (1)..(141): Homolog of NCBI NO: 18402744 NR Description: expressed protein; protein id: At2g31725.1, by cDNA: 25159. [Arabidopsis thaliana] expressed protein [Arabidopsis thaliana]
  misc_feature (1)..(141): Homolog of NCBI NO: 15221245 NR Description: hypothetical Protein; protein id: At1g05730.1
  misc_feature (3)..(141): Homolog of NCBI NO: 15224344 NR Description: hypothetical protein; protein id: At2g43720.1, by cDNA: gi_18491242 [Arabidopsis thaliana]
  misc_feature (1)..(118): Homolog of NCBI NO: 15221247 NR Description: hypothetical protein; protein id: At1g05740.1
  misc_feature (6)..(139): Homolog of NCBI NO: 19922546 NR Description: CG5327 gene product [Drosophila melanogaster]
  misc_feature (6)..(139): Homolog of NCBI NO: 14249520 NR Description: hypothetical protein FLJ14668 [Homo sapiens]
  misc_feature (36)..(139): Homolog of NCBI NO: 27712200 NR Description: similar to RIKEN cDNA 2010309E21 [Mus musculus]
  misc_feature (36)..(139): Homolog of NCBI NO: 15929034 NR Description: hypothetical protein FLJ14668 [Homo sapiens]
  misc_feature (36)..(139): Homolog of NCBI NO: 13385042 NR Description: RIKEN cDNA 2010309E21 [Mus musculus] unnamed protein product [Mus musculus] unnamed protein product [Mus musculus]
  misc_feature (36)..(139): Homolog of NCBI NO: 15489002 NR Description: Unknown (protein for IMAGE:3493774) [Mus musculus]
MGEQVVTEQIQRKLEEVNATVQQHLAGVQDHINFTMQQAYFKCAYGCFDRRHTQEAISNCVENCSVPVLAANNIFESEMAKFQGMLNRSLRVCQDKFEAANLQKLKSDATRELESCVNRSIDDSLRVLPHVVDQIKSTLKIN

SEQ ID NO: 12707 - protein, 107 aa, Zea mays subsp. mays
  peptide (1)..(107): Ceres Seq. ID no. 12351466
  misc_feature (1)..(102): Pfam Name: Eukaryotic protein of unknown function (DUF842) Pfam Description: Eukaryotic protein of unknown function (DUF842)
  misc_feature (1)..(106): Homolog of NCBI NO: 18402744 NR Description: expressed protein; protein id: At2g31725.1, by cDNA: 25159. [Arabidopsis thaliana] expressed protein [Arabidopsis thaliana]
  misc_feature (1)..(106): Homolog of NCBI NO: 15221245 NR Description: hypothetical Protein; protein id: At1g05730.1
  misc_feature (1)..(106): Homolog of NCBI NO: 15224344 NR Description: hypothetical protein; protein id: At2g43720.1, by cDNA: gi_18491242 [Arabidopsis thaliana]
  misc_feature (1)..(83): Homolog of NCBI NO: 15221247 NR Description: hypothetical protein; protein id: At1g05740.1
  misc_feature (1)..(104): Homolog of NCBI NO: 19922546 NR Description: CG5327 gene product [Drosophila melanogaster]
  misc_feature (1)..(104): Homolog of NCBI NO: 14249520 NR Description: hypothetical protein FLJ14668 [Homo sapiens]
  misc_feature (1)..(104): Homolog of NCBI NO: 27712200 NR Description: similar to RIKEN cDNA 2010309E21 [Mus musculus]
  misc_feature (1)..(104): Homolog of NCBI NO: 15929034 NR Description: hypothetical protein FLJ14668 [Homo sapiens]
  misc_feature (1)..(104): Homolog of NCBI NO: 13385042 NR Description: RIKEN cDNA 2010309E21 [Mus musculus] unnamed protein product [Mus musculus] unnamed protein product [Mus musculus]
  misc_feature (1)..(104): Homolog of NCBI NO: 15489002 NR Description: Unknown (protein for IMAGE:3493774) [Mus musculus]
MQQAYFKCAYGCFDRRHTQEAISNCVENCSVPVLAANNIFESEMAKFQGMLNRSLRVCQDKFEAANLQKLKSDATRELESCVNRSIDDSLRVLPHVVDQIKSTLKIN

SEQ ID NO: 12708 - DNA, 1284 bp, Zea mays subsp. mays
  misc_feature (1)..(1284): Ceres Seq. ID no. 12414696
  misc_feature: MA Experiment ID: 108515 Result: Up-regulated in Transcription
  misc_feature: MA Experiment 108515 PARAMETER Experiment Name: Zm_2mM_SA_P Parameter: Age (day) Value: 8
  misc_feature: MA Experiment 108515 PARAMETER Experiment Name: Zm_2mM_SA_P Parameter: Organism Value: Zea mays
  misc_feature: MA Experiment 108515 PARAMETER Experiment Name: Zm_2mM_SA_P Parameter: Plant Line Value: 35A19
  misc_feature: MA Experiment 108515 PARAMETER Experiment Name: Zm_2mM_SA_P Parameter: Timepoint (hr) Value: 12
  misc_feature: MA Experiment 108515 PARAMETER Experiment Name: Zm_2mM_SA_P Parameter: Tissue Value: Aerial
  misc_feature: MA Experiment 108515 PARAMETER Experiment Name: Zm_2mM_SA_P Parameter: Treatment Value: 2mM SA vs. No Treatment
  misc_feature: MA Experiment ID: 108527 Result: Up-regulated in Transcription
  misc_feature: MA Experiment 108527 PARAMETER Experiment Name: Zm_5mM_NO_P Parameter: Age (day) Value: 8
  misc_feature: MA Experiment 108527 PARAMETER Experiment Name: Zm_5mM_NO_P Parameter: Organism Value: Zea mays
  misc_feature: MA Experiment 108527 PARAMETER Experiment Name: Zm_5mM_NO_P Parameter: Plant Line Value: 35A19
  misc_feature: MA Experiment 108527 PARAMETER Experiment Name: Zm_5mM_NO_P Parameter: Timepoint (hr) Value: 6
  misc_feature: MA Experiment 108527 PARAMETER Experiment Name: Zm_5mM_NO_P Parameter: Tissue Value: Aerial
  misc_feature: MA Experiment 108527 PARAMETER Experiment Name: Zm_5mM_NO_P Parameter: Treatment Value: 5mM NO vs. No Treatment
  misc_feature: MA Experiment ID: 108529 Result: Down-regulated in Transcription
  misc_feature: MA Experiment 108529 PARAMETER Experiment Name: Zm_Imbibed_Seeds_P Parameter: Age (day) Value: 5 vs. 2
  misc_feature: MA Experiment 108529 PARAMETER Experiment Name: Zm_Imbibed_Seeds_P Parameter: Organism Value: Zea mays
  misc_feature: MA Experiment 108529 PARAMETER Experiment Name: Zm_Imbibed_Seeds_P Parameter: Plant Line Value: 35A19
  misc_feature: MA Experiment 108529 PARAMETER Experiment Name: Zm_Imbibed_Seeds_P Parameter: Tissue Value: Roots vs. Embryo
  misc_feature: MA Experiment ID: 108559 Result: Up-regulated in Transcription
  misc_feature: MA Experiment 108559 PARAMETER Experiment Name: Zm_5mM_NO_P Parameter: Age (day) Value: 8
  misc_feature: MA Experiment 108559 PARAMETER Experiment Name: Zm_5mM_NO_P Parameter: Organism Value: Zea mays
  misc_feature: MA Experiment 108559 PARAMETER Experiment Name: Zm_5mM_NO_P Parameter: Plant Line Value: 35A19
  misc_feature: MA Experiment 108559 PARAMETER Experiment Name: Zm_5mM_NO_P Parameter: Timepoint (hr) Value: 12
  misc_feature: MA Experiment 108559 PARAMETER Experiment Name: Zm_5mM_NO_P Parameter: Tissue Value: Aerial
  misc_feature: MA Experiment 108559 PARAMETER Experiment Name: Zm_5mM_NO_P Parameter: Treatment Value: 5mM NO vs. No Treatment
  misc_feature: MA Experiment ID: 20000477 Result: Up-regulated in Transcription
  misc_feature: MA Experiment 20000477 PARAMETER Experiment Name: Zm_5mM_SA_P Parameter: Age (day) Value: 10
  misc_feature: MA Experiment 20000477 PARAMETER Experiment Name: Zm_5mM_SA_P Parameter: Organism Value: Zea mays
  misc_feature: MA Experiment 20000477 PARAMETER Experiment Name: Zm_5mM_SA_P Parameter: Plant Line Value: 35A19
  misc_feature: MA Experiment 20000477 PARAMETER Experiment Name: Zm_5mM_SA_P Parameter: Timepoint (hr) Value: 48
  misc_feature: MA Experiment 20000477 PARAMETER Experiment Name: Zm_5mM_SA_P Parameter: Tissue Value: Aerial
  misc_feature: MA Experiment 20000477 PARAMETER Experiment Name: Zm_5mM_SA_P Parameter: Treatment Value: 5mM SA vs. No Treatment
  misc_feature: MA Experiment ID: 20000478 Result: Up-regulated in Transcription
  misc_feature: MA Experiment 20000478 PARAMETER Experiment Name: Zm_5mM_SA_P Parameter: Age (day) Value: 11
  misc_feature: MA Experiment 20000478 PARAMETER Experiment Name: Zm_5mM_SA_P Parameter: Organism Value: Zea mays
  misc_feature: MA Experiment 20000478 PARAMETER Experiment Name: Zm_5mM_SA_P Parameter: Plant Line Value: 35A19
  misc_feature: MA Experiment 20000478 PARAMETER Experiment Name: Zm_5mM_SA_P Parameter: Timepoint (hr) Value: 72
  misc_feature: MA Experiment 20000478 PARAMETER Experiment Name: Zm_5mM_SA_P Parameter: Tissue Value: Aerial
  misc_feature: MA Experiment 20000478 PARAMETER Experiment Name: Zm_5mM_SA_P Parameter: Treatment Value: 5mM SA vs. No Treatment
  misc_feature: MA Experiment ID: 20000626 Result: Up-regulated in Transcription
  misc_feature: MA Experiment 20000626 PARAMETER Experiment Name: Zm_Herbicide-Treatments_P Parameter: Timepoint (hr) Value: 12
  misc_feature: MA Experiment 20000626 PARAMETER Experiment Name: Zm_Herbicide-Treatments_P Parameter: Tissue Value: Aerial
  misc_feature: MA Experiment 20000626 PARAMETER Experiment Name: Zm_Herbicide-Treatments_P Parameter: Treatment Value: Roundup vs. No Treatment
atgcagattcccaagtggagttgcggcggctggttatcatttatcatcaccttcgcctcacaccttccggccgcccattccgatccgatccccggccggccacctaccaccggtcagccccatcaatctctgaggcagcgtcagccatcaggcctccctcgtcgatctccccgccgccgccgctgctaataccagataatggaggccggcgccgccgctgctgccactgccatctaccctctgcaccatgcaaaaccatacacctggtgaggcatgcccaaggtgtccacaacgtggaaggcgacacggatcacagcgcctacatgaaacccgacttcttcgacgcgagcatcactcccttgggctggaaccaggttgacctcctgcgagagcatgtgaaggaatctgggcttgcagaaaagattgagctggttatttgttctcctttgtcgaggaccatgcagactgcagtgggagtttttgttggcgaaagctgcagtaatggtgtgagtgtgcctccactgatggtggagaatgctggacgtccggcagtttcaagtttgaactgcccaccatttcttgctgttgaggcctgcagggagcgcttgggtgtccatccttgtgacaagaggaggagcatcacagagtaccgtgctctcttccctgccattgatttttcgctgatagagagtgacgaagatgttctctgggtaccagatgtcagagaaacctttgagtcgctcgcagaaaggggtatgaagttcattgactggctatggacaagagaagagagagagatagccatcgtcacccatagcggtttattaagccataccttgcgcaggtacagcaaagagtgccatccaacagtaacacaagaagtgagcaagtactttgcaaactgcgagctccggtccttggtactggttgacaggagtatgcttggttcagatggccccagttacaacaactaccctggcaaaatgaaaatcccagccgcacttgatctgcccagcgatgacaagaagcagcctcttcagaaccagagcggctgagcaggcctgtcttggggcttgtttggtgttcaccaccactgattccttttcttttgtcatcctattttgaaacttccctagctgcattcagtccattttttgtgaactattttgaacttcccatctgtggttgttgagcaccatttgtggtactggacatggccggacggtccaacctgtggacggtccgtgattagatcagatcatacgtaattaacccttttcggcg

SEQ ID NO: 12709 - protein, 350 aa, Zea mays subsp. mays
  peptide (1)..(350): Ceres Seq. ID no. 12414697
  misc_feature (84)..(317): Pfam Name: Phosphoglycerate mutase family Pfam Description: Phosphoglycerate mutase family
  misc_feature (79)..(339): Homolog of NCBI NO: 38344765 NR Description: OSJNBa0068L06.8 [Oryza sativa (japonica
ADSQVELRRLVIIYHHLRLTPSGRPFRSDPRPATYHRSAPSISEAASAIRPPSSISPPPPLLIPDNGGRRRRCCHCHLPSAPCKTIHLVRHAQGVHNVEGDTDHSAYMKPDFFDASITPLGWNQVDLLREHVKESGLAEKIELVICSPLSRTMQTAVGVFVGESCSNGVSVPPLMVENAGRPAVSSLNCPPFLAVEACRERLGVHPCDKRRSITEYRALFPAIDFSLIESDEDVLWVPDVRETFESLAERGMKFIDWLWTREEREIAIVTHSGLLSHTLRRYSKECHPTVTQEVSKYFANCELRSLVLVDRSMLGSDGPSYNNYPGKMKIPAALDLPSDDKKQPLQNQSG

SEQ ID NO: 12710 - protein, 243 aa, Zea mays subsp. mays
  peptide (1)..(243): Ceres Seq. ID no. 12414698
  misc_feature (1)..(210): Pfam Name: Phosphoglycerate mutase family Pfam Description: Phosphoglycerate mutase family
  misc_feature (1)..(232): Homolog of NCBI NO: 38344765 NR Description: OSJNBa0068L06.8 [Oryza sativa (japonica
MKPDFFDASITPLGWNQVDLLREHVKESGLAEKIELVICSPLSRTMQTAVGVFVGESCSNGVSVPPLMVENAGRPAVSSLNCPPFLAVEACRERLGVHPCDKRRSITEYRALFPAIDFSLIESDEDVLWVPDVRETFESLAERGMKFIDWLWTREEREIAIVTHSGLLSHTLRRYSKECHPTVTQEVSKYFANCELRSLVLVDRSMLGSDGPSYNNYPGKMKIPAALDLPSDDKKQPLQNQSG

SEQ ID NO: 12711 - protein, 198 aa, Zea mays subsp. mays
  peptide (1)..(198): Ceres Seq. ID no. 12414699
  misc_feature (1)..(165): Pfam Name: Phosphoglycerate mutase family Pfam Description: Phosphoglycerate mutase family
  misc_feature (1)..(187): Homolog of NCBI NO: 38344765 NR Description: OSJNBa0068L06.8 [Oryza sativa (japonica
MQTAVGVFVGESCSNGVSVPPLMVENAGRPAVSSLNCPPFLAVEACRERLGVHPCDKRRSITEYRALFPAIDFSLIESDEDVLWVPDVRETFESLAERGMKFIDWLWTREEREIAIVTHSGLLSHTLRRYSKECHPTVTQEVSKYFANCELRSLVLVDRSMLGSDGPSYNNYPGKMKIPAALDLPSDDKKQPLQNQSG

SEQ ID NO: 12712 - DNA, 1039 bp, Zea mays subsp. mays
  misc_feature (1)..(1039): Ceres Seq. ID no. 12345461
  misc_feature: MA Experiment ID: 108535 Result: Down-regulated in Transcription
  misc_feature: MA Experiment 108535 PARAMETER Experiment Name: Zm_Meristem_P Parameter: Age (day) Value: 8
  misc_feature: MA Experiment 108535 PARAMETER Experiment Name: Zm_Meristem_P Parameter: Organism Value: Zea mays
  misc_feature: MA Experiment 108535 PARAMETER Experiment Name: Zm_Meristem_P Parameter: Plant Line Value: 35A19
  misc_feature: MA Experiment 108535 PARAMETER Experiment Name: Zm_Meristem_P Parameter: Tissue Value: Root Meristem vs. Above Root Meristem
  misc_feature: MA Experiment ID: 108559 Result: Down-regulated in Transcription
  misc_feature: MA Experiment 108559 PARAMETER Experiment Name: Zm_5mM_NO_P Parameter: Age (day) Value: 8
  misc_feature: MA Experiment 108559 PARAMETER Experiment Name: Zm_5mM_NO_P Parameter: Organism Value: Zea mays
  misc_feature: MA Experiment 108559 PARAMETER Experiment Name: Zm_5mM_NO_P Parameter: Plant Line Value: 35A19
  misc_feature: MA Experiment 108559 PARAMETER Experiment Name: Zm_5mM_NO_P Parameter: Timepoint (hr) Value: 12
  misc_feature: MA Experiment 108559 PARAMETER Experiment Name: Zm_5mM_NO_P Parameter: Tissue Value: Aerial
  misc_feature: MA Experiment 108559 PARAMETER Experiment Name: Zm_5mM_NO_P Parameter: Treatment Value: 5mM NO vs. No Treatment
  misc_feature: MA Experiment ID: 20000492 Result: Down-regulated in Transcription
  misc_feature: MA Experiment 20000492 PARAMETER Experiment Name: Zm_Hybrid_Seed_Dev_P Parameter: DAP Value: 12
  misc_feature: MA Experiment 20000492 PARAMETER Experiment Name: Zm_Hybrid_Seed_Dev_P Parameter: Organism Value: Zea mays
  misc_feature: MA Experiment 20000492 PARAMETER Experiment Name: Zm_Hybrid_Seed_Dev_P Parameter: Plant Line Value: 35A19
  misc_feature: MA Experiment 20000492 PARAMETER Experiment Name: Zm_Hybrid_Seed_Dev_P Parameter: Tissue Value: Fert Kernel vs. Unfert Floret
atcacttgacttgcgagcgaccgcggctcacgtcggctgcataaattgcttcgtagactagtaccacacagtttgcgagaaggggagaggtagaggttccgaggtagagagatagagaggaggagagggagggcgaggcggcggatccgtcactccgttcttctccgctgatctggaggaaggaggcgaggggagttgcaaatccatcaatggccactccaaccacctattcagtccgcatatcctcggagacccacaagattgaagcctgggtggtgtctgacgaagctttggccaggcaactgcaggaggaggagaacacgcgtgacgctgctgccgacaccagagaagtcgccggcaatgtacccttggagtcatcgtcaccggctgttgagtacaggcctgcacagaatgcagctcaggttgcaagggaagacaatgtggacccagataatatgtcatatgagcaactacaagcattaggggaagcagtaggaattcagtccagagggttatctgatgagctgatatcttatttggagccatttaggaacaagtgcactttcttctccaggaaaaagaacagtgaggaatgtgtgatctgcaagacaacatatagaagccggcagaaattgataagactaccctgcagccactgttatcacgcagattgcataactcgttggcttaagatcaacaaggcatgcccagtctgcaacgaggaggtgtttggatgaactgcaaggttcctggcagatgctgcggtttcatcgttacttgcttgcggcatgcttttgagaagacgttggacgcataaggtccattgtttgtgattatgttgtgagcctagtttggtgccctttgcttaagaggactggctctgcccatgcatgggtcggtctacacgtgtgctagtaactggaccaggtcgcgttttgtgatgcgtctatccatcttggttttatcacaaattgatagatctgttgtgtgggtagtttggttgccgttttctgaatataatggatggtgtttttgcccc

SEQ ID NO: 12713 - protein, 175 aa, Zea mays subsp. mays
  peptide (1)..(175): Ceres Seq. ID no. 12345462
  misc_feature (129)..(169): Pfam Name: Zinc finger, C3HC4 type (RING finger) Pfam Description: Zinc finger, C3HC4 type (RING finger)
  misc_feature (19)..(175): Homolog of NCBI NO: 38567912 NR Description: OSJNBa0088I22.8 [Oryza sativa (japonica
  misc_feature (12)..(175): Homolog of NCBI NO: 34898016 NR Description: ESTs C26000(C11448),AU082130(C11448) correspond
  misc_feature (60)..(175): Homolog of NCBI NO: 22331928 NR Description: putative protein; protein id: At3g63530.1 thaliana] >gi|21104275|emb|CAD32249.1| putative protein
  misc_feature (19)..(173): Homolog of NCBI NO: 21536693 NR Description: unknown [Arabidopsis thaliana]
  misc_feature (24)..(173): Homolog of NCBI NO: 10334499 NR Description: hypothetical protein [Cicer arietinum]
  misc_feature (19)..(173): Homolog of NCBI NO: 18402411 NR Description: expressed protein; protein id: At3g19910.1, by cDNA: 108568., supported by cDNA: gi_15010577, supported by gi_15028362, supported by cDNA: gi_19310706 [Arabidopsis
  misc_feature (75)..(172): Homolog of NCBI NO: 15232746 NR Description: zinc-finger protein-like protein; protein id:
MATPTTYSVRISSETHKIEAWVVSDEALARQLQEEENTRDAAADTREVAGNVPLESSSPAVEYRPAQNAAQVAREDNVDPDNMSYEQLQALGEAVGIQSRGLSDELISYLEPFRNKCTFFSRKKNSEECVICKTTYRSRQKLIRLPCSHCYHADCITRWLKINKACPVCNEEVFG

SEQ ID NO: 12714 - protein, 93 aa, Zea mays subsp. mays
  peptide (1)..(93): Ceres Seq. ID no. 12345463
  misc_feature (47)..(87): Pfam Name: Zinc finger, C3HC4 type (RING finger) Pfam Description: Zinc finger, C3HC4 type (RING finger)
  misc_feature (1)..(93): Homolog of NCBI NO: 38567912 NR Description: OSJNBa0088I22.8 [Oryza sativa (japonica
  misc_feature (1)..(93): Homolog of NCBI NO: 34898016 NR Description: ESTs C26000(C11448),AU082130(C11448) correspond
  misc_feature (1)..(93): Homolog of NCBI NO: 22331928 NR Description: putative protein; protein id: At3g63530.1 thaliana] >gi|21104275|emb|CAD32249.1| putative protein
  misc_feature (1)..(91): Homolog of NCBI NO: 21536693 NR Description: unknown [Arabidopsis thaliana]
  misc_feature (1)..(91): Homolog of NCBI NO: 10334499 NR Description: hypothetical protein [Cicer arietinum]
  misc_feature (1)..(91): Homolog of NCBI NO: 18402411 NR Description: expressed protein; protein id: At3g19910.1, by cDNA: 108568., supported by cDNA: gi_15010577, supported by gi_15028362, supported by cDNA: gi_19310706 [Arabidopsis
  misc_feature (1)..(90): Homolog of NCBI NO: 15232746 NR Description: zinc-finger protein-like protein; protein id:
MSYEQLQALGEAVGIQSRGLSDELISYLEPFRNKCTFFSRKKNSEECVICKTTYRSRQKLIRLPCSHCYHADCITRWLKINKACPVCNEEVFG

SEQ ID NO: 12715 - DNA, 1438 bp, Zea mays subsp. mays
  misc_feature (1)..(1438): Ceres Seq. ID no. 12351808
  misc_feature: MA Experiment ID: 108544 Result: Up-regulated in Transcription
  misc_feature: MA Experiment ID: 20000535 Result: Down-regulated in Transcription
  misc_feature: MA Experiment 20000535 PARAMETER Experiment Name: Zm_Hybrid_Seed_Dev_P Parameter: DAP Value: 30 vs. 12
  misc_feature: MA Experiment 20000535 PARAMETER Experiment Name: Zm_Hybrid_Seed_Dev_P Parameter: Organism Value: Zea mays
  misc_feature: MA Experiment 20000535 PARAMETER Experiment Name: Zm_Hybrid_Seed_Dev_P Parameter: Plant Line Value: 35A19
  misc_feature: MA Experiment 20000535 PARAMETER Experiment Name: Zm_Hybrid_Seed_Dev_P Parameter: Tissue Value: Embryo vs. Unfert Floret
gacgccaccaatcaacgcttccctttatggccggagcaatagttggcagactcggccgccatcccaccacctccttgctcctcctaacactgccccgtcacgccgccgcacaccaccggctttactctccttcctcctcccaagttgcaagagccggattgccaggtgcttgtttcgtttcgggctgtgtcagtattcaaaaatgggtgatccaagtgagaggaatggacacggcgctcttacccgggtgctattctgtggtccatattggcctgcttctactaactacaccagggagtatttgcaggactatccattcattcaggttgatgaagtaggtcttgagcaggtacctgatgttattcacagctatcatatatgtgtagtaaaaaataagcgtatagattcagatattattgccaaggcaactcagatgaagattataatgcagtatggtgttgggttagaaggtgttgatgtaaatgctgctacagaacacaaaatcaaagttgcacgaatacctggaagtacgacaggaaatgctgtctcttgcgcagaaatggcaatctatcttactctaggcattctgcgtaagcaaaaggagatggatactgctgtgaaccggaaagaccttggtgttccagttggagatacattgttcggcaaaacaatccttatccttggatttggggccattggcatcgaggttgccaagaggctaagaccctttggggtaaaaattcttgctacaaaaagaaattggtcatcggacacattgccatctgatgtcgatgagctagttgacaagaaaggtgggccggaagatatgtatgagtttgctggtgaagctaacattgttatagcatgcatgaccttaaccagcgagacaattggaattgtggatcataagtttgtttcatcaatgaaaaaggggtcatatctggtcaacattgctcggggacgcctgctggactacaaggctgtgtttgatcacctggaatcgggccatctagctggtctggggattgatgttgcttggatggagccatttgatcctgaggaccctgttctgaaattcccaaacgtcattctaacgccccatgtggccggcgtcaccgagtattcctacagaactatggcaaagtctgttggtgacaccgcccttcagcttcatttaggcgaggcgttcacggaggtagagttcgtcaactaaaaaaccgtccaggcggcagccgtagacgcatgccattcgtcggctattggaaccgctgatgcgatcatttgtagagaataatggatccgcgacttgtaagaataaacatgtagccagatgtttgatggtgatctccatgagaactctgccactggctgcttagctggtacctggtagtggtagcaagtcatttttctcaaacattgcgttctctttcgccttctc

SEQ ID NO: 12716 - protein, 403 aa, Zea mays subsp. mays
  peptide (1)..(403): Ceres Seq. ID no. 12351809
  misc_feature (184)..(367): Pfam Name: D-isomer specific 2-hydroxyacid dehydrogenase, Pfam Description: D-isomer specific 2-hydroxyacid dehydrogenase,
  misc_feature (108)..(403): Homolog of NCBI NO: 34901058 NR Description: putative phosphoglycerate dehydrogenase [Oryza
  misc_feature (107)..(383): Homolog of NCBI NO: 34901040 NR Description: putative phosphoglycerate dehydrogenase [Oryza
  misc_feature (80)..(403): Homolog of NCBI NO: 25406154 NR Description: hypothetical protein T9N14.9 [imported] - thaliana >gi|12323669|gb|AAG51802.1|AC067754_18 phosphoglycerate
  misc_feature (80)..(403): Homolog of NCBI NO: 30698851 NR Description: oxidoreductase family [Arabidopsis thaliana]
  misc_feature (111)..(394): Homolog of NCBI NO: 14521645 NR Description: GLYCERATE DEHYDROGENASE [Pyrococcus abyssi]
  misc_feature (106)..(393): Homolog of NCBI NO: 16079364 NR Description: phosphoglycerate dehydrogenase [Bacillus subtilis]
  misc_feature (133)..(394): Homolog of NCBI NO: 25027935 NR Description: putative D-3-phosphoglycerate dehydrogenase
  misc_feature (138)..(394): Homolog of NCBI NO: 23023997 NR Description: hypothetical protein [Leuconostoc mesenteroides
  misc_feature (115)..(393): Homolog of NCBI NO: 11498419 NR Description: phosphoglycerate dehydrogenase (serA)
  misc_feature (109)..(394): Homolog of NCBI NO: 19552504 NR Description: phosphoglycerate dehydrogenase [Corynebacterium ATCC 13032] >gi|21324052|dbj|BAB98677.1| Phosphoglycerate
TPPINASLYGRSNSWQTRPPSHHLLAPPNTAPSRRRTPPALLSFLLPSCKSRIARCLFRFGLCQYSKMGDPSERNGHGALTRVLFCGPYWPASTNYTREYLQDYPFIQVDEVGLEQVPDVIHSYHICVVKNKRIDSDIIAKATQMKIIMQYGVGLEGVDVNAATEHKIKVARIPGSTTGNAVSCAEMAIYLTLGILRKQKEMDTAVNRKDLGVPVGDTLFGKTILILGFGAIGIEVAKRLRPFGVKILATKRNWSSDTLPSDVDELVDKKGGPEDMYEFAGEANIVIACMTLTSETIGIVDHKFVSSMKKGSYLVNIARGRLLDYKAVFDHLESGHLAGLGIDVAWMEPFDPEDPVLKFPNVILTPHVAGVTEYSYRTMAKSVGDTALQLHLGEAFTEVEFVN

SEQ ID NO: 12717 - protein, 336 aa, Zea mays subsp. mays
  peptide (1)..(336): Ceres Seq. ID no. 12351810
  misc_feature (117)..(300): Pfam Name: D-isomer specific 2-hydroxyacid dehydrogenase, Pfam Description: D-isomer specific 2-hydroxyacid dehydrogenase,
  misc_feature (13)..(336): Homolog of NCBI NO: 25406154 NR Description: hypothetical protein T9N14.9 [imported] - thaliana >gi|12323669|gb|AAG51802.1|AC067754_18 phosphoglycerate
  misc_feature (13)..(336): Homolog of NCBI NO: 30698851 NR Description: oxidoreductase family [Arabidopsis thaliana]
  misc_feature (44)..(327): Homolog of NCBI NO: 14521645 NR Description: GLYCERATE DEHYDROGENASE [Pyrococcus abyssi]
  misc_feature (39)..(326): Homolog of NCBI NO: 16079364 NR Description: phosphoglycerate dehydrogenase [Bacillus subtilis]
  misc_feature (41)..(336): Homolog of NCBI NO: 34901058 NR Description: putative phosphoglycerate dehydrogenase [Oryza
  misc_feature (40)..(316): Homolog of NCBI NO: 34901040 NR Description: putative phosphoglycerate dehydrogenase [Oryza
  misc_feature (66)..(327): Homolog of NCBI NO: 25027935 NR Description: putative D-3-phosphoglycerate dehydrogenase
  misc_feature (71)..(327): Homolog of NCBI NO: 23023997 NR Description: hypothetical protein [Leuconostoc mesenteroides
  misc_feature (48)..(326): Homolog of NCBI NO: 11498419 NR Description: phosphoglycerate dehydrogenase (serA)
  misc_feature (42)..(327): Homolog of NCBI NO: 19552504 NR Description: phosphoglycerate dehydrogenase [Corynebacterium ATCC 13032] >gi|21324052|dbj|BAB98677.1| Phosphoglycerate
MGDPSERNGHGALTRVLFCGPYWPASTNYTREYLQDYPFIQVDEVGLEQVPDVIHSYHICVVKNKRIDSDIIAKATQMKIIMQYGVGLEGVDVNAATEHKIKVARIPGSTTGNAVSCAEMAIYLTLGILRKQKEMDTAVNRKDLGVPVGDTLFGKTILILGFGAIGIEVAKRLRPFGVKILATKRNWSSDTLPSDVDELVDKKGGPEDMYEFAGEANIVIACMTLTSETIGIVDHKFVSSMKKGSYLVNIARGRLLDYKAVFDHLESGHLAGLGIDVAWMEPFDPEDPVLKFPNVILTPHVAGVTEYSYRTMAKSVGDTALQLHLGEAFTEVEFVN

SEQ ID NO: 12718 - protein, 259 aa, Zea mays subsp. mays
  peptide (1)..(259): Ceres Seq. ID no. 12351811
  misc_feature (40)..(223): Pfam Name: D-isomer specific 2-hydroxyacid dehydrogenase, Pfam Description: D-isomer specific 2-hydroxyacid dehydrogenase,
  misc_feature (1)..(259): Homolog of NCBI NO: 34901058 NR Description: putative phosphoglycerate dehydrogenase [Oryza
  misc_feature (1)..(239): Homolog of NCBI NO: 34901040 NR Description: putative phosphoglycerate dehydrogenase [Oryza
  misc_feature (1)..(259): Homolog of NCBI NO: 25406154 NR Description: hypothetical protein T9N14.9 [imported] - thaliana >gi|12323669|gb|AAG51802.1|AC067754_18 phosphoglycerate
  misc_feature (1)..(259): Homolog of NCBI NO: 30698851 NR Description: oxidoreductase family [Arabidopsis thaliana]
  misc_feature (1)..(250): Homolog of NCBI NO: 14521645 NR Description: GLYCERATE DEHYDROGENASE [Pyrococcus abyssi]
  misc_feature (1)..(249): Homolog of NCBI NO: 16079364 NR Description: phosphoglycerate dehydrogenase [Bacillus subtilis]
  misc_feature (1)..(250): Homolog of NCBI NO: 25027935 NR Description: putative D-3-phosphoglycerate dehydrogenase
  misc_feature (1)..(250): Homolog of NCBI NO: 23023997 NR Description: hypothetical protein [Leuconostoc mesenteroides
  misc_feature (1)..(249): Homolog of NCBI NO: 11498419 NR Description: phosphoglycerate dehydrogenase (serA)
  misc_feature (1)..(250): Homolog of NCBI NO: 19552504 NR Description: phosphoglycerate dehydrogenase [Corynebacterium ATCC 13032] >gi|21324052|dbj|BAB98677.1| Phosphoglycerate
MKIIMQYGVGLEGVDVNAATEHKIKVARIPGSTTGNAVSCAEMAIYLTLGILRKQKEMDTAVNRKDLGVPVGDTLFGKTILILGFGAIGIEVAKRLRPFGVKILATKRNWSSDTLPSDVDELVDKKGGPEDMYEFAGEANIVIACMTLTSETIGIVDHKFVSSMKKGSYLVNIARGRLLDYKAVFDHLESGHLAGLGIDVAWMEPFDPEDPVLKFPNVILTPHVAGVTEYSYRTMAKSVGDTALQLHLGEAFTEVEFVN

SEQ ID NO: 12719 - DNA, 1324 bp, Zea mays subsp. mays
  misc_feature (1)..(1324): Ceres Seq. ID no. 12414692
  misc_feature: MA Experiment ID: 20000535 Result: Up-regulated in Transcription
  misc_feature: MA Experiment 20000535 PARAMETER Experiment Name: Zm_Hybrid_Seed_Dev_P Parameter: DAP Value: 30 vs. 12
  misc_feature: MA Experiment 20000535 PARAMETER Experiment Name: Zm_Hybrid_Seed_Dev_P Parameter: Organism Value: Zea mays
  misc_feature: MA Experiment 20000535 PARAMETER Experiment Name: Zm_Hybrid_Seed_Dev_P Parameter: Plant Line Value: 35A19
  misc_feature: MA Experiment 20000535 PARAMETER Experiment Name: Zm_Hybrid_Seed_Dev_P Parameter: Tissue Value: Embryo vs. Unfert Floret
atctcctccacttccttcctgggctctgggctacgtattatccatccgtctcagtcacctcgcctcctcctcctcctcccccagtccccctccctcatcctcgattgcgcccctcactcgccatgtcggggctctacagccaggggttctcccctgcgcgaaacctctcccctcagattagaagcaatccggacgctgatagtcagtacctggccgagctgctcgccgaacaccacaaactggggcccttcatgcaggtgctgcccgtatgcaacaagctgctgagccaagagattatgcgggtatcaagcattgtgcacaaccatggatttggcgatttcgacaggcatcggtttagaagtcctagtccaatgtcttctccaaaccctagagctaatctccctggcaatgggttcagtccttggagcggactacaagagagattaggttttcctcaaggaaccagcatggactggcaaggagcacccccaagtcctagctcccatgttgtaaagaagattcttcgtctggaggttccagttgattcttatccgaatttcaattttgtggggcgcattttaggacctagaggtaattctctaaagcgagtagaagcatccactgggtgtcgtgttttcattagaggaaagggttccatcaaagattcagggaaggaggacaaactacggggaaaaccgggctatgagcacctgagtgatccgctgcatatcttgatagaggccgagttccctgccagtatcatcgatgcaaggctgagacaagcacaggagattatagaagaattgcttaaaccagtggacgagtcccaagatctctacaaaaggcagcagctcagggagctggcaatgctgaactcaaccctgagagaggacagccctcatccggggagtgtctctccattcagcaacggtggcatgaagcgtgcgaaaacaggacagtagagaaaacaactatgctcccatatctggccccgtcgtcatgggaacgccatgggcatgcgtgaaggaaggccatgcgccttcgctggcggagtccggtatcttctgctagctttcacctccggacaggggaaagatgagatgagatgagatgagatagtcgcggacccttggttggatccggcgttggttgttgtatggtctagaacattcgttctatttgttattgacggttaaccctagtatgttggtgagctgcaacctgcaaactgcatggtaaactagctagagaggcctgctgagtatgtgagctttaggtcttttcttgacattgtattataacctttttaacattatggagttgc

SEQ ID NO: 12720 - protein, 319 aa, Zea mays subsp. mays
  peptide (1)..(319): Ceres Seq. ID no. 12414693
  misc_feature (175)..(230): Pfam Name: KH domain Pfam Description: KH domain
  misc_feature (43)..(316): Homolog of NCBI NO: 34900448 NR Description: contains EST C27129(C51039)~similar to
  misc_feature (34)..(319): Homolog of NCBI NO: 12322716 NR Description: unknown protein; 28504-31237 [Arabidopsis
  misc_feature (41)..(319): Homolog of NCBI NO: 30680583 NR Description: KH domain protein [Arabidopsis thaliana]
  misc_feature (41)..(318): Homolog of NCBI NO: 15224909 NR Description: KH domain protein; protein id: At2g38610.1, by cDNA: gi_14596032, supported by cDNA: gi_17473661, supported
  misc_feature (41)..(319): Homolog of NCBI NO: 40645104 NR Description: hypothetical protein [Nicotiana tabacum]
  misc_feature (49)..(316): Homolog of NCBI NO: 34909270 NR Description: P0454H12.18 [Oryza sativa (japonica
  misc_feature (54)..(317): Homolog of NCBI NO: 15236738 NR Description: KH domain protein; protein id: At4g26480.1
  misc_feature (54)..(317): Homolog of NCBI NO: 20268733 NR Description: unknown protein [Arabidopsis thaliana]
  misc_feature (54)..(317): Homolog of NCBI NO: 15241136 NR Description: KH domain protein; protein id: At5g56140.1
  misc_feature (97)..(319): Homolog of NCBI NO: 34907446 NR Description: P0434C04.5 [Oryza sativa (japonica
LLHFLPGLWATYYPSVSVTSPPPPPPPVPLPHPRLRPSLAMSGLYSQGFSPARNLSPQIRSNPDADSQYLAELLAEHHKLGPFMQVLPVCNKLLSQEIMRVSSIVHNHGFGDFDRHRFRSPSPMSSPNPRANLPGNGFSPWSGLQERLGFPQGTSMDWQGAPPSPSSHVVKKILRLEVPVDSYPNFNFVGRILGPRGNSLKRVEASTGCRVFIRGKGSIKDSGKEDKLRGKPGYEHLSDPLHILIEAEFPASIIDARLRQAQEIIEELLKPVDESQDLYKRQQLRELAMLNSTLREDSPHPGSVSPFSNGGMKRAKTGQ

SEQ ID NO: 12721 - protein, 279 aa, Zea mays subsp. mays
  peptide (1)..(279): Ceres Seq. ID no. 12414694
  misc_feature (135)..(190): Pfam Name: KH domain Pfam Description: KH domain
  misc_feature (3)..(276): Homolog of NCBI NO: 34900448 NR Description: contains EST C27129(C51039)~similar to
  misc_feature (1)..(279): Homolog of NCBI NO: 12322716 NR Description: unknown protein; 28504-31237 [Arabidopsis
  misc_feature (1)..(279): Homolog of NCBI NO: 30680583 NR Description: KH domain protein [Arabidopsis thaliana]
  misc_feature (1)..(278): Homolog of NCBI NO: 15224909 NR Description: KH domain protein; protein id: At2g38610.1, by cDNA: gi_14596032, supported by cDNA: gi_17473661, supported
  misc_feature (1)..(279): Homolog of NCBI NO: 40645104 NR Description: hypothetical protein [Nicotiana tabacum]
  misc_feature (9)..(276): Homolog of NCBI NO: 34909270 NR Description: P0454H12.18 [Oryza sativa (japonica
  misc_feature (14)..(277): Homolog of NCBI NO: 15236738 NR Description: KH domain protein; protein id: At4g26480.1
  misc_feature (14)..(277): Homolog of NCBI NO: 20268733 NR Description: unknown protein [Arabidopsis thaliana]
  misc_feature (14)..(277): Homolog of NCBI NO: 15241136 NR Description: KH domain protein; protein id: At5g56140.1
  misc_feature (57)..(279): Homolog of NCBI NO: 34907446 NR Description: P0434C04.5 [Oryza sativa (japonica
MSGLYSQGFSPARNLSPQIRSNPDADSQYLAELLAEHHKLGPFMQVLPVCNKLLSQEIMRVSSIVHNHGFGDFDRHRFRSPSPMSSPNPRANLPGNGFSPWSGLQERLGFPQGTSMDWQGAPPSPSSHVVKKILRLEVPVDSYPNFNFVGRILGPRGNSLKRVEASTGCRVFIRGKGSIKDSGKEDKLRGKPGYEHLSDPLHILIEAEFPASIIDARLRQAQEIIEELLKPVDESQDLYKRQQLRELAMLNSTLREDSPHPGSVSPFSNGGMKRAKTGQ

SEQ ID NO: 12722 - protein, 236 aa, Zea mays subsp. mays
  peptide (1)..(236): Ceres Seq. ID no. 12414695
  misc_feature (92)..(147): Pfam Name: KH domain Pfam Description: KH domain
  misc_feature (1)..(233): Homolog of NCBI NO: 34900448 NR Description: contains EST C27129(C51039)~similar to
  misc_feature (1)..(236): Homolog of NCBI NO: 12322716 NR Description: unknown protein; 28504-31237 [Arabidopsis
  misc_feature (1)..(236): Homolog of NCBI NO: 30680583 NR Description: KH domain protein [Arabidopsis thaliana]
  misc_feature (1)..(235): Homolog of NCBI NO: 15224909 NR Description: KH domain protein; protein id: At2g38610.1, by cDNA: gi_14596032, supported by cDNA: gi_17473661, supported
  misc_feature (1)..(236): Homolog of NCBI NO: 40645104 NR Description: hypothetical protein [Nicotiana tabacum]
  misc_feature (1)..(233): Homolog of NCBI NO: 34909270 NR Description: P0454H12.18 [Oryza sativa (japonica
  misc_feature (1)..(234): Homolog of NCBI NO: 15236738 NR Description: KH domain protein; protein id: At4g26480.1
  misc_feature (1)..(234): Homolog of NCBI NO: 20268733 NR Description: unknown protein [Arabidopsis thaliana]
  misc_feature (1)..(234): Homolog of NCBI NO: 15241136 NR Description: KH domain protein; protein id: At5g56140.1
  misc_feature (14)..(236): Homolog of NCBI NO: 34907446 NR Description: P0434C04.5 [Oryza sativa (japonica
MQVLPVCNKLLSQEIMRVSSIVHNHGFGDFDRHRFRSPSPMSSPNPRANLPGNGFSPWSGLQERLGFPQGTSMDWQGAPPSPSSHVVKKILRLEVPVDSYPNFNFVGRILGPRGNSLKRVEASTGCRVFIRGKGSIKDSGKEDKLRGKPGYEHLSDPLHILIEAEFPASIIDARLRQAQEIIEELLKPVDESQDLYKRQQLRELAMLNSTLREDSPHPGSVSPFSNGGMKRAKTGQ

SEQ ID NO: 12723 - DNA, 1011 bp, Zea mays subsp. mays
  misc_feature (1)..(1011): Ceres Seq. ID no. 12384230
  misc_feature: MA Experiment ID: 108535 Result: Up-regulated in Transcription
  misc_feature: MA Experiment 108535 PARAMETER Experiment Name: Zm_Meristem_P Parameter: Age (day) Value: 8
  misc_feature: MA Experiment 108535 PARAMETER Experiment Name: Zm_Meristem_P Parameter: Organism Value: Zea mays
  misc_feature: MA Experiment 108535 PARAMETER Experiment Name: Zm_Meristem_P Parameter: Plant Line Value: 35A19
  misc_feature: MA Experiment 108535 PARAMETER Experiment Name: Zm_Meristem_P Parameter: Tissue Value: Root Meristem vs. Above Root Meristem
gagtagcaatcactgctgcgcccgataggtggcagcgagccagcgacccacccgactctgttccaacgagccttccctcccaaacttgcacgctgcccccgctctcgcctccgcccccgatccagatccagggtggaatagggaacggccatacaccatggcggatttctccaaggaatcttgcccttctgtgaagaacattttacttctggattctgaaggaaagcgtgttgctgtaaagtatttctcagatgattggccgactaatgcatcaaagttagcctacgaaaagtctgtttttactaaaactctaaagacaaatgcacggacagaagctgagataacattgtttgatggttatattgtcgtttacaagtttgtacatgaccttcacttttttgtcaccgctggagatgatgagaatgagctcatcttagcaagtgtactacatggtttttctgattctgttggtcttctactcaggggtgatgttgagaagcggactgcgcttgagaacttggatttgatacttctctgcatcgatgaaattgtagatgggggaatcatcctggaaacagatgcaaacaccattgctggtaaggttgcaaccaatgctgttgatggttctgtgcccttttctgagcagacgatatctcaggcactagccacagctagggagcaccttgcaagatctctactgaaatgaacaaccagcaatatgtatgacgtattatatgacatatatgtgtgtaggttgggctactgaatgttgagggtctttgtagacgttattcgtcccaaagtgctgctgtgacagagcctagttgaatatccgagggattggtcacatgctcgttaaattttttttttgaaccagtgagtttgtagctgccatatttcaggtaaaacataaaataaagagttgtaattgggtgtaatataattttcaccatacaaaaaaaaattcatctcaactatcaaaccatggtaaaaggttcaaaattatctatc

SEQ ID NO: 12724 - protein, 182 aa, Zea mays subsp. mays
  peptide (1)..(182): Ceres Seq. ID no. 12384231
  misc_feature (11)..(154): Pfam Name: Clathrin adaptor complex small chain Pfam Description: Clathrin adaptor complex small chain
  misc_feature (1)..(182): Homolog of NCBI NO: 7380908 NR Description: nonclathrin coat protein zeta2-COP [Zea mays]
  misc_feature (18)..(182): Homolog of NCBI NO: 7259350 NR Description: nonclathrin coat protein zeta2-COP [Oryza sativa]
MADFSKESCPSVKNILLLDSEGKRVAVKYFSDDWPTNASKLAYEKSVFTKTLKTNARTEAEITLFDGYIVVYKFVHDLHFFVTAGDDENELILASVLHGFSDSVGLLLRGDVEKRTALENLDLILLCIDEIVDGGIILETDANTIAGKVATNAVDGSVPFSEQTISQALATAREHLARSLLK

SEQ ID NO: 12725 - DNA, 1462 bp, Zea mays subsp. mays; identical to SEQ ID NO: 10801
  misc_feature (1)..(1462): Ceres Seq. ID no. 13579635
  misc_feature: MA Experiment ID: 108522 Result: Up-regulated in Transcription
  misc_feature: MA Experiment 108522 PARAMETER Experiment Name: Zm_42deg_Heat_P Parameter: Age (day) Value: 8
  misc_feature: MA Experiment 108522 PARAMETER Experiment Name: Zm_42deg_Heat_P Parameter: Organism Value: Zea mays
  misc_feature: MA Experiment 108522 PARAMETER Experiment Name: Zm_42deg_Heat_P Parameter: Plant Line Value: 35A19
  misc_feature: MA Experiment 108522 PARAMETER Experiment Name: Zm_42deg_Heat_P Parameter: Temperature (deg C) Value: 42 vs. 22
  misc_feature: MA Experiment 108522 PARAMETER Experiment Name: Zm_42deg_Heat_P Parameter: Timepoint (hr) Value: 1
  misc_feature: MA Experiment 108522 PARAMETER Experiment Name: Zm_42deg_Heat_P Parameter: Tissue Value: Aerial
  misc_feature: MA Experiment ID: 108527 Result: Up-regulated in Transcription
  misc_feature: MA Experiment 108527 PARAMETER Experiment Name: Zm_5mM_NO_P Parameter: Age (day) Value: 8
  misc_feature: MA Experiment 108527 PARAMETER Experiment Name: Zm_5mM_NO_P Parameter: Organism Value: Zea mays
  misc_feature: MA Experiment 108527 PARAMETER Experiment Name: Zm_5mM_NO_P Parameter: Plant Line Value: 35A19
  misc_feature: MA Experiment 108527 PARAMETER Experiment Name: Zm_5mM_NO_P Parameter: Timepoint (hr) Value: 6
  misc_feature: MA Experiment 108527 PARAMETER Experiment Name: Zm_5mM_NO_P Parameter: Tissue Value: Aerial
  misc_feature: MA Experiment 108527 PARAMETER Experiment Name: Zm_5mM_NO_P Parameter: Treatment Value: 5mM NO vs. No Treatment
  misc_feature: MA Experiment ID: 108543 Result: Down-regulated in Transcription

SEQ ID NO: 12726 - protein, 410 aa, Zea mays subsp. mays; identical to SEQ ID NO: 10802
  peptide (1)..(410): Ceres Seq. ID no. 13579636
  misc_feature (30)..(103): Pfam Name: Ubiquitin family Pfam Description: Ubiquitin family
  misc_feature (30)..(103): Pfam Name: Ubiquitin family Pfam Description: Ubiquitin family
  misc_feature (30)..(103): Pfam Name: Ubiquitin family Pfam Description: Ubiquitin family
  misc_feature (30)..(103): Pfam Name: Ubiquitin family Pfam Description: Ubiquitin family
  misc_feature (27)..(409): Homolog of NCBI NO: 902584 NR Description: polyubiquitin containing 7 ubiquitin monomers
  misc_feature (27)..(410): Homolog of NCBI NO: 902584 NR Description: polyubiquitin containing 7 ubiquitin monomers
  misc_feature (30)..(410): Homolog of NCBI NO: 4809266 NR Description: polyubiquitin [Sporobolus stapfianus]
  misc_feature (27)..(409): Homolog of NCBI NO: 100524 NR Description: polyubiquitin 6 - common sunflower hexaubiquitin protein [Helianthus annuus]
  misc_feature (27)..(410): Homolog of NCBI NO: 481477 NR Description: polyubiquitin 6 - rice >gi|416038|emb|CAA53665.1|
  misc_feature (27)..(410): Homolog of NCBI NO: 481477 NR Description: polyubiquitin 6 - rice >gi|416038|emb|CAA53665.1|
  misc_feature (27)..(409): Homolog of NCBI NO: 902584 NR Description: polyubiquitin containing 7 ubiquitin monomers
  misc_feature (30)..(410): Homolog of NCBI NO: 899608 NR Description: polyubiquitin
  misc_feature (27)..(410): Homolog of NCBI NO: 481477 NR Description: polyubiquitin 6 - rice >gi|416038|emb|CAA53665.1|
  misc_feature (27)..(410): Homolog of NCBI NO: 100934 NR Description: polyubiquitin - maize >gi|248337|gb|AAB21993.1|
  misc_feature (27)..(409): Homolog of NCBI NO: 100934 NR Description: polyubiquitin - maize >gi|248337|gb|AAB21993.1|
  misc_feature (27)..(409): Homolog of NCBI NO: 4115337 NR Description: ubiquitin [Pisum sativum]
  misc_feature (27)..(409): Homolog of NCBI NO: 16660462 NR Description: polyubiquitin OUB2 [Olea europaea]
  misc_feature (27)..(409): Homolog of NCBI NO: 100524 NR Description: polyubiquitin 6 - common sunflower hexaubiquitin protein [Helianthus annuus]
  misc_feature (30)..(410): Homolog of NCBI NO: 4809266 NR Description: polyubiquitin [Sporobolus stapfianus]
  misc_feature (27)..(410): Homolog of NCBI NO: 902584 NR Description: polyubiquitin containing 7 ubiquitin monomers
  misc_feature (27)..(409): Homolog of NCBI NO: 100934 NR Description: polyubiquitin - maize >gi|248337|gb|AAB21993.1|
  misc_feature (27)..(409): Homolog of NCBI NO: 4115337 NR Description: ubiquitin [Pisum sativum]
  misc_feature (27)..(409): Homolog of NCBI NO: 16660462 NR Description: polyubiquitin OUB2 [Olea europaea]
  misc_feature (27)..(409): Homolog of NCBI NO: 100524 NR Description: polyubiquitin 6 - common sunflower hexaubiquitin protein [Helianthus annuus]
  misc_feature (30)..(410): Homolog of NCBI NO: 4809266 NR Description: polyubiquitin [Sporobolus stapfianus]
  misc_feature (27)..(410): Homolog of NCBI NO: 902584 NR Description: polyubiquitin containing 7 ubiquitin monomers
  misc_feature (27)..(409): Homolog of NCBI NO: 902584 NR Description: polyubiquitin containing 7 ubiquitin monomers
  misc_feature (30)..(410): Homolog of NCBI NO: 899608 NR Description: polyubiquitin
  misc_feature (27)..(410): Homolog of NCBI NO: 481477 NR Description: polyubiquitin 6 - rice >gi|416038|emb|CAA53665.1|
  misc_feature (27)..(410): Homolog of NCBI NO: 100934 NR Description: polyubiquitin - maize >gi|248337|gb|AAB21993.1|
  misc_feature (27)..(409): Homolog of NCBI NO: 100934 NR Description: polyubiquitin - maize >gi|248337|gb|AAB21993.1|
  misc_feature (27)..(409): Homolog of NCBI NO: 4115337 NR Description: ubiquitin [Pisum sativum]
  misc_feature (27)..(409): Homolog of NCBI NO: 16660462 NR Description: polyubiquitin OUB2 [Olea europaea]
  misc_feature (27)..(409): Homolog of NCBI NO: 100524 NR Description: polyubiquitin 6 - common sunflower hexaubiquitin protein [Helianthus annuus]
  misc_feature (30)..(410): Homolog of NCBI NO: 4809266 NR Description: polyubiquitin [Sporobolus stapfianus]
  misc_feature (27)..(410): Homolog of NCBI NO: 902584 NR Description: polyubiquitin containing 7 ubiquitin monomers
  misc_feature (27)..(409): Homolog of NCBI NO: 902584 NR Description: polyubiquitin containing 7 ubiquitin monomers
  misc_feature (30)..(410): Homolog of NCBI NO: 899608 NR Description: polyubiquitin
  misc_feature (27)..(410): Homolog of NCBI NO: 100934 NR Description: polyubiquitin - maize >gi|248337|gb|AAB21993.1|
  misc_feature (30)..(410): Homolog of NCBI NO: 899608 NR Description: polyubiquitin
  misc_feature (27)..(410): Homolog of NCBI NO: 100934 NR Description: polyubiquitin - maize >gi|248337|gb|AAB21993.1|
  misc_feature (27)..(409): Homolog of NCBI NO: 16660462 NR Description: polyubiquitin OUB2 [Olea europaea]
  misc_feature (27)..(409): Homolog of NCBI NO: 4115337 NR Description: ubiquitin [Pisum sativum]
  misc_feature (27)..(409): Homolog of NCBI NO: 100934 NR Description: polyubiquitin - maize >gi|248337|gb|AAB21993.1|

SEQ ID NO: 12727 - protein, 381 aa, Zea mays subsp. mays; identical to SEQ ID NO: 10803
  peptide (1)..(381): Ceres Seq. ID no. 13579637
  misc_feature (1)..(74): Pfam Name: Ubiquitin family Pfam Description: Ubiquitin family
  misc_feature (1)..(74): Pfam Name: Ubiquitin family Pfam Description: Ubiquitin family
  misc_feature (1)..(74): Pfam Name: Ubiquitin family Pfam Description: Ubiquitin family
  misc_feature (1)..(74): Pfam Name: Ubiquitin family Pfam Description: Ubiquitin family
  misc_feature (1)..(381): Homolog of NCBI NO: 100934 NR Description: polyubiquitin - maize >gi|248337|gb|AAB21993.1|
  misc_feature (1)..(381): Homolog of NCBI NO: 481477 NR Description: polyubiquitin 6 - rice >gi|416038|emb|CAA53665.1|
  misc_feature (1)..(381): Homolog of NCBI NO: 899608 NR Description: polyubiquitin
  misc_feature (1)..(380): Homolog of NCBI NO: 902584 NR Description: polyubiquitin containing 7 ubiquitin monomers
  misc_feature (1)..(381): Homolog of NCBI NO: 902584 NR Description: polyubiquitin containing 7 ubiquitin monomers
  misc_feature (1)..(381): Homolog of NCBI NO: 4809266 NR Description: polyubiquitin [Sporobolus stapfianus]
  misc_feature (1)..(381): Homolog of NCBI NO: 481477 NR Description: polyubiquitin 6 - rice >gi|416038|emb|CAA53665.1|
  misc_feature (1)..(381): Homolog of NCBI NO: 899608 NR Description: polyubiquitin
  misc_feature (1)..(381): Homolog of NCBI NO: 481477 NR Description: polyubiquitin 6 - rice >gi|416038|emb|CAA53665.1|
  misc_feature (1)..(381): Homolog of NCBI NO: 100934 NR Description: polyubiquitin - maize >gi|248337|gb|AAB21993.1|
  misc_feature (1)..(380): Homolog of NCBI NO: 418854 NR Description: polyubiquitin 6 - parsley polyubiquitin [Petroselinum crispum] >gi|288114|emb|CAA45622.1|
  misc_feature (1)..(380): Homolog of NCBI NO: 100524 NR Description: polyubiquitin 6 - common sunflower hexaubiquitin protein [Helianthus annuus]
  misc_feature (1)..(381): Homolog of NCBI NO: 4809266 NR Description: polyubiquitin [Sporobolus stapfianus]
  misc_feature (1)..(381): Homolog of NCBI NO: 902584 NR Description: polyubiquitin containing 7 ubiquitin monomers
  misc_feature (1)..(380): Homolog of NCBI NO: 902584 NR Description: polyubiquitin containing 7 ubiquitin monomers
  misc_feature (1)..(381): Homolog of NCBI NO: 899608 NR Description: polyubiquitin
  misc_feature (1)..(380): Homolog of NCBI NO: 4115337 NR Description: ubiquitin [Pisum sativum]
  misc_feature (1)..(380): Homolog of NCBI NO: 16660462 NR Description: polyubiquitin OUB2 [Olea europaea]
  misc_feature (1)..(380): Homolog of NCBI NO: 418854 NR Description: polyubiquitin 6 - parsley polyubiquitin [Petroselinum crispum] >gi|288114|emb|CAA45622.1|
  misc_feature (1)..(380): Homolog of NCBI NO: 100524 NR Description: polyubiquitin 6 - common sunflower hexaubiquitin protein [Helianthus annuus]
  misc_feature (1)..(381): Homolog of NCBI NO: 4809266 NR Description: polyubiquitin [Sporobolus stapfianus]
  misc_feature (1)..(381): Homolog of NCBI NO: 902584 NR Description: polyubiquitin containing 7 ubiquitin monomers
  misc_feature (1)..(380): Homolog of NCBI NO: 902584 NR Description: polyubiquitin containing 7 ubiquitin monomers
  misc_feature (1)..(381): Homolog of NCBI NO: 899608 NR Description: polyubiquitin
  misc_feature (1)..(381): Homolog of NCBI NO: 481477 NR Description: polyubiquitin 6 - rice >gi|416038|emb|CAA53665.1|
  misc_feature (1)..(381): Homolog of NCBI NO: 100934 NR Description: polyubiquitin - maize >gi|248337|gb|AAB21993.1|
  misc_feature (1)..(380): Homolog of NCBI NO: 4115337 NR Description: ubiquitin [Pisum sativum]
  misc_feature (1)..(380): Homolog of NCBI NO: 16660462 NR Description: polyubiquitin OUB2 [Olea europaea]
  misc_feature (1)..(380): Homolog of NCBI NO: 418854 NR Description: polyubiquitin 6 - parsley polyubiquitin [Petroselinum crispum] >gi|288114|emb|CAA45622.1|
  misc_feature (1)..(380): Homolog of NCBI NO: 100524 NR Description: polyubiquitin 6 - common sunflower hexaubiquitin protein [Helianthus annuus]
  misc_feature (1)..(381): Homolog of NCBI NO: 4809266 NR Description: polyubiquitin [Sporobolus stapfianus]
  misc_feature (1)..(381): Homolog of NCBI NO: 902584 NR Description: polyubiquitin containing 7 ubiquitin monomers
  misc_feature (1)..(380): Homolog of NCBI NO: 902584 NR Description: polyubiquitin containing 7 ubiquitin monomers
  misc_feature (1)..(381): Homolog of NCBI NO: 100934 NR Description: polyubiquitin - maize >gi|248337|gb|AAB21993.1|
  misc_feature (1)..(380): Homolog of NCBI NO: 100524 NR Description: polyubiquitin 6 - common sunflower hexaubiquitin protein [Helianthus annuus]
  misc_feature (1)..(380): Homolog of NCBI NO: 418854 NR Description: polyubiquitin 6 - parsley polyubiquitin [Petroselinum crispum] >gi|288114|emb|CAA45622.1|
  misc_feature (1)..(380): Homolog of NCBI NO: 16660462 NR Description: polyubiquitin OUB2 [Olea europaea]
  misc_feature (1)..(380): Homolog of NCBI NO: 4115337 NR Description: ubiquitin [Pisum sativum]
  misc_feature (1)..(380): Homolog of NCBI NO: 16660462 NR Description: polyubiquitin OUB2 [Olea europaea]
  misc_feature (1)..(380): Homolog of NCBI NO: 4115337 NR Description: ubiquitin [Pisum sativum]

SEQ ID NO: 12728 - protein, 305 aa, Zea mays subsp. mays; identical to SEQ ID NO: 10804
  peptide (1)..(305): Ceres Seq. ID no. 13579638
  misc_feature (1)..(74): Pfam Name: Ubiquitin family Pfam Description: Ubiquitin family
  misc_feature (1)..(74): Pfam Name: Ubiquitin family Pfam Description: Ubiquitin family
  misc_feature (1)..(74): Pfam Name: Ubiquitin family Pfam Description: Ubiquitin family
  misc_feature (1)..(74): Pfam Name: Ubiquitin family Pfam Description: Ubiquitin family
  misc_feature (1)..(305): Homolog of NCBI NO: 100934 NR Description: polyubiquitin - maize >gi|248337|gb|AAB21993.1|
  misc_feature (1)..(305): Homolog of NCBI NO: 481477 NR Description: polyubiquitin 6 - rice >gi|416038|emb|CAA53665.1|
  misc_feature (1)..(305): Homolog of NCBI NO: 899608 NR Description: polyubiquitin
  misc_feature (1)..(304): Homolog of NCBI NO: 902584 NR Description: polyubiquitin containing 7 ubiquitin monomers
  misc_feature (1)..(305): Homolog of NCBI NO: 902584 NR Description: polyubiquitin containing 7 ubiquitin monomers
  misc_feature (1)..(305): Homolog of NCBI NO: 481477 NR Description: polyubiquitin 6 - rice >gi|416038|emb|CAA53665.1|
  misc_feature (1)..(304): Homolog of NCBI NO: 902584 NR Description: polyubiquitin containing 7 ubiquitin monomers
  misc_feature (1)..(305): Homolog of NCBI NO: 899608 NR Description: polyubiquitin
  misc_feature (1)..(305): Homolog of NCBI NO: 481477 NR Description: polyubiquitin 6 - rice >gi|416038|emb|CAA53665.1|
  misc_feature (1)..(305): Homolog of NCBI NO: 100934 NR Description: polyubiquitin - maize >gi|248337|gb|AAB21993.1|
  misc_feature (1)..(304): Homolog of NCBI NO: 170352 NR Description: hexameric polyubiquitin >gi|870792|gb|AAA68878.1| >gi|4115333|gb|AAD03341.1| ubiquitin [Pisum sativum] ubiquitin [Pisum sativum] >gi|22655101|gb|AAM98141.1|
  misc_feature (1)..(304): Homolog of NCBI NO: 4115337 NR Description: ubiquitin [Pisum sativum]
  misc_feature (1)..(304): Homolog of NCBI NO: 16660462 NR Description: polyubiquitin OUB2 [Olea europaea]
  misc_feature (1)..(304): Homolog of NCBI NO: 100524 NR Description: polyubiquitin 6 - common sunflower hexaubiquitin protein [Helianthus annuus]
  misc_feature (1)..(305): Homolog of NCBI NO: 4809266 NR Description: polyubiquitin [Sporobolus stapfianus]
  misc_feature (1)..(305): Homolog of NCBI NO: 902584 NR Description: polyubiquitin containing 7 ubiquitin monomers
  misc_feature (1)..(304): Homolog of NCBI NO: 170352 NR Description: hexameric polyubiquitin >gi|870792|gb|AAA68878.1| >gi|4115333|gb|AAD03341.1| ubiquitin [Pisum sativum] ubiquitin [Pisum sativum] >gi|22655101|gb|AAM98141.1|
  misc_feature (1)..(304): Homolog of NCBI NO: 4115337 NR Description: ubiquitin [Pisum sativum]
  misc_feature (1)..(304): Homolog of NCBI NO: 16660462 NR Description: polyubiquitin OUB2 [Olea europaea]
  misc_feature (1)..(304): Homolog of NCBI NO: 100524 NR Description: polyubiquitin 6 - common sunflower hexaubiquitin protein [Helianthus annuus]
  misc_feature (1)..(305): Homolog of NCBI NO: 4809266 NR Description: polyubiquitin [Sporobolus stapfianus]
  misc_feature (1)..(305): Homolog of NCBI NO: 902584 NR Description: polyubiquitin containing 7 ubiquitin monomers
  misc_feature (1)..(304): Homolog of NCBI NO: 902584 NR Description: polyubiquitin containing 7 ubiquitin monomers
  misc_feature (1)..(305): Homolog of NCBI NO: 899608 NR Description: polyubiquitin
  misc_feature (1)..(305): Homolog of NCBI NO: 481477 NR Description: polyubiquitin 6 - rice >gi|416038|emb|CAA53665.1|
  misc_feature (1)..(305): Homolog of NCBI NO: 100934 NR Description: polyubiquitin - maize >gi|248337|gb|AAB21993.1|
  misc_feature (1)..(304): Homolog of NCBI NO: 170352 NR Description: hexameric polyubiquitin >gi|870792|gb|AAA68878.1| >gi|4115333|gb|AAD03341.1| ubiquitin [Pisum sativum] ubiquitin [Pisum sativum] >gi|22655101|gb|AAM98141.1|
  misc_feature (1)..(304): Homolog of NCBI NO: 4115337 NR Description: ubiquitin [Pisum sativum]
  misc_feature (1)..(304): Homolog of NCBI NO: 16660462 NR Description: polyubiquitin OUB2 [Olea europaea]
  misc_feature (1)..(304): Homolog of NCBI NO: 100524 NR Description: polyubiquitin 6 - common sunflower hexaubiquitin protein [Helianthus annuus]
  misc_feature (1)..(305): Homolog of NCBI NO: 4809266 NR Description: polyubiquitin [Sporobolus stapfianus]
  misc_feature (1)..(305): Homolog of NCBI NO: 902584 NR Description: polyubiquitin containing 7 ubiquitin monomers
  misc_feature (1)..(304): Homolog of NCBI NO: 902584 NR Description: polyubiquitin containing 7 ubiquitin monomers
  misc_feature (1)..(305): Homolog of NCBI NO: 899608 NR Description: polyubiquitin
  misc_feature (1)..(305): Homolog of NCBI NO: 100934 NR Description: polyubiquitin - maize >gi|248337|gb|AAB21993.1|
  misc_feature (1)..(305): Homolog of NCBI NO: 4809266 NR Description: polyubiquitin [Sporobolus stapfianus]
  misc_feature (1)..(304): Homolog of NCBI NO: 100524 NR Description: polyubiquitin 6 - common sunflower hexaubiquitin protein [Helianthus annuus]
  misc_feature (1)..(304): Homolog of NCBI NO: 16660462 NR Description: polyubiquitin OUB2 [Olea europaea]
  misc_feature (1)..(304): Homolog of NCBI NO: 4115337 NR Description: ubiquitin [Pisum sativum]
  misc_feature (1)..(304): Homolog of NCBI NO: 170352 NR Description: hexameric polyubiquitin >gi|870792|gb|AAA68878.1| >gi|4115333|gb|AAD03341.1| ubiquitin [Pisum sativum] ubiquitin [Pisum sativum] >gi|22655101|gb|AAM98141.1|

SEQ ID NO: 12729 - DNA, 1022 bp, Zea mays subsp. mays
  misc_feature (1)..(1022): Ceres Seq. ID no. 12350942
  misc_feature: MA Experiment ID: 108526 Result: Up-regulated in Transcription
  misc_feature: MA Experiment 108526 PARAMETER Experiment Name: Zm_5mM_NO_P Parameter: Age (day) Value: 8
  misc_feature: MA Experiment 108526 PARAMETER Experiment Name: Zm_5mM_NO_P Parameter: Organism Value: Zea mays
  misc_feature: MA Experiment 108526 PARAMETER Experiment Name: Zm_5mM_NO_P Parameter: Plant Line Value: 35A19
  misc_feature: MA Experiment 108526 PARAMETER Experiment Name: Zm_5mM_NO_P Parameter: Timepoint (hr) Value: 1
  misc_feature: MA Experiment 108526 PARAMETER Experiment Name: Zm_5mM_NO_P Parameter: Tissue Value: Aerial
  misc_feature: MA Experiment 108526 PARAMETER Experiment Name: Zm_5mM_NO_P Parameter: Treatment Value: 5mM NO vs. No Treatment
  misc_feature: MA Experiment ID: 108527 Result: Up-regulated in Transcription
  misc_feature: MA Experiment 108527 PARAMETER Experiment Name: Zm_5mM_NO_P Parameter: Age (day) Value: 8
  misc_feature: MA Experiment 108527 PARAMETER Experiment Name: Zm_5mM_NO_P Parameter: Organism Value: Zea mays
  misc_feature: MA Experiment 108527 PARAMETER Experiment Name: Zm_5mM_NO_P Parameter: Plant Line Value: 35A19
  misc_feature: MA Experiment 108527 PARAMETER Experiment Name: Zm_5mM_NO_P Parameter: Timepoint (hr) Value: 6
  misc_feature: MA Experiment 108527 PARAMETER Experiment Name: Zm_5mM_NO_P Parameter: Tissue Value: Aerial
  misc_feature: MA Experiment 108527 PARAMETER Experiment Name: Zm_5mM_NO_P Parameter: Treatment Value: 5mM NO vs. No Treatment
  misc_feature: MA Experiment ID: 108545 Result: Down-regulated in Transcription
  misc_feature: MA Experiment 108545 PARAMETER Experiment Name: Zm_Imbibed_Seeds_P Parameter: Age (day) Value: 3 vs. 2
  misc_feature: MA Experiment 108545 PARAMETER Experiment Name: Zm_Imbibed_Seeds_P Parameter: Organism Value: Zea mays
  misc_feature: MA Experiment 108545 PARAMETER Experiment Name: Zm_Imbibed_Seeds_P Parameter: Plant Line Value: 35A19
  misc_feature: MA Experiment 108545 PARAMETER Experiment Name: Zm_Imbibed_Seeds_P Parameter: Tissue Value: Aerial vs. Embryo
  misc_feature: MA Experiment ID: 108559 Result: Up-regulated in Transcription
  misc_feature: MA Experiment 108559 PARAMETER Experiment Name: Zm_5mM_NO_P Parameter: Age (day) Value: 8
  misc_feature: MA Experiment 108559 PARAMETER Experiment Name: Zm_5mM_NO_P Parameter: Organism Value: Zea mays
  misc_feature: MA Experiment 108559 PARAMETER Experiment Name: Zm_5mM_NO_P Parameter: Plant Line Value: 35A19
  misc_feature: MA Experiment 108559 PARAMETER Experiment Name: Zm_5mM_NO_P Parameter: Timepoint (hr) Value: 12
  misc_feature: MA Experiment 108559 PARAMETER Experiment Name: Zm_5mM_NO_P Parameter: Tissue Value: Aerial
  misc_feature: MA Experiment 108559 PARAMETER Experiment Name: Zm_5mM_NO_P Parameter: Treatment Value: 5mM NO vs. No Treatment
  misc_feature: MA Experiment ID: 108597 Result: Down-regulated in Transcription
  misc_feature: MA Experiment 108597 PARAMETER Experiment Name: Zm_100uM_ABA_P Parameter: Age (day) Value: 9
  misc_feature: MA Experiment 108597 PARAMETER Experiment Name: Zm_100uM_ABA_P Parameter: Organism Value: Zea mays
  misc_feature: MA Experiment 108597 PARAMETER Experiment Name: Zm_100uM_ABA_P Parameter: Plant Line Value: 35A19
  misc_feature: MA Experiment 108597 PARAMETER Experiment Name: Zm_100uM_ABA_P Parameter: Timepoint (hr) Value: 24
  misc_feature: MA Experiment 108597 PARAMETER Experiment Name: Zm_100uM_ABA_P Parameter: Tissue Value: Aerial
  misc_feature: MA Experiment 108597 PARAMETER Experiment Name: Zm_100uM_ABA_P Parameter: Treatment Value: 100uM ABA vs. No Treatment
  misc_feature: MA Experiment ID: 108687 Result: Up-regulated in Transcription
  misc_feature: MA Experiment 108687 PARAMETER Experiment Name: Zm_Embryos-Flowers__P Parameter: Tissue Value: Embryo vs. Aerial+
  misc_feature: MA Experiment ID: 108688 Result: Down-regulated in Transcription
  misc_feature: MA Experiment 108688 PARAMETER Experiment Name: Zm_Embryos-Flowers__P Parameter: Tissue Value: Immature Flowers vs. Aerial+
  misc_feature: MA Experiment ID: 20000479 Result: Down-regulated in Transcription
  misc_feature: MA Experiment 20000479 PARAMETER Experiment Name: Zm_Drought_P Parameter: Age (day) Value: 10
  misc_feature: MA Experiment 20000479 PARAMETER Experiment Name: Zm_Drought_P Parameter: Organism Value: Zea mays
  misc_feature: MA Experiment 20000479 PARAMETER Experiment Name: Zm_Drought_P Parameter: Plant Line Value: 35A19
  misc_feature: MA Experiment 20000479 PARAMETER Experiment Name: Zm_Drought_P Parameter: Timepoint (hr) Value: 48
  misc_feature: MA Experiment 20000479 PARAMETER Experiment Name: Zm_Drought_P Parameter: Tissue Value: Aerial
  misc_feature: MA Experiment 20000479 PARAMETER Experiment Name: Zm_Drought_P Parameter: Treatment Value: Drought vs. No Drought
  misc_feature: MA Experiment ID: 20000480 Result: Down-regulated in Transcription
  misc_feature: MA Experiment 20000480 PARAMETER Experiment Name: Zm_Drought_P Parameter: Age (day) Value: 11
  misc_feature: MA Experiment 20000480 PARAMETER Experiment Name: Zm_Drought_P Parameter: Organism Value: Zea mays
  misc_feature: MA Experiment 20000480 PARAMETER Experiment Name: Zm_Drought_P Parameter: Plant Line Value: 35A19
  misc_feature: MA Experiment 20000480 PARAMETER Experiment Name: Zm_Drought_P Parameter: Timepoint (hr) Value: 72
  misc_feature: MA Experiment 20000480 PARAMETER Experiment Name: Zm_Drought_P Parameter: Tissue Value: Aerial
  misc_feature: MA Experiment 20000480 PARAMETER Experiment Name: Zm_Drought_P Parameter: Treatment Value: Drought vs. No Drought
  misc_feature: MA Experiment ID: 20000627 Result: Up-regulated in Transcription
  misc_feature: MA Experiment 20000627 PARAMETER Experiment Name: Zm_Herbicide-Treatments_P Parameter: Timepoint (hr) Value: 12
  misc_feature: MA Experiment 20000627 PARAMETER Experiment Name: Zm_Herbicide-Treatments_P Parameter: Tissue Value: Aerial
  misc_feature: MA Experiment 20000627 PARAMETER Experiment Name: Zm_Herbicide-Treatments_P Parameter: Treatment Value: Finale vs. No Treatment
  misc_feature: MA Experiment ID: 20001613 Result: Down-regulated in Transcription
  misc_feature: MA Experiment 20001613 PARAMETER Experiment Name: Zm_50ppm_KNO3_L-to-H_P Parameter: Age (day) Value: 20
  misc_feature: MA Experiment 20001613 PARAMETER Experiment Name: Zm_50ppm_KNO3_L-to-H_P Parameter: Organism Value: Zea mays
  misc_feature: MA Experiment 20001613 PARAMETER Experiment Name: Zm_50ppm_KNO3_L-to-H_P Parameter: Plant Line Value: 35A19
  misc_feature: MA Experiment 20001613 PARAMETER Experiment Name: Zm_50ppm_KNO3_L-to-H_P Parameter: Timepoint (hr) Value: 24
  misc_feature: MA Experiment 20001613 PARAMETER Experiment Name: Zm_50ppm_KNO3_L-to-H_P Parameter: Tissue Value: Roots
  misc_feature: MA Experiment 20001613 PARAMETER Experiment Name: Zm_50ppm_KNO3_L-to-H_P Parameter: Treatment Value: 50ppm KNO3 vs. 50ppm KCl
aaaccaaaccctctaatccatttcggcatttccaacgccttcgccctaccagccacgtcgtttcgaggccgatcgaccgagcagcagcagctggtggcaatggcggcggcggcggaggtcgtgctgctggacttctgggtgagccccttcgggcagcgctgccggatcgcgctggcggagaagggcgtggcctacgagtaccgcgagcaggacctcctgaacaagggcgagctgctcctccgctccaaccccatccacaagaagatccccgtcctgctccacgccggcaggcccgtctgcgagtcgctcgtcatcctccagtacatcgacgaggcctggccggacgtcgcgccgctcctccccaaggacgacccctacgcccgcgcgcaggcgcgtttctgggccgattacatcgacaagaagatctatgacagccagactcggctgtggaagttcgagggcgaggcgcgggagcaggcgaagaaggacctggtggaggtcctggagaccctggagggggagctcgccgacaagcctttcttcggcggcggcgccctcggcttcgtggacgtggctctggtgcccttcacgtcctggttcctcgcctacgagaagctgggcgggttcagcatccaggagcactgccccaggatcgtggcctgggcggcgcgctgcagggagcgggagagcgtggccaaggcgctgtccgaccctgccaaggtgctcgggttcgtccagttcctccagagcaagttcggggccaagtgatcggaaacgctgtgtgtgctgctatgcaggccaggctggtgctttgatctctgctcgatcagctccatgcccatgctagcgttgcatagcgcagttgatgtgtgatgtgtctggttggttgtagctgctctttgcctggttgcgttgcgtcagtgtgttttcagcgtctggggtagctctgcgttgcccttgcccctgccccctgttgcatactcctagctctcgccgagtttgacaatttcgtcagttaatcc

SEQ ID NO: 12730 - protein, 255 aa, Zea mays subsp. mays
  peptide (1)..(255): Ceres Seq. ID no. 12350943
  misc_feature (34)..(255): Homolog of NCBI NO: 4468796 NR Description: GST6 protein [Zea mays]
  misc_feature (42)..(253): Homolog of NCBI NO: 7447304 NR Description: glutathione transferase (EC 2.5.1.18) - maize
  misc_feature (37)..(255): Homolog of NCBI NO: 11177831 NR Description: putative glutathione S-transferase OsGSTU5 [Oryza
  misc_feature (34)..(253): Homolog of NCBI NO: 6683765 NR Description: glutathione-S-transferase [Hordeum vulgare]
  misc_feature (34)..(253): Homolog of NCBI NO: 20067419 NR Description: glutathione transferase [Triticum aestivum]
  misc_feature (34)..(253): Homolog of NCBI NO: 20067417 NR Description: glutathione transferase [Triticum aestivum]
  misc_feature (34)..(253): Homolog of NCBI NO: 20067415 NR Description: glutathione transferase [Triticum aestivum]
  misc_feature (34)..(255): Homolog of NCBI NO: 33357806 NR Description: Chain A, Crystal Structure Solution Of Rice Gst1 In Complex With Glutathione. >gi|33357807|pdb|1OYJ|B Chain B, Structure Solution Of Rice Gst1 (Osgstu1) In Complex With Gst1
  misc_feature (36)..(253): Homolog of NCBI NO: 416652 NR Description: PROBABLE GLUTATHIONE S-TRANSFERASE (AUXIN-INDUCED
  misc_feature (36)..(253): Homolog of NCBI NO: 1346215 NR Description: PROBABLE GLUTATHIONE S-TRANSFERASE PARC
KPNPLIHFGISNAFALPATSFRGRSTEQQQLVAMAAAAEVVLLDFWVSPFGQRCRIALAEKGVAYEYREQDLLNKGELLLRSNPIHKKIPVLLHAGRPVCESLVILQYIDEAWPDVAPLLPKDDPYARAQARFWADYIDKKIYDSQTRLWKFEGEAREQAKKDLVEVLETLEGELADKPFFGGGALGFVDVALVPFTSWFLAYEKLGGFSIQEHCPRIVAWAARCRERESVAKALSDPAKVLGFVQFLQSKFGAK

SEQ ID NO: 12731 - protein, 222 aa, Zea mays subsp. mays
  peptide (1)..(222): Ceres Seq. ID no. 12350944
  misc_feature (1)..(222): Homolog of NCBI NO: 4468796 NR Description: GST6 protein [Zea mays]
  misc_feature (9)..(220): Homolog of NCBI NO: 7447304 NR Description: glutathione transferase (EC 2.5.1.18) - maize
  misc_feature (4)..(222): Homolog of NCBI NO: 11177831 NR Description: putative glutathione S-transferase OsGSTU5 [Oryza
  misc_feature (1)..(220): Homolog of NCBI NO: 6683765 NR Description: glutathione-S-transferase [Hordeum vulgare]
  misc_feature (1)..(220): Homolog of NCBI NO: 20067419 NR Description: glutathione transferase [Triticum aestivum]
  misc_feature (1)..(220): Homolog of NCBI NO: 20067417 NR Description: glutathione transferase [Triticum aestivum]
  misc_feature (1)..(220): Homolog of NCBI NO: 20067415 NR Description: glutathione transferase [Triticum aestivum]
  misc_feature (1)..(222): Homolog of NCBI NO: 33357806 NR Description: Chain A, Crystal Structure Solution Of Rice Gst1 In Complex With Glutathione. >gi|33357807|pdb|1OYJ|B Chain B, Structure Solution Of Rice Gst1 (Osgstu1) In Complex With Gst1
  misc_feature (3)..(220): Homolog of NCBI NO: 416652 NR Description: PROBABLE GLUTATHIONE S-TRANSFERASE (AUXIN-INDUCED
  misc_feature (3)..(220): Homolog of NCBI NO: 1346215 NR Description: PROBABLE GLUTATHIONE S-TRANSFERASE PARC
MAAAAEVVLLDFWVSPFGQRCRIALAEKGVAYEYREQDLLNKGELLLRSNPIHKKIPVLLHAGRPVCESLVILQYIDEAWPDVAPLLPKDDPYARAQARFWADYIDKKIYDSQTRLWKFEGEAREQAKKDLVEVLETLEGELADKPFFGGGALGFVDVALVPFTSWFLAYEKLGGFSIQEHCPRIVAWAARCRERESVAKALSDPAKVLGFVQFLQSKFGAK

SEQ ID NO: 12732 - protein, 142 aa, Zea mays subsp. mays
  peptide (1)..(142): Ceres Seq. ID no. 12350945
TKPSNPFRHFQRLRPTSHVVSRPIDRAAAAGGNGGGGGGRAAGLLGEPLRAALPDRAGGEGRGLRVPRAGPPEQGRAAPPLQPHPQEDPRPAPRRQARLRVARHPPVHRRGLAGRRAAPPQGRPLRPRAGAFLGRLHRQEDL

SEQ ID NO: 12733 - DNA, 1913 bp, Zea mays subsp. mays
  misc_feature (1)..(1913): Ceres Seq. ID no. 12355817
  misc_feature: MA Experiment ID: 108543 Result: Up-regulated in Transcription
  misc_feature: MA Experiment ID: 108544 Result: Up-regulated in Transcription
  misc_feature: MA Experiment ID: 20000534 Result: Down-regulated in Transcription
  misc_feature: MA Experiment 20000534 PARAMETER Experiment Name: Zm_Hybrid_Pollen_P Parameter: Age (day) Value: 8
  misc_feature: MA Experiment 20000534 PARAMETER Experiment Name: Zm_Hybrid_Pollen_P Parameter: Organism Value: Zea mays
  misc_feature: MA Experiment 20000534 PARAMETER Experiment Name: Zm_Hybrid_Pollen_P Parameter: Plant Line Value: 35A19
  misc_feature: MA Experiment 20000534 PARAMETER Experiment Name: Zm_Hybrid_Pollen_P Parameter: Tissue Value: Pollen vs. Aerial
actctcgctttcttctgtctcgcctcgccctcgcctttgttgatcttttcctttctcgcgttcccctcgccttcctcttcctcccccacacccaccggtcgccgcccccgtcgccccggcctcctcggtccagagacgagggggtccgcgccgttccgacgccacaccgcaaccgcatcacatcaccgcctgctcccaccgtccatccgccctccctcgatcgcgctccccggatcgctggtacctccgcgcgcggctccgacctcatcttcctccatcgactggcatcggcagcggcggcgtgttcccggccaaccttcgaaagggtaatcaatcgccagacttttgggagctgtgttgggggggaccggggggaagagccaagttactgcagaggctaacatttcggttgtcgagtgatggcgcaaggcatcaacttccctgacttcatcggcgccgtgggtggccatgatggtggcgtggactttggtgggaacttctgtgacatggccttctaccagaagctaggggagggcaccaacatgtcggtcgacagcctcaacagcatgcagaccagcatgcatggggggtccatcgccatgtctgtggacaacaacagtagcgttggctctaacagtgactcccgcactggcatgcttggtcatcctggtctcaaggggcctgccattgtgggaagctactcagttgggcacagcatcttccgccctggccgggtgtcccatgccttgagtgaggatgcgctggcacatgctctgatggacaataagttcccaactgagacactcaaggattatgaggagtggactattgatctggggaagctccacttgggaatgccctttgcacaaggtgcctttgggaagctctacaggggaacatacaatgggatggatgttgctattaagcttttggagcgacctgaggctgaccctgagaaagctcaactgttagagcagcagtttgtccaagaagttatgatgcttgcaacactgagtcacccgaatattgtcaagttcattggtgcgtgcaggaagccattggtttggtgtattgtgacggagtatgcgaagggtggatctctcaagaatttcttgagcaagaggcagaacaggtctgtcccgctgaagttggcagtcaagcaggcattagatgttgcacgtggcatggcctatgtccatggccttgggttcattcatagagatcttaagtcggacaacctcctgatttctggtgataagtccattaagattgctgactttggagtggctaggattgaagtcaagactgaggggatgacacctgaaactggaacataccgctggatggctcctgaaatgatccagcataggccatacaaccagaaagttgatgtctacagttttgccattgtcctgtgggagttagtgactgggaatgtcccctttgcaaacatgagcgcagtgcaagctgcatttgctgtggttaacaagggcgtgcgaccagccataccccacgactgcctccctgcccttgcggagatcatgaccatgtgctgggacacaaaccctgaagtccgtcccccattcgctgagattgtgaggatgctggagcaggtggaggtggaggttctgaccactgtccgtaaggctcgcttccgctgttgcatcgcccaaccgatgacgctggactgacggactgagtcgtccgcaatccaggaaaagaacctggagaggggtttaatcctatgtgtttataatcccaatagacttgtgcttcagaaacagaaggctgactcctcagtctgccttctgtctttgacatgttatcgtagagtacacctagctgtcgtcaccagtggttgtaatagaggtagctttatgcttgactaaatacccttccgttataacaagtgc

SEQ ID NO: 12734 - protein, 423 aa, Zea mays subsp. mays
  peptide (1)..(423): Ceres Seq. ID no. 12355818
  misc_feature (142)..(396): Pfam Name: Protein kinase domain Pfam Description: Protein kinase domain
  misc_feature (1)..(423): Homolog of NCBI NO: 27085278 NR Description: serine/threonine protein kinase [Oryza sativa
  misc_feature (1)..(423): Homolog of NCBI NO: 14571547 NR Description: serine/threonine protein kinase [Triticum
  misc_feature (1)..(423): Homolog of NCBI NO: 27085280 NR Description: serine/threonine protein kinase [Oryza sativa
  misc_feature (1)..(423): Homolog of NCBI NO: 18400528 NR Description: putative protein kinase; protein id: At2g24360.1, by cDNA: gi_15028152 [Arabidopsis thaliana] putative protein kinase [Arabidopsis thaliana]
  misc_feature (7)..(423): Homolog of NCBI NO: 27085282 NR Description: serine/threonine protein kinase [Oryza sativa
  misc_feature (8)..(423): Homolog of NCBI NO: 15235845 NR Description: protein kinase - like protein; protein id: supported by cDNA: 156374. [Arabidopsis thaliana]
  misc_feature (1)..(423): Homolog of NCBI NO: 25287646 NR Description: probable protein kinase [imported] - Arabidopsis
  misc_feature (1)..(423): Homolog of NCBI NO: 28864539 NR Description: serine/threonine protein kinase [Oryza sativa
  misc_feature (4)..(423): Homolog of NCBI NO: 13124865 NR Description: serine/threonine/tyrosine kinase [Arachis
  misc_feature (61)..(423): Homolog of NCBI NO: 29367355 NR Description: serine/thronine protein kinase-like protein
MAQGINFPDFIGAVGGHDGGVDFGGNFCDMAFYQKLGEGTNMSVDSLNSMQTSMHGGSIAMSVDNNSSVGSNSDSRTGMLGHPGLKGPAIVGSYSVGHSIFRPGRVSHALSEDALAHALMDNKFPTETLKDYEEWTIDLGKLHLGMPFAQGAFGKLYRGTYNGMDVAIKLLERPEADPEKAQLLEQQFVQEVMMLATLSHPNIVKFIGACRKPLVWCIVTEYAKGGSLKNFLSKRQNRSVPLKLAVKQALDVARGMAYVHGLGFIHRDLKSDNLLISGDKSIKIADFGVARIEVKTEGMTPETGTYRWMAPEMIQHRPYNQKVDVYSFAIVLWELVTGNVPFANMSAVQAAFAVVNKGVRPAIPHDCLPALAEIMTMCWDTNPEVRPPFAEIVRMLEQVEVEVLTTVRKARFRCCIAQPMTLD

SEQ ID NO: 12735 - protein, 394 aa, Zea mays subsp. mays
  peptide (1)..(394): Ceres Seq. ID no. 12355819
  misc_feature (113)..(367): Pfam Name: Protein kinase domain Pfam Description: Protein kinase domain
  misc_feature (1)..(394): Homolog of NCBI NO: 27085278 NR Description: serine/threonine protein kinase [Oryza sativa
  misc_feature (1)..(394): Homolog of NCBI NO: 14571547 NR Description: serine/threonine protein kinase [Triticum
  misc_feature (1)..(394): Homolog of NCBI NO: 27085280 NR Description: serine/threonine protein kinase [Oryza sativa
  misc_feature (1)..(394): Homolog of NCBI NO: 18400528 NR Description: putative protein kinase; protein id: At2g24360.1, by cDNA: gi_15028152 [Arabidopsis thaliana] putative protein kinase [Arabidopsis thaliana]
  misc_feature (1)..(394): Homolog of NCBI NO: 27085282 NR Description: serine/threonine protein kinase [Oryza sativa
  misc_feature (1)..(394): Homolog of NCBI NO: 15235845 NR Description: protein kinase - like protein; protein id: supported by cDNA: 156374. [Arabidopsis thaliana]
  misc_feature (1)..(394): Homolog of NCBI NO: 25287646 NR Description: probable protein kinase [imported] - Arabidopsis
  misc_feature (1)..(394): Homolog of NCBI NO: 28864539 NR Description: serine/threonine protein kinase [Oryza sativa
  misc_feature (1)..(394): Homolog of NCBI NO: 13124865 NR Description: serine/threonine/tyrosine kinase [Arachis
  misc_feature (32)..(394): Homolog of NCBI NO: 29367355 NR Description: serine/thronine protein kinase-like protein
MAFYQKLGEGTNMSVDSLNSMQTSMHGGSIAMSVDNNSSVGSNSDSRTGMLGHPGLKGPAIVGSYSVGHSIFRPGRVSHALSEDALAHALMDNKFPTETLKDYEEWTIDLGKLHLGMPFAQGAFGKLYRGTYNGMDVAIKLLERPEADPEKAQLLEQQFVQEVMMLATLSHPNIVKFIGACRKPLVWCIVTEYAKGGSLKNFLSKRQNRSVPLKLAVKQALDVARGMAYVHGLGFIHRDLKSDNLLISGDKSIKIADFGVARIEVKTEGMTPETGTYRWMAPEMIQHRPYNQKVDVYSFAIVLWELVTGNVPFANMSAVQAAFAVVNKGVRPAIPHDCLPALAEIMTMCWDTNPEVRPPFAEIVRMLEQVEVEVLTTVRKARFRCCIAQPMTLD

SEQ ID NO: 12736 - protein, 382 aa, Zea mays subsp. mays
  peptide (1)..(382): Ceres Seq. ID no. 12355820
  misc_feature (101)..(355): Pfam Name: Protein kinase domain Pfam Description: Protein kinase domain
  misc_feature (1)..(382): Homolog of NCBI NO: 27085282 NR Description: serine/threonine protein kinase [Oryza sativa
  misc_feature (1)..(382): Homolog of NCBI NO: 15235845 NR Description: protein kinase - like protein; protein id: supported by cDNA: 156374. [Arabidopsis thaliana]
  misc_feature (1)..(382): Homolog of NCBI NO: 25287646 NR Description: probable protein kinase [imported] - Arabidopsis
  misc_feature (1)..(382): Homolog of NCBI NO: 27085278 NR Description: serine/threonine protein kinase [Oryza sativa
  misc_feature (1)..(382): Homolog of NCBI NO: 27085280 NR Description: serine/threonine protein kinase [Oryza sativa
  misc_feature (1)..(382): Homolog of NCBI NO: 18400528 NR Description: putative protein kinase; protein id: At2g24360.1, by cDNA: gi_15028152 [Arabidopsis thaliana] putative protein kinase [Arabidopsis thaliana]
  misc_feature (1)..(382): Homolog of NCBI NO: 14571547 NR Description: serine/threonine protein kinase [Triticum
  misc_feature (1)..(382): Homolog of NCBI NO: 28864539 NR Description: serine/threonine protein kinase [Oryza sativa
  misc_feature (1)..(382): Homolog of NCBI NO: 13124865 NR Description: serine/threonine/tyrosine kinase [Arachis
  misc_feature (20)..(382): Homolog of NCBI NO: 29367355 NR Description: serine/thronine protein kinase-like protein
MSVDSLNSMQTSMHGGSIAMSVDNNSSVGSNSDSRTGMLGHPGLKGPAIVGSYSVGHSIFRPGRVSHALSEDALAHALMDNKFPTETLKDYEEWTIDLGKLHLGMPFAQGAFGKLYRGTYNGMDVAIKLLERPEADPEKAQLLEQQFVQEVMMLATLSHPNIVKFIGACRKPLVWCIVTEYAKGGSLKNFLSKRQNRSVPLKLAVKQALDVARGMAYVHGLGFIHRDLKSDNLLISGDKSIKIADFGVARIEVKTEGMTPETGTYRWMAPEMIQHRPYNQKVDVYSFAIVLWELVTGNVPFANMSAVQAAFAVVNKGVRPAIPHDCLPALAEIMTMCWDTNPEVRPPFAEIVRMLEQVEVEVLTTVRKARFRCCIAQPMTLD

SEQ ID NO: 12737 - DNA, 1106 bp, Zea mays subsp. mays
  misc_feature (1)..(1106): Ceres Seq. ID no. 12344615
  misc_feature: MA Experiment ID: 20000492 Result: Up-regulated in Transcription
  misc_feature: MA Experiment 20000492 PARAMETER Experiment Name: Zm_Hybrid_Seed_Dev_P Parameter: DAP Value: 12
  misc_feature: MA Experiment 20000492 PARAMETER Experiment Name: Zm_Hybrid_Seed_Dev_P Parameter: Organism Value: Zea mays
  misc_feature: MA Experiment 20000492 PARAMETER Experiment Name: Zm_Hybrid_Seed_Dev_P Parameter: Plant Line Value: 35A19
  misc_feature: MA Experiment 20000492 PARAMETER Experiment Name: Zm_Hybrid_Seed_Dev_P Parameter: Tissue Value: Fert Kernel vs. Unfert Floret
gccgcctctgttccttcgctagtcgacaggccccgcttccgctctcctcttccaccggccaccgccgcgcgccgagaagatggggaagcggtggatcccactggaggccaacccggatgtcatgaaccagttcatatggggtctgggagtctccgagagggctgtgcagttctgcgacgtctacggcctggacgacgagctgatcgccttggtgccccatcccgttctcgcagtcctcttcctctacccgttcacctccctggacgaggagaataaagaagaatcaagtgtttctgccacatcgaccgcagggggcaaggatttgagcaagaaggtatactttacaaagcagactattggcaatgcttgtggaacaattggtgttattcatgcaataggaaatgcaacatctcaaatcaagctagttgagggttcctattttggaaagttatataagcaaacagctgatatggatccagtccagcgtgctgcctttcttgagcaagatgatgagatggaggatgcacattctattgctgcatctgctggtgacactaatattaatcttgatgttaatgtacactttgtatgtttctcctgtgttgatggtgaactttacgagcttgatggactaaaatcacaacccacaccccatggcccatcatcacctgaaaccttgttgcaggatgctgcagaagtcatcaaagctagaattgcggagaaccctaactcgatgaacttcaatgtcatggccctttcaaagaagtgaagtatactgtgatgggtggatttcatttggcagaatacgggtccctttttttcagttctgctgagtactgcactgagtggaaggtttgcacagggaaacaaagatagggaaaaaatgttgactcgatgattctcgtgccttcttgatggatagagagatggtggttcacgatttcacctttttcctgcgtacttaggctatttacaagggtagttttatgatggtttcatacacatttaatagtatgtcacatcaccattttatatgatatgtcatagtatttaagataaataagtttcataggatgaaataggaatgaaatcgtgtcacctttttc

SEQ ID NO: 12738 - protein, 229 aa, Zea mays subsp. mays
  peptide (1)..(229): Ceres Seq. ID no. 12344616
  misc_feature (1)..(228): Homolog of NCBI NO: 14140139 NR Description: putative protein [Oryza sativa]
  misc_feature (1)..(229): Homolog of NCBI NO: 38346164 NR Description: OSJNBa0079A21.11 [Oryza sativa (japonica
  misc_feature (3)..(229): Homolog of NCBI NO: 15236549 NR Description: carboxyl-terminal proteinase like protein; id: At4g17510.1 [Arabidopsis thaliana]
  misc_feature (1)..(229): Homolog of NCBI NO: 32488373 NR Description: OSJNBa0043A12.3 [Oryza sativa (japonica
  misc_feature (2)..(227): Homolog of NCBI NO: 5174741 NR Description: ubiquitin carboxyl-terminal esterase L3 thiolesterase) [Homo sapiens] >gi|136682|sp|P15374|UBL3_HUMAN
  misc_feature (2)..(227): Homolog of NCBI NO: 17380334 NR Description: Ubiquitin carboxyl-terminal hydrolase isozyme L3
  misc_feature (3)..(161): Homolog of NCBI NO: 7488069 NR Description: probable carboxyl-terminal proteinase -
  misc_feature (2)..(227): Homolog of NCBI NO: 7710106 NR Description: ubiquitin carboxyl-terminal esterase L3 (ubiquitin
  misc_feature (2)..(227): Homolog of NCBI NO: 27705170 NR Description: similar to ubiqutin carboxyl-terminal hydrolase
  misc_feature (2)..(227): Homolog of NCBI NO: 15809026 NR Description: ubiquitin carboxyl-terminal esterase L4 [Mus
MGKRWIPLEANPDVMNQFIWGLGVSERAVQFCDVYGLDDELIALVPHPVLAVLFLYPFTSLDEENKEESSVSATSTAGGKDLSKKVYFTKQTIGNACGTIGVIHAIGNATSQIKLVEGSYFGKLYKQTADMDPVQRAAFLEQDDEMEDAHSIAASAGDTNINLDVNVHFVCFSCVDGELYELDGLKSQPTPHGPSSPETLLQDAAEVIKARIAENPNSMNFNVMALSKK

SEQ ID NO: 12739 - protein, 215 aa, Zea mays subsp. mays
  peptide (1)..(215): Ceres Seq. ID no. 12344617
  misc_feature (1)..(214): Homolog of NCBI NO: 14140139 NR Description: putative protein [Oryza sativa]
  misc_feature (1)..(215): Homolog of NCBI NO: 38346164 NR Description: OSJNBa0079A21.11 [Oryza sativa (japonica
  misc_feature (1)..(215): Homolog of NCBI NO: 15236549 NR Description: carboxyl-terminal proteinase like protein; id: At4g17510.1 [Arabidopsis thaliana]
  misc_feature (1)..(215): Homolog of NCBI NO: 32488373 NR Description: OSJNBa0043A12.3 [Oryza sativa (japonica
  misc_feature (1)..(213): Homolog of NCBI NO: 5174741 NR Description: ubiquitin carboxyl-terminal esterase L3 thiolesterase) [Homo sapiens] >gi|136682|sp|P15374|UBL3_HUMAN
  misc_feature (1)..(213): Homolog of NCBI NO: 17380334 NR Description: Ubiquitin carboxyl-terminal hydrolase isozyme L3
  misc_feature (1)..(147): Homolog of NCBI NO: 7488069 NR Description: probable carboxyl-terminal proteinase -
  misc_feature (1)..(213): Homolog of NCBI NO: 7710106 NR Description: ubiquitin carboxyl-terminal esterase L3 (ubiquitin
  misc_feature (1)..(213): Homolog of NCBI NO: 27705170 NR Description: similar to ubiqutin carboxyl-terminal hydrolase
  misc_feature (1)..(213): Homolog of NCBI NO: 15809026 NR Description: ubiquitin carboxyl-terminal esterase L4 [Mus
MNQFIWGLGVSERAVQFCDVYGLDDELIALVPHPVLAVLFLYPFTSLDEENKEESSVSATSTAGGKDLSKKVYFTKQTIGNACGTIGVIHAIGNATSQIKLVEGSYFGKLYKQTADMDPVQRAAFLEQDDEMEDAHSIAASAGDTNINLDVNVHFVCFSCVDGELYELDGLKSQPTPHGPSSPETLLQDAAEVIKARIAENPNSMNFNVMALSKK

SEQ ID NO: 12740 - DNA, 861 bp, Zea mays subsp. mays
  misc_feature (1)..(861): Ceres Seq. ID no. 12414781
  misc_feature: MA Experiment ID: 20000535 Result: Down-regulated in Transcription
  misc_feature: MA Experiment 20000535 PARAMETER Experiment Name: Zm_Hybrid_Seed_Dev_P Parameter: DAP Value: 30 vs. 12
  misc_feature: MA Experiment 20000535 PARAMETER Experiment Name: Zm_Hybrid_Seed_Dev_P Parameter: Organism Value: Zea mays
  misc_feature: MA Experiment 20000535 PARAMETER Experiment Name: Zm_Hybrid_Seed_Dev_P Parameter: Plant Line Value: 35A19
  misc_feature: MA Experiment 20000535 PARAMETER Experiment Name: Zm_Hybrid_Seed_Dev_P Parameter: Tissue Value: Embryo vs. Unfert Floret
gcacgagaccattacctagaacatcctaatcgaaaaagctctgacttgtgtgttgtggctccttgcttgacactctactcttccagggattgaggccaggggcttcatatttggcccggcagtcgcattggctattggcgccaagttcatacctttgcgcaagcctaggaagctccccggcgaggtgatctccgagaaatacgttctcgagtacgggaccgattgcttagagatgcatgtcggagccatcgaacggcctggtgagcgcgtgctgatcaccgacgacttggtcgcgaccggagggacgctctgtgctgcaatcaggcttcttgaacgtgctgaagctgatgtggtcgagtgcgcatgcctcattggcctcccaaaattcaaggatttctacaagttgaatggaaagcccgtctacgtgctggttgagtcccgtgaatcagataaataagaacttatgggtcagaggaaagctgacggttcattccttgctgctgtgcttgagcagtggagggacatcgacaagccaaccatggggggtgcgtcagcgttactaaggctagctgctaagatcgacttggtgagaggagagattagaagtgatggggggggcgttagtcttgtaggctgagtagattttcagagtactgaagagcttgtagttctgccaggaacatgcttattagttgaagcaagagtgttgatggtccattgcttgttggattttgtggttttgatttgaagggcgcaaacatggctggatcagcttgacggaagaacttggacatcaataccttagcatcaaatactagggaagtaggaacctgctacttgtagcgtgttattcctatctcc

SEQ ID NO: 12741 - protein, 74 aa, Zea mays subsp. mays
  peptide (1)..(74): Ceres Seq. ID no. 12414782
  misc_feature (1)..(71): Homolog of NCBI NO: 29826070 NR Description: adenine phosphoribosyltransferase form 2 [Oryza
  misc_feature (1)..(71): Homolog of NCBI NO: 40019121 NR Description: adenine phosphoribosyltransferase [Zea mays]
  misc_feature (1)..(69): Homolog of NCBI NO: 33354190 NR Description: putative adenine phosphoribosyl transferase
  misc_feature (1)..(68): Homolog of NCBI NO: 3776082 NR Description: MtN30 [Medicago truncatula]
  misc_feature (1)..(74): Homolog of NCBI NO: 1402894 NR Description: adenine phosphoribosyltransferase [Arabidopsis
  misc_feature (1)..(74): Homolog of NCBI NO: 15220047 NR Description: adenine phosphoribosyltransferase; protein id: [Arabidopsis thaliana] >gi|2499931|sp|Q42563|APT2_ARATH Adenine
  misc_feature (1)..(74): Homolog of NCBI NO: 15238973 NR Description: adenine phosphoribosyltransferase - like protein; id: At5g11160.1 [Arabidopsis thaliana]
  misc_feature (1)..(72): Homolog of NCBI NO: 2499932 NR Description: Adenine phosphoribosyltransferase 1 (APRT)
  misc_feature (1)..(72): Homolog of NCBI NO: 9711921 NR Description: Adenine phosphoribosyltransferase [Hordeum
  misc_feature (1)..(70): Homolog of NCBI NO: 15235709 NR Description: adenine phosphoribosyltransferase (EC 2.4.2.7) - protein; protein id: At4g22570.1, supported by cDNA: 11009. thaliana] >gi|7433929|pir||T05451 adenine
MHVGAIERPGERVLITDDLVATGGTLCAAIRLLERAEADVVECACLIGLPKFKDFYKLNGKPVYVLVESRESDK

SEQ ID NO: 12742 - protein, 57 aa, Zea mays subsp. mays
  peptide (1)..(57): Ceres Seq. ID no. 12414783
MGQRKADGSFLAAVLEQWRDIDKPTMGGASALLRLAAKIDLVRGEIRSDGGGVSLVG

SEQ ID NO: 12743 - protein, 51 aa, Zea mays subsp. mays
  peptide (1)..(51): Ceres Seq. ID no. 12414784
MESPSTCWLSPVNQINKNLWVRGKLTVHSLLLCLSSGGTSTSQPWGVRQRY

SEQ ID NO: 12744 - DNA, 2463 bp, Zea mays subsp. mays
  misc_feature (1)..(2463): Ceres Seq. ID no. 12369025
  misc_feature: MA Experiment ID: 108535 Result: Up-regulated in Transcription
  misc_feature: MA Experiment 108535 PARAMETER Experiment Name: Zm_Meristem_P Parameter: Age (day) Value: 8
  misc_feature: MA Experiment 108535 PARAMETER Experiment Name: Zm_Meristem_P Parameter: Organism Value: Zea mays
  misc_feature: MA Experiment 108535 PARAMETER Experiment Name: Zm_Meristem_P Parameter: Plant Line Value: 35A19
  misc_feature: MA Experiment 108535 PARAMETER Experiment Name: Zm_Meristem_P Parameter: Tissue Value: Root Meristem vs. Above Root Meristem
  misc_feature: MA Experiment ID: 108543 Result: Up-regulated in Transcription
ctggtcttctgcgagaagcacacgaagcaaccggggcacctccgcctgcgcctcccctctcagctactctgtttgtacgcggccgcatccatttcgtctgcccaggaatggaggaagaatatctgcagtgagggactgaggggatcccaggttccagacaaaactcaccgaggaaaaccattctccgacatggtgaggatgagaaggaggttggtgctgctgctgctcctcctcggcctcacggtgctttccccgctcgcgctctacactagccgcctctccgtggcgcttaactctataccgcgggttttccctggagaaatcacgaatcagggccgtggcgtcgaggcagataagctgaatgcgcttcctctggaaacagtgagctccttgaaagaacctgtcgacattgtcttctcagaggagctgactgaatctaagagccaagaattgcgattgccaaaggtaggtgcgcacaagagccgtgtgctctctgaagtcacggttgctgatgatggtacatcatcgaaagataatgaagtgattgagcaagtaattacgctggaagcacaggatggtggcttggtgaagggagcaggtgtttcagatgagcaggagaaaaacattggatctctgcagcaatcttcttctgaggaaagttcacaggacactatgcctaaacagacacctgcaaaggttgttgcggagaactcccaatcagctagaacagacggtaaaactaaaaccgctgttctacctgatatgcggatccgaaatatcaaggatcagttaatcaaggcgaaggtataccttggtcttggatccattagagcgagttctcaatatcttaaagacctacggcagaggatacgggaagttcaaaaggtgcttggtgatgcatccaaggactctgatctaccaaagaatgcacatgaaaaggttaaagcactggagcagatgctgattaagggaaaacagatgcaggatgattgttctattattgtaaaaaagcttcgagctatgcttcattcagcagaggagcagctgcatgcacacaaaaaacagactgtttttctgacacaacttgcagctaaaacccttcctaaaggtcttcactgcctccccctgagactagctaacgaatacttttcattggatcctgttcggcagcagttcccaaaccaacaaaatctcattaacccaaaactgtatcattatgcgttgttctcggataacatactagcaacagcggttgttgttaactcaacagtgttaaatgctaagcatccttctgatcatgttatccacatagtaactgacaaactgaattatgctccaatgagaatgtggttcctctctaatcctccggggaaagcaacaattgaagtacagaatattgaggagtttacatggctaaatgacagctacagtccagtactcaaacatcttgggtcccaatccatgattgattactactttggaacgaatcgtgcaaactcagattcaaacctaaaatatcgaaacccaaagtacctgtcaatccttaatcatctccgcttttacctacctgagatttatccaaagcttgacaagatggtctttcttgatgatgacatcgtagtaaagaaggatctggctggcctttggtcaatcaacatgaaggggaaggtaaacggtgctgttgagacttgtggagagagtttccatcgctatgatcgatacctgaatttttcaaatcctgttatcaccaagagttttgacccacatgcttgtgtttgggcttttggaatgaatgtgtttgacctggctgaatggaggcggcagaacataactgaaatttatcactcgtggcagaagcttaatgaagatagatcactctggaaacttggtactctccctccgggtttggtcacattctggaacaagacatttcccctcagccggtcatggcatgttcttggtctaggttacaatccccatgttaacagcagagacattgagcatgctgcagtcatacattacaatggcaacatgaagccctggttggagattggtctacccaagttccggagctactggtccaagtatctggattatgaccaatctttccttcgggaatgcaacatcaatccatgaaggaacctggtgcttttagtcccttctgacataaccaatagcctgttttctgtcgatgtgcactttagtgtagtcagcatagtactctcttgctttagatatcagttgttaacaagatttcttattgcctgtgcttcttgtcagaccctttgcataattgcaggaatatctgttatgtttttagagtacatgctttagagcagggcaaactttagatagtgcaatgctcttatgcgatatcgcctttatgtactgaacgtttgctgcaatcatgtaatttggaagcaaactttcccaacaatttaataggtattcaattgggtatcg

SEQ ID NO: 12745 - protein, 711 aa, Zea mays subsp. mays
  peptide (1)..(711): Ceres Seq. ID no. 12369026
  misc_feature (64)..(711): Homolog of NCBI NO: 38423965 NR Description: putative glycosyltransferase [Oryza sativa
  misc_feature (175)..(711): Homolog of NCBI NO: 10177914 NR Description: emb|CAB71043.1~gene_id:MCA23.10~strong similarity
  misc_feature (175)..(711): Homolog of NCBI NO: 18422837 NR Description: putative protein; protein id: At5g47780.1, by cDNA: gi_15810326, supported by cDNA: gi_20259234 [Arabidopsis >gi|15810327|gb|AAL07051.1| unknown protein [Arabidopsis
  misc_feature (254)..(710): Homolog of NCBI NO: 15233046 NR Description: putative protein; protein id: At3g61130.1, by cDNA: gi_14517361 [Arabidopsis thaliana]
  misc_feature (254)..(710): Homolog of NCBI NO: 7271113 NR Description: 68 kDa protein [Cicer arietinum]
  misc_feature (145)..(710): Homolog of NCBI NO: 7485958 NR Description: hypothetical protein F22I13.40 - Arabidopsis >gi|4539335|emb|CAB37483.1| putative protein [Arabidopsis >gi|7270811|emb|CAB80492.1| putative protein [Arabidopsis
  misc_feature (145)..(710): Homolog of NCBI NO: 30691875 NR Description: glycosyltransferase family 8 [Arabidopsis
  misc_feature (254)..(648): Homolog of NCBI NO: 14517362 NR Description: AT3g61130/T20K12_30 [Arabidopsis thaliana]
  misc_feature (254)..(707): Homolog of NCBI NO: 37533460 NR Description: hypothetical protein [Oryza sativa (japonica group)] >gi|20279459|gb|AAM18739.1| hypothetical protein [Oryza
  misc_feature (254)..(568): Homolog of NCBI NO: 15227235 NR Description: hypothetical protein; protein id: At2g46480.1
LVFCEKHTKQPGHLRLRLPSQLLCLYAAASISSAQEWRKNICSEGLRGSQVPDKTHRGKPFSDMVRMRRRLVLLLLLLGLTVLSPLALYTSRLSVALNSIPRVFPGEITNQGRGVEADKLNALPLETVSSLKEPVDIVFSEELTESKSQELRLPKVGAHKSRVLSEVTVADDGTSSKDNEVIEQVITLEAQDGGLVKGAGVSDEQEKNIGSLQQSSSEESSQDTMPKQTPAKVVAENSQSARTDGKTKTAVLPDMRIRNIKDQLIKAKVYLGLGSIRASSQYLKDLRQRIREVQKVLGDASKDSDLPKNAHEKVKALEQMLIKGKQMQDDCSIIVKKLRAMLHSAEEQLHAHKKQTVFLTQLAAKTLPKGLHCLPLRLANEYFSLDPVRQQFPNQQNLINPKLYHYALFSDNILATAVVVNSTVLNAKHPSDHVIHIVTDKLNYAPMRMWFLSNPPGKATIEVQNIEEFTWLNDSYSPVLKHLGSQSMIDYYFGTNRANSDSNLKYRNPKYLSILNHLRFYLPEIYPKLDKMVFLDDDIVVKKDLAGLWSINMKGKVNGAVETCGESFHRYDRYLNFSNPVITKSFDPHACVWAFGMNVFDLAEWRRQNITEIYHSWQKLNEDRSLWKLGTLPPGLVTFWNKTFPLSRSWHVLGLGYNPHVNSRDIEHAAVIHYNGNMKPWLEIGLPKFRSYWSKYLDYDQSFLRECNINP

SEQ ID NO: 12746 - protein, 648 aa, Zea mays subsp. mays
  peptide (1)..(648): Ceres Seq. ID no. 12369027
  misc_feature (1)..(648): Homolog of NCBI NO: 38423965 NR Description: putative glycosyltransferase [Oryza sativa
  misc_feature (112)..(648): Homolog of NCBI NO: 10177914 NR Description: emb|CAB71043.1~gene_id:MCA23.10~strong similarity
  misc_feature (112)..(648): Homolog of NCBI NO: 18422837 NR Description: putative protein; protein id: At5g47780.1, by cDNA: gi_15810326, supported by cDNA: gi_20259234 [Arabidopsis >gi|15810327|gb|AAL07051.1| unknown protein [Arabidopsis
  misc_feature (191)..(647): Homolog of NCBI NO: 15233046 NR Description: putative protein; protein id: At3g61130.1, by cDNA: gi_14517361 [Arabidopsis thaliana]
  misc_feature (191)..(647): Homolog of NCBI NO: 7271113 NR Description: 68 kDa protein [Cicer arietinum]
  misc_feature (82)..(647): Homolog of NCBI NO: 7485958 NR Description: hypothetical protein F22I13.40 - Arabidopsis >gi|4539335|emb|CAB37483.1| putative protein [Arabidopsis >gi|7270811|emb|CAB80492.1| putative protein [Arabidopsis
  misc_feature (82)..(647): Homolog of NCBI NO: 30691875 NR Description: glycosyltransferase family 8 [Arabidopsis
  misc_feature (191)..(585): Homolog of NCBI NO: 14517362 NR Description: AT3g61130/T20K12_30 [Arabidopsis thaliana]
  misc_feature (191)..(644): Homolog of NCBI NO: 37533460 NR Description: hypothetical protein [Oryza sativa (japonica group)] >gi|20279459|gb|AAM18739.1| hypothetical protein [Oryza
  misc_feature (191)..(505): Homolog of NCBI NO: 15227235 NR Description: hypothetical protein; protein id: At2g46480.1
MVRMRRRLVLLLLLLGLTVLSPLALYTSRLSVALNSIPRVFPGEITNQGRGVEADKLNALPLETVSSLKEPVDIVFSEELTESKSQELRLPKVGAHKSRVLSEVTVADDGTSSKDNEVIEQVITLEAQDGGLVKGAGVSDEQEKNIGSLQQSSSEESSQDTMPKQTPAKVVAENSQSARTDGKTKTAVLPDMRIRNIKDQLIKAKVYLGLGSIRASSQYLKDLRQRIREVQKVLGDASKDSDLPKNAHEKVKALEQMLIKGKQMQDDCSIIVKKLRAMLHSAEEQLHAHKKQTVFLTQLAAKTLPKGLHCLPLRLANEYFSLDPVRQQFPNQQNLINPKLYHYALFSDNILATAVVVNSTVLNAKHPSDHVIHIVTDKLNYAPMRMWFLSNPPGKATIEVQNIEEFTWLNDSYSPVLKHLGSQSMIDYYFGTNRANSDSNLKYRNPKYLSILNHLRFYLPEIYPKLDKMVFLDDDIVVKKDLAGLWSINMKGKVNGAVETCGESFHRYDRYLNFSNPVITKSFDPHACVWAFGMNVFDLAEWRRQNITEIYHSWQKLNEDRSLWKLGTLPPGLVTFWNKTFPLSRSWHVLGLGYNPHVNSRDIEHAAVIHYNGNMKPWLEIGLPKFRSYWSKYLDYDQSFLRECNINP

SEQ ID NO: 12747 - protein, 645 aa, Zea mays subsp. mays
  peptide (1)..(645): Ceres Seq. ID no. 12369028
  misc_feature (1)..(645): Homolog of NCBI NO: 38423965 NR Description: putative glycosyltransferase [Oryza sativa
  misc_feature (109)..(645): Homolog of NCBI NO: 10177914 NR Description: emb|CAB71043.1~gene_id:MCA23.10~strong similarity
  misc_feature (109)..(645): Homolog of NCBI NO: 18422837 NR Description: putative protein; protein id: At5g47780.1, by cDNA: gi_15810326, supported by cDNA: gi_20259234 [Arabidopsis >gi|15810327|gb|AAL07051.1| unknown protein [Arabidopsis
  misc_feature (188)..(644): Homolog of NCBI NO: 15233046 NR Description: putative protein; protein id: At3g61130.1, by cDNA: gi_14517361 [Arabidopsis thaliana]
  misc_feature (188)..(644): Homolog of NCBI NO: 7271113 NR Description: 68 kDa protein [Cicer arietinum]
  misc_feature (79)..(644): Homolog of NCBI NO: 7485958 NR Description: hypothetical protein F22I13.40 - Arabidopsis >gi|4539335|emb|CAB37483.1| putative protein [Arabidopsis >gi|7270811|emb|CAB80492.1| putative protein [Arabidopsis
  misc_feature (79)..(644): Homolog of NCBI NO: 30691875 NR Description: glycosyltransferase family 8 [Arabidopsis
  misc_feature (188)..(582): Homolog of NCBI NO: 14517362 NR Description: AT3g61130/T20K12_30 [Arabidopsis thaliana]
  misc_feature (188)..(641): Homolog of NCBI NO: 37533460 NR Description: hypothetical protein [Oryza sativa (japonica group)] >gi|20279459|gb|AAM18739.1| hypothetical protein [Oryza
  misc_feature (188)..(502): Homolog of NCBI NO: 15227235 NR Description: hypothetical protein; protein id: At2g46480.1
MRRRLVLLLLLLGLTVLSPLALYTSRLSVALNSIPRVFPGEITNQGRGVEADKLNALPLETVSSLKEPVDIVFSEELTESKSQELRLPKVGAHKSRVLSEVTVADDGTSSKDNEVIEQVITLEAQDGGLVKGAGVSDEQEKNIGSLQQSSSEESSQDTMPKQTPAKVVAENSQSARTDGKTKTAVLPDMRIRNIKDQLIKAKVYLGLGSIRASSQYLKDLRQRIREVQKVLGDASKDSDLPKNAHEKVKALEQMLIKGKQMQDDCSIIVKKLRAMLHSAEEQLHAHKKQTVFLTQLAAKTLPKGLHCLPLRLANEYFSLDPVRQQFPNQQNLINPKLYHYALFSDNILATAVVVNSTVLNAKHPSDHVIHIVTDKLNYAPMRMWFLSNPPGKATIEVQNIEEFTWLNDSYSPVLKHLGSQSMIDYYFGTNRANSDSNLKYRNPKYLSILNHLRFYLPEIYPKLDKMVFLDDDIVVKKDLAGLWSINMKGKVNGAVETCGESFHRYDRYLNFSNPVITKSFDPHACVWAFGMNVFDLAEWRRQNITEIYHSWQKLNEDRSLWKLGTLPPGLVTFWNKTFPLSRSWHVLGLGYNPHVNSRDIEHAAVIHYNGNMKPWLEIGLPKFRSYWSKYLDYDQSFLRECNINP

SEQ ID NO: 12748 - DNA, 2188 bp, Zea mays subsp. mays
  misc_feature (1)..(2188): Ceres Seq. ID no. 12376651
  misc_feature: MA Experiment ID: 108535 Result: Up-regulated in Transcription
  misc_feature: MA Experiment 108535 PARAMETER Experiment Name: Zm_Meristem_P Parameter: Age (day) Value: 8
  misc_feature: MA Experiment 108535 PARAMETER Experiment Name: Zm_Meristem_P Parameter: Organism Value: Zea mays
  misc_feature: MA Experiment 108535 PARAMETER Experiment Name: Zm_Meristem_P Parameter: Plant Line Value: 35A19
  misc_feature: MA Experiment 108535 PARAMETER Experiment Name: Zm_Meristem_P Parameter: Tissue Value: Root Meristem vs. Above Root Meristem
  misc_feature: MA Experiment ID: 108544 Result: Down-regulated in Transcription
  misc_feature: MA Experiment ID: 20000488 Result: Up-regulated in Transcription
  misc_feature: MA Experiment 20000488 PARAMETER Experiment Name: Zm_50mM_NH4NO3_L_to_H_P Parameter: Organism Value: Zea mays
  misc_feature: MA Experiment 20000488 PARAMETER Experiment Name: Zm_50mM_NH4NO3_L_to_H_P Parameter: Timepoint (hr) Value: 8
  misc_feature: MA Experiment 20000488 PARAMETER Experiment Name: Zm_50mM_NH4NO3_L_to_H_P Parameter: Tissue Value: Leaves
  misc_feature: MA Experiment 20000488 PARAMETER Experiment Name: Zm_50mM_NH4NO3_L_to_H_P Parameter: Treatment Value: 50mM NH4NO3 vs. 100mM Mannitol
  misc_feature: MA Experiment ID: 20000535 Result: Up-regulated in Transcription
  misc_feature: MA Experiment 20000535 PARAMETER Experiment Name: Zm_Hybrid_Seed_Dev_P Parameter: DAP Value: 30 vs. 12
  misc_feature: MA Experiment 20000535 PARAMETER Experiment Name: Zm_Hybrid_Seed_Dev_P Parameter: Organism Value: Zea mays
  misc_feature: MA Experiment 20000535 PARAMETER Experiment Name: Zm_Hybrid_Seed_Dev_P Parameter: Plant Line Value: 35A19
  misc_feature: MA Experiment 20000535 PARAMETER Experiment Name: Zm_Hybrid_Seed_Dev_P Parameter: Tissue Value: Embryo vs. Unfert Floret
  misc_feature: MA Experiment ID: 20001606 Result: Up-regulated in Transcription
  misc_feature: MA Experiment 20001606 PARAMETER Experiment Name: Zm_50ppm_KNO3_L-to-H_P Parameter: Age (day) Value: 19
  misc_feature: MA Experiment 20001606 PARAMETER Experiment Name: Zm_50ppm_KNO3_L-to-H_P Parameter: Organism Value: Zea mays
  misc_feature: MA Experiment 20001606 PARAMETER Experiment Name: Zm_50ppm_KNO3_L-to-H_P Parameter: Plant Line Value: 35A19
  misc_feature: MA Experiment 20001606 PARAMETER Experiment Name: Zm_50ppm_KNO3_L-to-H_P Parameter: Timepoint (hr) Value: 8
  misc_feature: MA Experiment 20001606 PARAMETER Experiment Name: Zm_50ppm_KNO3_L-to-H_P Parameter: Tissue Value: Shoots
  misc_feature: MA Experiment 20001606 PARAMETER Experiment Name: Zm_50ppm_KNO3_L-to-H_P Parameter: Treatment Value: 50ppm KNO3 vs. 50ppm KCl
gcacgagaccattacctagaacatcctaatcgaaaaacaacaaactcagtttccaaattagcaaattagcaagcaactgagtgcaacagaaacatgaaggtaacatgtttttttttctgcttcttttttttctgccgggaagagtttgtctctcttcgatggaccacggcatctagctcttttgtgtgtgtgtgcctctagccctccagctgatgaaacatcttcttgggcttttttttgatattattcgggtcccagcaaaggattgtgatcaaggtgcagatgacctgcgacaagtgccgtaaaaacgctctggctctagcttgctcgacatatggtaagcactgcgttactgatcgcagtgacccgtgtctgaacgcccagcctctcgcgtggtcgaggagcggcacagcagctgatcgtgtctgtgactgtgacgtcttggttgcaggagtgcaatccgtggggatcgagggtgaggagcgggaccagctcgtggtgatcggcgacggcgtcgacgccacctgcctggcgagcggcctgcggaagaaggtgaaggtgggcagggcggacatcgtgaaggtggaagcggtgggcgacgagaaggaggcgacgacgaaggacgacgcggccgccagtagtagtagtagtagtcctaatcccgtggcccaccgcttacaccttccctcggtcccttccatctcctagccgccgccgccgccgcccaaaaccctacctaccctcttctccccctcactctcctttcatctccattctaatggcggcccaacccgtccggcgaagctgctagtgcttgtatctactatcttcatcaggtacttcgcgatcctactgaagtattccccgccgccgctgccatggccaccctcaaccctttcgaactcctcggcgccgacgacaacgacgacccgtcgctgttgattgcggcggcggcggctgctgctcagaaagccgaggcgaagaagtccgccgtggcgcctgctgggaaggctgcccagcctgcggcgaccaccaagttcccgaccaagcccgctcctccctcgcagacggttcgggatgcacgcggcggtggctcatcagctcgtggaggctttggccgtggtgaacgtggccgtggcagaggtggacggggatatggtcagaaccgtggcttcagtggtgacaatggcaatgagttccagggaggttatggtggcggaggctatggggatggtgctgtaactggtggatctgaaggagaaagggagagagacactcgtcccccgtaccgtggcggaggcagacgtggtggttacaggaatgttgagtttggtgatgactctgcagaggccaccacggagaaactatgagcgccacagcgggactggccatggctatgagatgaagcgtgatggcgcagggcgtgggaactggggcactgccactgatgagcttattgcccaggatgcagaggactctccgaagatggaggaggctgctcctgttgctgagaaacaaggtgagcagatcgatgccccagcagcagatgagaacaaagataacaaggatgctactgcaaatgaggaggaagaaaaggaagaggacaaggagatgactctggaggaatttgagaaaataagagaggagaagaggaaagcactacttgcgttgaaggctgaggagaggaaagttgaagttgacaaggatctgcgttctctgcagccactttcaaacaagaaagaaaatgatgaagttttcattaagctgggttctgacaaggataagaagaaggaaaatgctgagcgtgatgagcgtgccaagaagtcggtgagcatcaacgagttcctgaaacctgctgaaggagaaaggtactacggcggccgtggccgtggaaggggccgtggggatcgtggtggttttagaggcggatacggagggggatacagtcgtggcccagctgctgctgctccatccattgaagatcaagctcagttcccaagccttggtgggaagtgaagggcgcccagctgctgctgtcaccgagcgttgtgttgtctgctgttgtcatatttaaattttgtccgacgttacatttctgtgccacggtttaaacggaacaaataatggtgttgcatgtggctatctttggttatgtggtacttgacgttgaataccggagttgtttatc

SEQ ID NO: 12749 - protein, 231 aa, Zea mays subsp. mays
  peptide (1)..(231): Ceres Seq. ID no. 12376652
  misc_feature (9)..(173): Pfam Name: Hyaluronan / mRNA binding family Pfam Description: Hyaluronan / mRNA binding family
  misc_feature (9)..(231): Homolog of NCBI NO: 34910712 NR Description: putative nuclear RNA binding protein A [Oryza
  misc_feature (26)..(231): Homolog of NCBI NO: 34912396 NR Description: putative putative nuclear RNA binding protein A
  misc_feature (12)..(231): Homolog of NCBI NO: 39725276 NR Description: salt tolerance protein 1 [Beta vulgaris]
  misc_feature (12)..(231): Homolog of NCBI NO: 7488863 NR Description: probable transcription factor - fava bean
  misc_feature (12)..(231): Homolog of NCBI NO: 6492266 NR Description: nuclear RNA binding protein A [Spinacia oleracea]
  misc_feature (12)..(229): Homolog of NCBI NO: 39725278 NR Description: salt tolerance protein 2 [Beta vulgaris]
  misc_feature (8)..(229): Homolog of NCBI NO: 15238039 NR Description: putative protein; protein id: At5g47210.1, by cDNA: 19104. [Arabidopsis thaliana] gene_id:MQL5.6~pir||G71444~similar to unknown protein
  misc_feature (8)..(229): Homolog of NCBI NO: 21553991 NR Description: nuclear RNA binding protein A-like protein
  misc_feature (12)..(231): Homolog of NCBI NO: 15235894 NR Description: nuclear antigen homolog; protein id: At4g16830.1, by cDNA: 118826., supported by cDNA: gi_17380879, supported by gi_20465928 [Arabidopsis thaliana] >gi|7488137|pir||F71435
  misc_feature (12)..(229): Homolog of NCBI NO: 15236552 NR Description: nuclear RNA binding protein A-like protein; id: At4g17520.1, supported by cDNA: 35156., supported by cDNA: supported by cDNA: gi_19698830 [Arabidopsis thaliana]
MLSLVMTLQRPPRRNYERHSGTGHGYEMKRDGAGRGNWGTATDELIAQDAEDSPKMEEAAPVAEKQGEQIDAPAADENKDNKDATANEEEEKEEDKEMTLEEFEKIREEKRKALLALKAEERKVEVDKDLRSLQPLSNKKENDEVFIKLGSDKDKKKENAERDERAKKSVSINEFLKPAEGERYYGGRGRGRGRGDRGGFRGGYGGGYSRGPAAAAPSIEDQAQFPSLGGK

SEQ ID NO: 12750 - protein, 226 aa, Zea mays subsp. mays
  peptide (1)..(226): Ceres Seq. ID no. 12376653
  misc_feature (4)..(168): Pfam Name: Hyaluronan / mRNA binding family Pfam Description: Hyaluronan / mRNA binding family
  misc_feature (4)..(226): Homolog of NCBI NO: 34910712 NR Description: putative nuclear RNA binding protein A [Oryza
  misc_feature (21)..(226): Homolog of NCBI NO: 34912396 NR Description: putative putative nuclear RNA binding protein A
  misc_feature (7)..(226): Homolog of NCBI NO: 39725276 NR Description: salt tolerance protein 1 [Beta vulgaris]
  misc_feature (7)..(226): Homolog of NCBI NO: 7488863 NR Description: probable transcription factor - fava bean
  misc_feature (7)..(226): Homolog of NCBI NO: 6492266 NR Description: nuclear RNA binding protein A [Spinacia oleracea]
  misc_feature (7)..(224): Homolog of NCBI NO: 39725278 NR Description: salt tolerance protein 2 [Beta vulgaris]
  misc_feature (3)..(224): Homolog of NCBI NO: 15238039 NR Description: putative protein; protein id: At5g47210.1, by cDNA: 19104. [Arabidopsis thaliana] gene_id:MQL5.6~pir||G71444~similar to unknown protein
  misc_feature (3)..(224): Homolog of NCBI NO: 21553991 NR Description: nuclear RNA binding protein A-like protein
  misc_feature (7)..(226): Homolog of NCBI NO: 15235894 NR Description: nuclear antigen homolog; protein id: At4g16830.1, by cDNA: 118826., supported by cDNA: gi_17380879, supported by gi_20465928 [Arabidopsis thaliana] >gi|7488137|pir||F71435
  misc_feature (7)..(224): Homolog of NCBI NO: 15236552 NR Description: nuclear RNA binding protein A-like protein; id: At4g17520.1, supported by cDNA: 35156., supported by cDNA: supported by cDNA: gi_19698830 [Arabidopsis thaliana]
MTLQRPPRRNYERHSGTGHGYEMKRDGAGRGNWGTATDELIAQDAEDSPKMEEAAPVAEKQGEQIDAPAADENKDNKDATANEEEEKEEDKEMTLEEFEKIREEKRKALLALKAEERKVEVDKDLRSLQPLSNKKENDEVFIKLGSDKDKKKENAERDERAKKSVSINEFLKPAEGERYYGGRGRGRGRGDRGGFRGGYGGGYSRGPAAAAPSIEDQAQFPSLGGK

SEQ ID NO: 12751 - protein, 204 aa, Zea mays subsp. mays
  peptide (1)..(204): Ceres Seq. ID no. 12376654
  misc_feature (1)..(146): Pfam Name: Hyaluronan / mRNA binding family Pfam Description: Hyaluronan / mRNA binding family
  misc_feature (1)..(204): Homolog of NCBI NO: 34910712 NR Description: putative nuclear RNA binding protein A [Oryza
  misc_feature (1)..(204): Homolog of NCBI NO: 34912396 NR Description: putative putative nuclear RNA binding protein A
  misc_feature (1)..(204): Homolog of NCBI NO: 39725276 NR Description: salt tolerance protein 1 [Beta vulgaris]
  misc_feature (1)..(204): Homolog of NCBI NO: 7488863 NR Description: probable transcription factor - fava bean
  misc_feature (1)..(204): Homolog of NCBI NO: 6492266 NR Description: nuclear RNA binding protein A [Spinacia oleracea]
  misc_feature (1)..(202): Homolog of NCBI NO: 39725278 NR Description: salt tolerance protein 2 [Beta vulgaris]
  misc_feature (1)..(202): Homolog of NCBI NO: 15238039 NR Description: putative protein; protein id: At5g47210.1, by cDNA: 19104. [Arabidopsis thaliana] gene_id:MQL5.6~pir||G71444~similar to unknown protein
  misc_feature (1)..(202): Homolog of NCBI NO: 21553991 NR Description: nuclear RNA binding protein A-like protein
  misc_feature (1)..(204): Homolog of NCBI NO: 15235894 NR Description: nuclear antigen homolog; protein id: At4g16830.1, by cDNA: 118826., supported by cDNA: gi_17380879, supported by gi_20465928 [Arabidopsis thaliana] >gi|7488137|pir||F71435
  misc_feature (1)..(202): Homolog of NCBI NO: 15236552 NR Description: nuclear RNA binding protein A-like protein; id: At4g17520.1, supported by cDNA: 35156., supported by cDNA: supported by cDNA: gi_19698830 [Arabidopsis thaliana]
MKRDGAGRGNWGTATDELIAQDAEDSPKMEEAAPVAEKQGEQIDAPAADENKDNKDATANEEEEKEEDKEMTLEEFEKIREEKRKALLALKAEERKVEVDKDLRSLQPLSNKKENDEVFIKLGSDKDKKKENAERDERAKKSVSINEFLKPAEGERYYGGRGRGRGRGDRGGFRGGYGGGYSRGPAAAAPSIEDQAQFPSLGGK

SEQ ID NO: 12752 - DNA, 822 bp, Zea mays subsp. mays
  misc_feature (1)..(822): Ceres Seq. ID no. 12366902
  misc_feature: MA Experiment ID: 108535 Result: Up-regulated in Transcription
  misc_feature: MA Experiment 108535 PARAMETER Experiment Name: Zm_Meristem_P Parameter: Age (day) Value: 8
  misc_feature: MA Experiment 108535 PARAMETER Experiment Name: Zm_Meristem_P Parameter: Organism Value: Zea mays
  misc_feature: MA Experiment 108535 PARAMETER Experiment Name: Zm_Meristem_P Parameter: Plant Line Value: 35A19
  misc_feature: MA Experiment 108535 PARAMETER Experiment Name: Zm_Meristem_P Parameter: Tissue Value: Root Meristem vs. Above Root Meristem
caagttcagtcacagccacaggtatgctgacactcctgccccttcgcttgccattctcgctacctgtagccgccacactcccgaacgccgccttgctcctcccggcaagcaccagggtctccctccgccagatcacgcagggagccagcatgaacgctgccgccgcctcctccgctccggacgctgctgcggccgccactggcgaggagggcgcgaaggaggccgtggacgtgctggtccagtacgtggtcctgcggcgcgatctggcggacgcgtggccgctggggagcgtcgtggcgcagggctgccacgccgccgtggccgccgtgtgggcgcaccgggaccacccggacaccgccgcctactgcgcgcccgacaacctcgaccgaatgcacaaggtaacactggaggtgaaaggagagacacagctgaataacctggctgagaagctggcagcagctggtgtccggtacaagctgtggatagagcagcctgagaacatcccaacatgcatagctacagcaccctgcccaaagtcgcaggtttcttctttcttcaagaagctcaagctttgcaaatgagcaaagaacaacagttgttcattgctccgtctgctactgtcattacggaggatcatcaaaactttcaaaactgcccatgtatgtttcatgacatgttctgctagcaacaagccatagataattagatatctcagtgatgtaatggagatatttgtgtcgttattcgccttgctgattttacatgattgtccattcacttactgtgtacctgtctcagcagttaattaatgcgaataaattg

SEQ ID NO: 12753 - protein, 192 aa, Zea mays subsp. mays
  peptide (1)..(192): Ceres Seq. ID no. 12366903
  misc_feature (8)..(192): Homolog of NCBI NO: 38346909 NR Description: OSJNBb0015N08.9 [Oryza sativa (japonica
  misc_feature (5)..(192): Homolog of NCBI NO: 15238224 NR Description: putative protein; protein id: At5g10700.1 thaliana] >gi|10129648|emb|CAC08244.1| putative protein
  misc_feature (77)..(192): Homolog of NCBI NO: 27716785 NR Description: similar to CG14903-PA [Drosophila melanogaster]
  misc_feature (77)..(192): Homolog of NCBI NO: 37546977 NR Description: similar to ENSANGP00000018456 [Homo sapiens]
  misc_feature (78)..(192): Homolog of NCBI NO: 24647481 NR Description: CG14903-PA [Drosophila melanogaster]
  misc_feature (79)..(190): Homolog of NCBI NO: 39585949 NR Description: Hypothetical protein CBG13912 [Caenorhabditis
  misc_feature (76)..(192): Homolog of NCBI NO: 23479593 NR Description: Drosophila melanogaster CG14903 gene product
  misc_feature (71)..(190): Homolog of NCBI NO: 25148624 NR Description: Low molecular weight phosphotyrosine protein [Caenorhabditis elegans] >gi|16604246|gb|AAF60890.3| Hypothetical
  misc_feature (78)..(192): Homolog of NCBI NO: 23612187 NR Description: hypothetical protein [Plasmodium falciparum 3D7]
  misc_feature (77)..(192): Homolog of NCBI NO: 29248553 NR Description: GLP_162_41645_41277 [Giardia lamblia ATCC 50803]
SSVTATGMLTLLPLRLPFSLPVAATLPNAALLLPASTRVSLRQITQGASMNAAAASSAPDAAAAATGEEGAKEAVDVLVQYVVLRRDLADAWPLGSVVAQGCHAAVAAVWAHRDHPDTAAYCAPDNLDRMHKVTLEVKGETQLNNLAEKLAAAGVRYKLWIEQPENIPTCIATAPCPKSQVSSFFKKLKLCK

SEQ ID NO: 12754 - protein, 185 aa, Zea mays subsp. mays
  peptide (1)..(185): Ceres Seq. ID no. 12366904
  misc_feature (70)..(185): Homolog of NCBI NO: 27716785 NR Description: similar to CG14903-PA [Drosophila melanogaster]
  misc_feature (70)..(185): Homolog of NCBI NO: 37546977 NR Description: similar to ENSANGP00000018456 [Homo sapiens]
  misc_feature (71)..(185): Homolog of NCBI NO: 24647481 NR Description: CG14903-PA [Drosophila melanogaster]
  misc_feature (72)..(183): Homolog of NCBI NO: 39585949 NR Description: Hypothetical protein CBG13912 [Caenorhabditis
  misc_feature (69)..(185): Homolog of NCBI NO: 23479593 NR Description: Drosophila melanogaster CG14903 gene product
  misc_feature (64)..(183): Homolog of NCBI NO: 25148624 NR Description: Low molecular weight phosphotyrosine protein [Caenorhabditis elegans] >gi|16604246|gb|AAF60890.3| Hypothetical
  misc_feature (71)..(185): Homolog of NCBI NO: 23612187 NR Description: hypothetical protein [Plasmodium falciparum 3D7]
  misc_feature (70)..(185): Homolog of NCBI NO: 29248553 NR Description: GLP_162_41645_41277 [Giardia lamblia ATCC 50803]
  misc_feature (1)..(185): Homolog of NCBI NO: 38346909 NR Description: OSJNBb0015N08.9 [Oryza sativa (japonica
  misc_feature (1)..(185): Homolog of NCBI NO: 15238224 NR Description: putative protein; protein id: At5g10700.1 thaliana] >gi|10129648|emb|CAC08244.1| putative protein
MLTLLPLRLPFSLPVAATLPNAALLLPASTRVSLRQITQGASMNAAAASSAPDAAAAATGEEGAKEAVDVLVQYVVLRRDLADAWPLGSVVAQGCHAAVAAVWAHRDHPDTAAYCAPDNLDRMHKVTLEVKGETQLNNLAEKLAAAGVRYKLWIEQPENIPTCIATAPCPKSQVSSFFKKLKLCK

SEQ ID NO: 12755 - protein, 144 aa, Zea mays subsp. mays
  peptide (1)..(144): Ceres Seq. ID no. 12366905
KFSHSHRYADTPAPSLAILATCSRHTPERRLAPPGKHQGLPPPDHAGSQHERCRRLLRSGRCCGRHWRGGREGGRGRAGPVRGPAARSGGRVAAGERRGAGLPRRRGRRVGAPGPPGHRRLLRARQPRPNAQGNTGGERRDTAE

SEQ ID NO: 12756 - DNA, 1898 bp, Zea mays subsp. mays
  misc_feature (1)..(1898): Ceres Seq. ID no. 12352643
  misc_feature: MA Experiment ID: 108535 Result: Up-regulated in Transcription
  misc_feature: MA Experiment 108535 PARAMETER Experiment Name: Zm_Meristem_P Parameter: Age (day) Value: 8
  misc_feature: MA Experiment 108535 PARAMETER Experiment Name: Zm_Meristem_P Parameter: Organism Value: Zea mays
  misc_feature: MA Experiment 108535 PARAMETER Experiment Name: Zm_Meristem_P Parameter: Plant Line Value: 35A19
  misc_feature: MA Experiment 108535 PARAMETER Experiment Name: Zm_Meristem_P Parameter: Tissue Value: Root Meristem vs. Above Root Meristem
  misc_feature: MA Experiment ID: 108544 Result: Down-regulated in Transcription
  misc_feature: MA Experiment ID: 20000479 Result: Down-regulated in Transcription
  misc_feature: MA Experiment 20000479 PARAMETER Experiment Name: Zm_Drought_P Parameter: Age (day) Value: 10
  misc_feature: MA Experiment 20000479 PARAMETER Experiment Name: Zm_Drought_P Parameter: Organism Value: Zea mays
  misc_feature: MA Experiment 20000479 PARAMETER Experiment Name: Zm_Drought_P Parameter: Plant Line Value: 35A19
  misc_feature: MA Experiment 20000479 PARAMETER Experiment Name: Zm_Drought_P Parameter: Timepoint (hr) Value: 48
  misc_feature: MA Experiment 20000479 PARAMETER Experiment Name: Zm_Drought_P Parameter: Tissue Value: Aerial
  misc_feature: MA Experiment 20000479 PARAMETER Experiment Name: Zm_Drought_P Parameter: Treatment Value: Drought vs. No Drought
  misc_feature: MA Experiment ID: 20000492 Result: Up-regulated in Transcription
  misc_feature: MA Experiment 20000492 PARAMETER Experiment Name: Zm_Hybrid_Seed_Dev_P Parameter: DAP Value: 12
  misc_feature: MA Experiment 20000492 PARAMETER Experiment Name: Zm_Hybrid_Seed_Dev_P Parameter: Organism Value: Zea mays
  misc_feature: MA Experiment 20000492 PARAMETER Experiment Name: Zm_Hybrid_Seed_Dev_P Parameter: Plant Line Value: 35A19
  misc_feature: MA Experiment 20000492 PARAMETER Experiment Name: Zm_Hybrid_Seed_Dev_P Parameter: Tissue Value: Fert Kernel vs. Unfert Floret
  misc_feature: MA Experiment ID: 20000632 Result: Down-regulated in Transcription
  misc_feature: MA Experiment 20000632 PARAMETER Experiment Name: Zm_Herbicide-Treatments_P Parameter: Timepoint (hr) Value: 4
  misc_feature: MA Experiment 20000632 PARAMETER Experiment Name: Zm_Herbicide-Treatments_P Parameter: Tissue Value: Aerial
  misc_feature: MA Experiment 20000632 PARAMETER Experiment Name: Zm_Herbicide-Treatments_P Parameter: Treatment Value: Glean vs. No Treatment
aatccaaaccctagagagagagagagagagtgtgtagtgtgtgtgtgtgagagagagggggattggaggcgaaggcagcgggctagcgctagcggaggaggagagatccgctgaggtggaacgcccgatcggcggagccccatccaccaccactccacaagatgcggggcgggacgctgcagatcaactggcacgaccagcagccggtgctcagcctcgacttccaccccgtctcccgccgcctcgccacagccggagcggaccacgacgtcaagatctgggaggtagcgtcggacggcaagctccccaccgccaccttcaagaccggcctggtccccaacaccaccgcccacagctccgcggtcaacgtcctccggttctccccttcaggggagtatctcgcctccggtgctgatggtggcggcatcaccctctggaaactgcatcccgctgacgacggcgaggcatggaaaattcacaagacgttactattccatcacaaggatgttcttgaccttcagtggtcgcatgacagcacatttcttgtttctgcatcagtcgacaacacttgcataatttgggaagctagtaaaggcacagtgcaacaaaagctagagggacatctgcattatgttcagggtgtggcatgggatcctttgggccagtatattgcttcactgagttctgacagaacctgtaaaatatatgcaaaaaagcctcagggcaaatccaagaacgcggagaggttgaactttgtttgccagcatacactagtgaaggtagaataccagaatcatgatgaatctaagccaccaaccaaatctcatttgtttcatgatgagacactaccatctttcttccgaaggttggcatggtcacctgatggatcttttctagtattgccagcaggcctttctaaacactcctccgaggtgattaatacagcttatgtaatgtccaggcgtgacctctcaaggccttcgatacaactccctggggcaagtaaagctatagtggcagtacgcttctgccctgtactattcaaaccacgtggttctaactcagatggtttcttcaagcttccttatagagttgtctttgctgtggctactttgaactctctgtatgtctatgatacagaaagtgttcctccaattctagtccatgctggtctacactatgctgccattaccgatattgcatggtcttctgatgctaagtacctggcagtgtcatcacgagatggctactgtactataatagagtttgagaatgaggaactgggacagcctcacatactccccggatcaaaggaagttgctaatgggaatctgacacctgagaccaagaagcctgtatgtgctgatagcatgaaggttgataatagtgccaacaagcttaagatggaagccagtcctgttgctgtaggagttagagcaccactgctgccaactgagaacatcaagagaacaggagagcttgccgaaggaaatgtaacctgtgaaaacaaggagccggtaacaatagacagtatggaagtagatgccgatgataccaaaggcaaggaggcaaccatacccgtggcagctgaagtgacaccgccaccagcggtaccggcagcgaagaacagcgcatctagtaagcctgctaagaggcgaattactcctatcgcaatcgactaggtagtagacgcagcagttagggttttgatgtgttatgtagtgatggcaagtactggatactatgtttaggctaccctgtaaagtcgtttgtgctgcggtgctcatcttctgctctagtcctcctgctcttgacacaattggggagaatgtgaacagaagggctgtgtgtatgtatgagcacactttgttatggcgcaacatgcaagccactaaccg

SEQ ID NO: 12757 - protein, 506 aa, Zea mays subsp. mays
  peptide (1)..(506): Ceres Seq. ID no. 12352644
  misc_feature (1)..(488): Homolog of NCBI NO: 4884488 NR Description: FAS2 [Arabidopsis thaliana]
  misc_feature (1)..(382): Homolog of NCBI NO: 18424846 NR Description: FAS2 (dbj|BAA77766.1); protein id: At5g64630.1, by cDNA: gi_14030688, supported by cDNA: gi_18491112 [Arabidopsis >gi|14030689|gb|AAK53019.1|AF375435_1 AT5g64630/MUB3_15
MRGGTLQINWHDQQPVLSLDFHPVSRRLATAGADHDVKIWEVASDGKLPTATFKTGLVPNTTAHSSAVNVLRFSPSGEYLASGADGGGITLWKLHPADDGEAWKIHKTLLFHHKDVLDLQWSHDSTFLVSASVDNTCIIWEASKGTVQQKLEGHLHYVQGVAWDPLGQYIASLSSDRTCKIYAKKPQGKSKNAERLNFVCQHTLVKVEYQNHDESKPPTKSHLFHDETLPSFFRRLAWSPDGSFLVLPAGLSKHSSEVINTAYVMSRRDLSRPSIQLPGASKAIVAVRFCPVLFKPRGSNSDGFFKLPYRVVFAVATLNSLYVYDTESVPPILVHAGLHYAAITDIAWSSDAKYLAVSSRDGYCTIIEFENEELGQPHILPGSKEVANGNLTPETKKPVCADSMKVDNSANKLKMEASPVAVGVRAPLLPTENIKRTGELAEGNVTCENKEPVTIDSMEVDADDTKGKEATIPVAAEVTPPPAVPAAKNSASSKPAKRRITPIAID

SEQ ID NO: 12758 - DNA, 751 bp, Zea mays subsp. mays
  misc_feature (1)..(751): Ceres Seq. ID no. 12414680
  misc_feature: MA Experiment ID: 20000108 Result: Down-regulated in Transcription
  misc_feature: MA Experiment 20000108 PARAMETER Experiment Name: Zm_Root-Tips_P Parameter: Age (day) Value: 12
  misc_feature: MA Experiment 20000108 PARAMETER Experiment Name: Zm_Root-Tips_P Parameter: Organism Value: Zea mays
  misc_feature: MA Experiment 20000108 PARAMETER Experiment Name: Zm_Root-Tips_P Parameter: Tissue Value: Root tips vs. Root mid region    35
  misc_feature: MA Experiment 20000108 PARAMETER Experiment Name: Zm_Root-Tips_P Parameter: Tissue Value: Root tips vs. Root mid region   Sequence Listing-Misc Features (4)
cactgtttacaaaatcaggaatgttattcttggaagtgagtctcatagcctttctacttcaaggaaatgatgccagcggttttgaatctttggcacgaacctttgttatatctggagctgtagttgctgctgatgtattgctcaagactatatatgtttttggcttcggtgttcctttgttcattgatactgatcaaggaactagtgggaaatggggcctgtggattctccacaaacttgtgcttactggagtctatgggctgattgttttcatgcatcattcaagatggagagacaggctgcctgcaaaaccagcatactacaactatgtatgtgtgatgttgctactgaatggcatatcactgtttggatgtttccttattgcaagtggagctggatttggtttatggttatataatctcacaaccgtatgctatcattctctttaccttcccctcctatatgtgactttcttagcagacttcttccaggaggaagacatgctcctagagaacgtctactattctgaaatgaaggatgctgggttcttcgatgctgactgggattaatccgtggctactgtgctgtatgacccatcccatatgaagtacgctgtatttgtttttattttatctgtgtactctcaacgtagaacaggaaatgtatgtagctagtcgtggtagtgaatggaaatatgtaatcttactgctgcatacttcagaaaatcagaattcaagtgatttcacggccg

SEQ ID NO: 12759 - protein, 188 aa, Zea mays subsp. mays
  peptide (1)..(188): Ceres Seq. ID no. 12414681
  misc_feature (48)..(188): Homolog of NCBI NO: 21326119 NR Description: putative expressed protein [Sorghum bicolor]
  misc_feature (1)..(24): Homolog of NCBI NO: 21326119 NR Description: putative expressed protein [Sorghum bicolor]
  misc_feature (1)..(188): Homolog of NCBI NO: 18397089 NR Description: expressed protein; protein id: At3g05010.1, by cDNA: gi_15028250 [Arabidopsis thaliana]
  misc_feature (1)..(188): Homolog of NCBI NO: 12322847 NR Description: unknown protein; 15342-13483 [Arabidopsis
  misc_feature (1)..(188): Homolog of NCBI NO: 15240462 NR Description: putative protein; protein id: At5g27210.1, by cDNA: 96808., supported by cDNA: gi_14532471 [Arabidopsis
  misc_feature (1)..(188): Homolog of NCBI NO: 21618098 NR Description: unknown [Arabidopsis thaliana]
  misc_feature (1)..(188): Homolog of NCBI NO: 14532472 NR Description: AT5g27210/T21B4_120 [Arabidopsis thaliana]
  misc_feature (22)..(154): Homolog of NCBI NO: 7485300 NR Description: hypothetical protein A_TM021B04.15 - Arabidopsis >gi|2191194|gb|AAB61079.1| contains weak to the SAPB protein
LFTKSGMLFLEVSLIAFLLQGNDASGFESLARTFVISGAVVAADVLLKTIYVFGFGVPLFIDTDQGTSGKWGLWILHKLVLTGVYGLIVFMHHSRWRDRLPAKPAYYNYVCVMLLLNGISLFGCFLIASGAGFGLWLYNLTTVCYHSLYLPLLYVTFLADFFQEEDMLLENVYYSEMKDAGFFDADWD

SEQ ID NO: 12760 - protein, 182 aa, Zea mays subsp. mays
  peptide (1)..(182): Ceres Seq. ID no. 12414682
  misc_feature (42)..(182): Homolog of NCBI NO: 21326119 NR Description: putative expressed protein [Sorghum bicolor]
  misc_feature (1)..(18): Homolog of NCBI NO: 21326119 NR Description: putative expressed protein [Sorghum bicolor]
  misc_feature (1)..(182): Homolog of NCBI NO: 18397089 NR Description: expressed protein; protein id: At3g05010.1, by cDNA: gi_15028250 [Arabidopsis thaliana]
  misc_feature (1)..(182): Homolog of NCBI NO: 12322847 NR Description: unknown protein; 15342-13483 [Arabidopsis
  misc_feature (1)..(182): Homolog of NCBI NO: 15240462 NR Description: putative protein; protein id: At5g27210.1, by cDNA: 96808., supported by cDNA: gi_14532471 [Arabidopsis
  misc_feature (1)..(182): Homolog of NCBI NO: 21618098 NR Description: unknown [Arabidopsis thaliana]
  misc_feature (1)..(182): Homolog of NCBI NO: 14532472 NR Description: AT5g27210/T21B4_120 [Arabidopsis thaliana]
  misc_feature (16)..(148): Homolog of NCBI NO: 7485300 NR Description: hypothetical protein A_TM021B04.15 - Arabidopsis >gi|2191194|gb|AAB61079.1| contains weak to the SAPB protein
MLFLEVSLIAFLLQGNDASGFESLARTFVISGAVVAADVLLKTIYVFGFGVPLFIDTDQGTSGKWGLWILHKLVLTGVYGLIVFMHHSRWRDRLPAKPAYYNYVCVMLLLNGISLFGCFLIASGAGFGLWLYNLTTVCYHSLYLPLLYVTFLADFFQEEDMLLENVYYSEMKDAGFFDADWD

SEQ ID NO: 12761 - protein, 98 aa, Zea mays subsp. mays
  peptide (1)..(98): Ceres Seq. ID no. 12414683
  misc_feature (1)..(98): Homolog of NCBI NO: 21326119 NR Description: putative expressed protein [Sorghum bicolor]
  misc_feature (1)..(98): Homolog of NCBI NO: 18397089 NR Description: expressed protein; protein id: At3g05010.1, by cDNA: gi_15028250 [Arabidopsis thaliana]
  misc_feature (1)..(98): Homolog of NCBI NO: 12322847 NR Description: unknown protein; 15342-13483 [Arabidopsis
  misc_feature (1)..(98): Homolog of NCBI NO: 15240462 NR Description: putative protein; protein id: At5g27210.1, by cDNA: 96808., supported by cDNA: gi_14532471 [Arabidopsis
  misc_feature (1)..(98): Homolog of NCBI NO: 21618098 NR Description: unknown [Arabidopsis thaliana]
  misc_feature (1)..(98): Homolog of NCBI NO: 14532472 NR Description: AT5g27210/T21B4_120 [Arabidopsis thaliana]
  misc_feature (1)..(64): Homolog of NCBI NO: 7485300 NR Description: hypothetical protein A_TM021B04.15 - Arabidopsis >gi|2191194|gb|AAB61079.1| contains weak to the SAPB protein
MHHSRWRDRLPAKPAYYNYVCVMLLLNGISLFGCFLIASGAGFGLWLYNLTTVCYHSLYLPLLYVTFLADFFQEEDMLLENVYYSEMKDAGFFDADWD

SEQ ID NO: 12762 - DNA, 1064 bp, Zea mays subsp. mays
  misc_feature (1)..(1064): Ceres Seq. ID no. 12345171
  misc_feature: MA Experiment ID: 108523 Result: Up-regulated in Transcription
  misc_feature: MA Experiment 108523 PARAMETER Experiment Name: Zm_42deg_Heat_P Parameter: Age (day) Value: 8
  misc_feature: MA Experiment 108523 PARAMETER Experiment Name: Zm_42deg_Heat_P Parameter: Organism Value: Zea mays
  misc_feature: MA Experiment 108523 PARAMETER Experiment Name: Zm_42deg_Heat_P Parameter: Plant Line Value: 35A19
  misc_feature: MA Experiment 108523 PARAMETER Experiment Name: Zm_42deg_Heat_P Parameter: Temperature (deg C) Value: 42 vs. 22
  misc_feature: MA Experiment 108523 PARAMETER Experiment Name: Zm_42deg_Heat_P Parameter: Timepoint (hr) Value: 6
  misc_feature: MA Experiment 108523 PARAMETER Experiment Name: Zm_42deg_Heat_P Parameter: Tissue Value: Aerial
acagagcctgaaatcggctacacacacgcacacgcatacgcaggaattgaaccagccgctagtcccgcgccttttgcggccatgatcaagctgagctactccaagaggctcttcaagaggatctcctccacgtccaataagcagcaggcggccgcttccggcggcggcgacaatggcagcgcggccgcgaccggcggaggaggcgcccgggagatcgagtgggaggtgaggccgggagggatgctggtgcagaagagggacgggaggggcggccgggagacggtcgccgtcagggtttccaccggcttctcctggcatgatgtgtccatcggagccacctccacttttggggagctgaaggtgatgctgtccatggtaacagggctggagccacgggagcagaggctgctgttcaggggcaaagagaggaacgacaccgaccacctccacatggttggggtgagggacaaggacaaggtcctcctgctagaggacccggccctcaaggacatgaagctccgggctctgtcggctcgagtcgtgccggggccgtgccagtcttttatccaagtgtaacttcccgctaccgtgctaactgttaccactatacttgttagttgtgttatatcccaccaccaaggtacttttagtttctggaaagcccttttaaatatccggaatccgaagggtttgctctctaaaccactctgtctttagtgtcacttcgtggaagggtccctgaagatgagagtcagccatagtggctgtgatgtgatttggagcctacagcttgttcgctgcggcttgctgcggctgcaatccggctgcggctgcggcttctacagtatttttctctctatggattgcagctgcagcagtccaaacagctgcaacagtgtcggcttgcagccaaccgaacacgcccctagtgtctgggatgtttttttatggtccctactactactactaccaccgtggtcatttctcattcctacctacatctacatgcatgggtcatgggtaggcaactaggcatgagtgataaagattgtatgtatgtacac

SEQ ID NO: 12763 - protein, 191 aa, Zea mays subsp. mays
  peptide (1)..(191): Ceres Seq. ID no. 12345172
  misc_feature (95)..(167): Pfam Name: Ubiquitin family Pfam Description: Ubiquitin family
  misc_feature (28)..(191): Homolog of NCBI NO: 32488469 NR Description: OSJNBa0081L15.2 [Oryza sativa (japonica
  misc_feature (28)..(191): Homolog of NCBI NO: 20804881 NR Description: P0497A05.5 [Oryza sativa (japonica
  misc_feature (39)..(189): Homolog of NCBI NO: 15241381 NR Description: putative protein; protein id: At5g14360.1
  misc_feature (39)..(172): Homolog of NCBI NO: 15237460 NR Description: putative protein; protein id: At5g40630.1 thaliana] >gi|9758090|dbj|BAB08534.1| to unknown protein [Arabidopsis thaliana]
  misc_feature (58)..(117): Homolog of NCBI NO: 34907972 NR Description: P0446G04.18 [Oryza sativa (japonica
  misc_feature (117)..(175): Homolog of NCBI NO: 34907972 NR Description: P0446G04.18 [Oryza sativa (japonica
  misc_feature (55)..(173): Homolog of NCBI NO: 34898024 NR Description: ESTs AU082174(S13676),AU032395(R3986) correspond a region of the predicted gene.~Similar to Arabidopsis thaliana
  misc_feature (40)..(173): Homolog of NCBI NO: 25553557 NR Description: OSJNBa0038F22.4 [Oryza sativa (japonica
  misc_feature (57)..(175): Homolog of NCBI NO: 21537107 NR Description: unknown [Arabidopsis thaliana]
  misc_feature (57)..(175): Homolog of NCBI NO: 15240726 NR Description: putative protein; protein id: At5g07220.1, by cDNA: 12022., supported by cDNA: gi_16226482 [Arabidopsis
TEPEIGYTHAHAYAGIEPAASPAPFAAMIKLSYSKRLFKRISSTSNKQQAAASGGGDNGSAAATGGGGAREIEWEVRPGGMLVQKRDGRGGRETVAVRVSTGFSWHDVSIGATSTFGELKVMLSMVTGLEPREQRLLFRGKERNDTDHLHMVGVRDKDKVLLLEDPALKDMKLRALSARVVPGPCQSFIQV

SEQ ID NO: 12764 - protein, 164 aa, Zea mays subsp. mays
  peptide (1)..(164): Ceres Seq. ID no. 12345173
  misc_feature (68)..(140): Pfam Name: Ubiquitin family Pfam Description: Ubiquitin family
  misc_feature (1)..(164): Homolog of NCBI NO: 32488469 NR Description: OSJNBa0081L15.2 [Oryza sativa (japonica
  misc_feature (1)..(164): Homolog of NCBI NO: 20804881 NR Description: P0497A05.5 [Oryza sativa (japonica
  misc_feature (12)..(162): Homolog of NCBI NO: 15241381 NR Description: putative protein; protein id: At5g14360.1
  misc_feature (12)..(145): Homolog of NCBI NO: 15237460 NR Description: putative protein; protein id: At5g40630.1 thaliana] >gi|9758090|dbj|BAB08534.1| to unknown protein [Arabidopsis thaliana]
  misc_feature (31)..(90): Homolog of NCBI NO: 34907972 NR Description: P0446G04.18 [Oryza sativa (japonica
  misc_feature (90)..(148): Homolog of NCBI NO: 34907972 NR Description: P0446G04.18 [Oryza sativa (japonica
  misc_feature (28)..(146): Homolog of NCBI NO: 34898024 NR Description: ESTs AU082174(S13676),AU032395(R3986) correspond a region of the predicted gene.~Similar to Arabidopsis thaliana
  misc_feature (13)..(146): Homolog of NCBI NO: 25553557 NR Description: OSJNBa0038F22.4 [Oryza sativa (japonica
  misc_feature (30)..(148): Homolog of NCBI NO: 21537107 NR Description: unknown [Arabidopsis thaliana]
  misc_feature (30)..(148): Homolog of NCBI NO: 15240726 NR Description: putative protein; protein id: At5g07220.1, by cDNA: 12022., supported by cDNA: gi_16226482 [Arabidopsis
MIKLSYSKRLFKRISSTSNKQQAAASGGGDNGSAAATGGGGAREIEWEVRPGGMLVQKRDGRGGRETVAVRVSTGFSWHDVSIGATSTFGELKVMLSMVTGLEPREQRLLFRGKERNDTDHLHMVGVRDKDKVLLLEDPALKDMKLRALSARVVPGPCQSFIQV

SEQ ID NO: 12765 - protein, 111 aa, Zea mays subsp. mays
  peptide (1)..(111): Ceres Seq. ID no. 12345174
  misc_feature (15)..(87): Pfam Name: Ubiquitin family Pfam Description: Ubiquitin family
  misc_feature (1)..(111): Homolog of NCBI NO: 32488469 NR Description: OSJNBa0081L15.2 [Oryza sativa (japonica
  misc_feature (1)..(111): Homolog of NCBI NO: 20804881 NR Description: P0497A05.5 [Oryza sativa (japonica
  misc_feature (1)..(109): Homolog of NCBI NO: 15241381 NR Description: putative protein; protein id: At5g14360.1
  misc_feature (1)..(92): Homolog of NCBI NO: 15237460 NR Description: putative protein; protein id: At5g40630.1 thaliana] >gi|9758090|dbj|BAB08534.1| to unknown protein [Arabidopsis thaliana]
  misc_feature (1)..(37): Homolog of NCBI NO: 34907972 NR Description: P0446G04.18 [Oryza sativa (japonica
  misc_feature (37)..(95): Homolog of NCBI NO: 34907972 NR Description: P0446G04.18 [Oryza sativa (japonica
  misc_feature (1)..(93): Homolog of NCBI NO: 34898024 NR Description: ESTs AU082174(S13676),AU032395(R3986) correspond a region of the predicted gene.~Similar to Arabidopsis thaliana
  misc_feature (1)..(93): Homolog of NCBI NO: 25553557 NR Description: OSJNBa0038F22.4 [Oryza sativa (japonica
  misc_feature (1)..(95): Homolog of NCBI NO: 21537107 NR Description: unknown [Arabidopsis thaliana]
  misc_feature (1)..(95): Homolog of NCBI NO: 15240726 NR Description: putative protein; protein id: At5g07220.1, by cDNA: 12022., supported by cDNA: gi_16226482 [Arabidopsis
MLVQKRDGRGGRETVAVRVSTGFSWHDVSIGATSTFGELKVMLSMVTGLEPREQRLLFRGKERNDTDHLHMVGVRDKDKVLLLEDPALKDMKLRALSARVVPGPCQSFIQV

SEQ ID NO: 12766 - DNA, 1161 bp, Zea mays subsp. mays
  misc_feature (1)..(1161): Ceres Seq. ID no. 12414676
  misc_feature: MA Experiment ID: 108535 Result: Up-regulated in Transcription
  misc_feature: MA Experiment 108535 PARAMETER Experiment Name: Zm_Meristem_P Parameter: Age (day) Value: 8
  misc_feature: MA Experiment 108535 PARAMETER Experiment Name: Zm_Meristem_P Parameter: Organism Value: Zea mays
  misc_feature: MA Experiment 108535 PARAMETER Experiment Name: Zm_Meristem_P Parameter: Plant Line Value: 35A19
  misc_feature: MA Experiment 108535 PARAMETER Experiment Name: Zm_Meristem_P Parameter: Tissue Value: Root Meristem vs. Above Root Meristem
  misc_feature: MA Experiment ID: 20000487 Result: Up-regulated in Transcription
  misc_feature: MA Experiment 20000487 PARAMETER Experiment Name: Zm_50mM_NH4NO3_L_to_H_P Parameter: Organism Value: Zea mays
  misc_feature: MA Experiment 20000487 PARAMETER Experiment Name: Zm_50mM_NH4NO3_L_to_H_P Parameter: Timepoint (hr) Value: 4
  misc_feature: MA Experiment 20000487 PARAMETER Experiment Name: Zm_50mM_NH4NO3_L_to_H_P Parameter: Tissue Value: Leaves
  misc_feature: MA Experiment 20000487 PARAMETER Experiment Name: Zm_50mM_NH4NO3_L_to_H_P Parameter: Treatment Value: 50mM NH4NO3 vs. 100mM Mannitol
  misc_feature: MA Experiment ID: 20000535 Result: Up-regulated in Transcription
  misc_feature: MA Experiment 20000535 PARAMETER Experiment Name: Zm_Hybrid_Seed_Dev_P Parameter: DAP Value: 30 vs. 12
  misc_feature: MA Experiment 20000535 PARAMETER Experiment Name: Zm_Hybrid_Seed_Dev_P Parameter: Organism Value: Zea mays
  misc_feature: MA Experiment 20000535 PARAMETER Experiment Name: Zm_Hybrid_Seed_Dev_P Parameter: Plant Line Value: 35A19
  misc_feature: MA Experiment 20000535 PARAMETER Experiment Name: Zm_Hybrid_Seed_Dev_P Parameter: Tissue Value: Embryo vs. Unfert Floret
atcggacggccgcgtggctcccaggagccctatatcaccatccttgcccaccacctcctgaccctcatcacccgcgtccgccaccgccgccgcctttcgtaccgcggcccctaaacccctttcctcgttcccctccgtctctcagttaggcacaatgatgctagctaataagcttggtggtttgctcaagaatgctacgagttcaaagagttcaaatatgtctgtctaccaagcaatcagatgcatgttcatcatccaagctttttgttggagggctttcttatggaaccgatgatcaccagtctcagagacgagtttgccaaatatggacaagttattgaagctaagattatccttgatcgtgagtctgggaggtccagaggttttggctttataacttacacgtcttctgaggaggcttcggctgccatcactgccatggatggaaagactctggatggacggaacatacgggttaatcatgctaacgagaggacaggtggcttccgcagcagccgtggttatggtggtggcggctatggtggtggtggtggtggctatggtggcggtggctatggtggcggctatggtggtggtagcggtggctatggcggcggcggcagcggtgactatggtggcggcagcggtggatatggtggcaactacggcaacagggctggtggtggctatggtggtggtggtgattatggagttgcaggtggggctgaaggcagttttgctgctggaggtagcgacagctttggcagcagtaactttgctgacagtggttttggtgaaaaccctgctggtagctttggcgcaacgggtggttccagtggcgctgatgggttctctgctggcacacctggtgacggtaacaagaatgatgaaatcatggatgatctcttcaaggacgatgagcctgacagctacgccaacaagaggagctaatttgtgtccaccaccaccatgcgaggccgtgtggattctaggccatatgtattcggtagtgttttctgttaacatgataggtgtctgatgtctaaataatggaacgagtccttttgttgagtttgagttgtggaactttcaaagcgtgcgttgcatgtggcgcttgtgccggcaaacatggcatactttcatgttatattgntatttgct

SEQ ID NO: 12767 - protein, 236 aa, Zea mays subsp. mays
  peptide (1)..(236): Ceres Seq. ID no. 12414677
  misc_feature (21)..(79): Pfam Name: RNA recognition motif. (a.k.a. RRM, RBD, or RNP domain) Pfam Description: RNA recognition motif. (a.k.a. RRM, RBD, or RNP
  misc_feature (21)..(213): Homolog of NCBI NO: 15239505 NR Description: glycine-rich RNA-binding protein; protein id: supported by cDNA: gi_16974555 [Arabidopsis thaliana] contains similarity to RNA binding protein~gene_id:MAF19.4
  misc_feature (20)..(209): Homolog of NCBI NO: 15822705 NR Description: RNA-binding protein precursor [Solanum tuberosum]
  misc_feature (20)..(235): Homolog of NCBI NO: 15822703 NR Description: RNA-binding protein precursor [Nicotiana tabacum]
  misc_feature (1)..(217): Homolog of NCBI NO: 15221187 NR Description: glycine-rich RNA-binding protein; protein id:
  misc_feature (21)..(164): Homolog of NCBI NO: 10799202 NR Description: glycine-rich RNA-binding protein [Sorghum bicolor]
  misc_feature (21)..(164): Homolog of NCBI NO: 544423 NR Description: Glycine-rich RNA-binding protein 2
  misc_feature (21)..(175): Homolog of NCBI NO: 7439981 NR Description: glycine-rich RNA-binding protein GRP1 - wheat
  misc_feature (26)..(226): Homolog of NCBI NO: 33239465 NR Description: RNA-binding protein, RRM domain [Prochlorococcus
  misc_feature (86)..(214): Homolog of NCBI NO: 28374304 NR Description: similar to heterogeneous ribonuclear particle
  misc_feature (12)..(90): Homolog of NCBI NO: 28374304 NR Description: similar to heterogeneous ribonuclear particle
MHVHHPSFLLEGFLMEPMITSLRDEFAKYGQVIEAKIILDRESGRSRGFGFITYTSSEEASAAITAMDGKTLDGRNIRVNHANERTGGFRSSRGYGGGGYGGGGGGYGGGGYGGGYGGGSGGYGGGGSGDYGGGSGGYGGNYGNRAGGGYGGGGDYGVAGGAEGSFAAGGSDSFGSSNFADSGFGENPAGSFGATGGSSGADGFSAGTPGDGNKNDEIMDDLFKDDEPDSYANKRS

SEQ ID NO: 12768 - protein, 222 aa, Zea mays subsp. mays
  peptide (1)..(222): Ceres Seq. ID no. 12414678
  misc_feature (7)..(65): Pfam Name: RNA recognition motif. (a.k.a. RRM, RBD, or RNP domain) Pfam Description: RNA recognition motif. (a.k.a. RRM, RBD, or RNP
  misc_feature (7)..(199): Homolog of NCBI NO: 15239505 NR Description: glycine-rich RNA-binding protein; protein id: supported by cDNA: gi_16974555 [Arabidopsis thaliana] contains similarity to RNA binding protein~gene_id:MAF19.4
  misc_feature (6)..(195): Homolog of NCBI NO: 15822705 NR Description: RNA-binding protein precursor [Solanum tuberosum]
  misc_feature (6)..(221): Homolog of NCBI NO: 15822703 NR Description: RNA-binding protein precursor [Nicotiana tabacum]
  misc_feature (1)..(203): Homolog of NCBI NO: 15221187 NR Description: glycine-rich RNA-binding protein; protein id:
  misc_feature (7)..(150): Homolog of NCBI NO: 10799202 NR Description: glycine-rich RNA-binding protein [Sorghum bicolor]
  misc_feature (7)..(150): Homolog of NCBI NO: 544423 NR Description: Glycine-rich RNA-binding protein 2
  misc_feature (7)..(161): Homolog of NCBI NO: 7439981 NR Description: glycine-rich RNA-binding protein GRP1 - wheat
  misc_feature (12)..(212): Homolog of NCBI NO: 33239465 NR Description: RNA-binding protein, RRM domain [Prochlorococcus
  misc_feature (72)..(200): Homolog of NCBI NO: 28374304 NR Description: similar to heterogeneous ribonuclear particle
  misc_feature (1)..(76): Homolog of NCBI NO: 28374304 NR Description: similar to heterogeneous ribonuclear particle
MEPMITSLRDEFAKYGQVIEAKIILDRESGRSRGFGFITYTSSEEASAAITAMDGKTLDGRNIRVNHANERTGGFRSSRGYGGGGYGGGGGGYGGGGYGGGYGGGSGGYGGGGSGDYGGGSGGYGGNYGNRAGGGYGGGGDYGVAGGAEGSFAAGGSDSFGSSNFADSGFGENPAGSFGATGGSSGADGFSAGTPGDGNKNDEIMDDLFKDDEPDSYANKRS

SEQ ID NO: 12769 - protein, 219 aa, Zea mays subsp. mays
  peptide (1)..(219): Ceres Seq. ID no. 12414679
  misc_feature (4)..(62): Pfam Name: RNA recognition motif. (a.k.a. RRM, RBD, or RNP domain) Pfam Description: RNA recognition motif. (a.k.a. RRM, RBD, or RNP
  misc_feature (4)..(196): Homolog of NCBI NO: 15239505 NR Description: glycine-rich RNA-binding protein; protein id: supported by cDNA: gi_16974555 [Arabidopsis thaliana] contains similarity to RNA binding protein~gene_id:MAF19.4
  misc_feature (3)..(192): Homolog of NCBI NO: 15822705 NR Description: RNA-binding protein precursor [Solanum tuberosum]
  misc_feature (3)..(218): Homolog of NCBI NO: 15822703 NR Description: RNA-binding protein precursor [Nicotiana tabacum]
  misc_feature (1)..(200): Homolog of NCBI NO: 15221187 NR Description: glycine-rich RNA-binding protein; protein id:
  misc_feature (4)..(147): Homolog of NCBI NO: 10799202 NR Description: glycine-rich RNA-binding protein [Sorghum bicolor]
  misc_feature (4)..(147): Homolog of NCBI NO: 544423 NR Description: Glycine-rich RNA-binding protein 2
  misc_feature (4)..(158): Homolog of NCBI NO: 7439981 NR Description: glycine-rich RNA-binding protein GRP1 - wheat
  misc_feature (9)..(209): Homolog of NCBI NO: 33239465 NR Description: RNA-binding protein, RRM domain [Prochlorococcus
  misc_feature (69)..(197): Homolog of NCBI NO: 28374304 NR Description: similar to heterogeneous ribonuclear particle
  misc_feature (1)..(73): Homolog of NCBI NO: 28374304 NR Description: similar to heterogeneous ribonuclear particle
MITSLRDEFAKYGQVIEAKIILDRESGRSRGFGFITYTSSEEASAAITAMDGKTLDGRNIRVNHANERTGGFRSSRGYGGGGYGGGGGGYGGGGYGGGYGGGSGGYGGGGSGDYGGGSGGYGGNYGNRAGGGYGGGGDYGVAGGAEGSFAAGGSDSFGSSNFADSGFGENPAGSFGATGGSSGADGFSAGTPGDGNKNDEIMDDLFKDDEPDSYANKRS

SEQ ID NO: 12770 - DNA, 1206 bp, Zea mays subsp. mays
  misc_feature (1)..(1206): Ceres Seq. ID no. 13492266
  misc_feature: MA Experiment ID: 108527 Result: Up-regulated in Transcription
  misc_feature: MA Experiment 108527 PARAMETER Experiment Name: Zm_5mM_NO_P Parameter: Age (day) Value: 8
  misc_feature: MA Experiment 108527 PARAMETER Experiment Name: Zm_5mM_NO_P Parameter: Organism Value: Zea mays
  misc_feature: MA Experiment 108527 PARAMETER Experiment Name: Zm_5mM_NO_P Parameter: Plant Line Value: 35A19
  misc_feature: MA Experiment 108527 PARAMETER Experiment Name: Zm_5mM_NO_P Parameter: Timepoint (hr) Value: 6
  misc_feature: MA Experiment 108527 PARAMETER Experiment Name: Zm_5mM_NO_P Parameter: Tissue Value: Aerial
  misc_feature: MA Experiment 108527 PARAMETER Experiment Name: Zm_5mM_NO_P Parameter: Treatment Value: 5mM NO vs. No Treatment
  misc_feature: MA Experiment ID: 108543 Result: Up-regulated in Transcription
aaaagagagagggggaggtcgacgagacagagagagaaggccaagaggcttcctctccccattcctcccttccgtgccctagccgagccagccgcgaggaaggaggcatcccgccgtctcgcctggcgcccgcccgtcggccgaccttctgccgcagcttccaattgtaaaaagatcatagatttttgtgcaagagcgagtggatatggaaccatcccctcagcctatgggtgtcgctgccggtgggtcacaagtgtatcctgcctctgcctatccgcctgcagcaacagtagctcctgcttctgttgtatctgctggtttacagtcagggcagccattcccagccaatcctggtcatatgagtgctcagcaccagattgtctaccaacaagctcaacaattccaccaacagctccagcagcaacaacaacagcagcttcagcagttctgggttgaacgcatgactgaaattgaggcgacgactgatttcaagaaccacaacttgccacttgcgaggataaagaagatcatgaaggccgatgaagatgttcgcatgatctcagctgaagctcctgtagtctttgcaaaagcttgtgagatattcatactggagctgacacttaggtcgtggatgcacactgaggagaacaagcgccgcaccttgcaaaagaatgacattgcagcagcgatcactaggactgacatttatgacttcttggtcgacattgttcccagggatgagatgaaggaggacggaattgggcttcctagggctggtctgccacccatgggagccccagctgatgcatatccatactactacatgccacagcagcaggtgcctggttctggaatggtttatggtgcccagcaagggcacccagtgacttatttgtggcaggagcctcagcaacagcaggagcaagctcctgaagagcagcaatctgcatgaaagtggctgagaatattgctcagaagctatcacctgattcagagttctcattttaggttgtccaaactgcaggttttcttagtaatatcgttggttatcaaactgaaacaggcgattctaagtagggtgtagcatcatggtagtttcatttctgcttgtgatgttagttgaaaggataatgattagtggctagtggattaaagttaccataccatttccttctattccgaaagtttgcctccatgaggcctctg

SEQ ID NO: 12771 - protein, 248 aa, Zea mays subsp. mays
  peptide (1)..(248): Ceres Seq. ID no. 13492267
  misc_feature (44)..(226): Homolog of NCBI NO: 15223482 NR Description: transcription factor Hap5a, putative [Arabidopsis >gi|18252953|gb|AAL62403.1| transcription factor, putative thaliana] >gi|21389649|gb|AAM48023.1| putative transcription
  misc_feature (44)..(226): Homolog of NCBI NO: 21554704 NR Description: transcription factor, putative [Arabidopsis
  misc_feature (31)..(244): Homolog of NCBI NO: 15223986 NR Description: transcription factor Hap5a, putative [Arabidopsis >gi|30680893|ref|NP_849619.1| transcription factor Hap5a, [Arabidopsis thaliana] >gi|21553992|gb|AAM63073.1| putative
  misc_feature (65)..(244): Homolog of NCBI NO: 25372763 NR Description: hypothetical protein [imported] - Arabidopsis
  misc_feature (31)..(244): Homolog of NCBI NO: 6289057 NR Description: heme activated protein [Arabidopsis thaliana]
  misc_feature (65)..(245): Homolog of NCBI NO: 15221912 NR Description: transcription factor Hap5a, putative [Arabidopsis >gi|30695834|ref|NP_849808.1| transcription factor Hap5a, [Arabidopsis thaliana] >gi|3776575|gb|AAC64892.1| Similar to
  misc_feature (24)..(236): Homolog of NCBI NO: 15242784 NR Description: transcription factor Hap5a, putative [Arabidopsis
  misc_feature (67)..(236): Homolog of NCBI NO: 15228405 NR Description: transcription factor Hap5a, putative [Arabidopsis
  misc_feature (86)..(226): Homolog of NCBI NO: 25404100 NR Description: transcription factor [imported] - Arabidopsis >gi|6056368|gb|AAF02832.1|AC009894_3 transcription factor hap5b thaliana] >gi|12321740|gb|AAG50900.1|AC069159_1 transcription
  misc_feature (86)..(210): Homolog of NCBI NO: 2398533 NR Description: Transcription factor [Arabidopsis thaliana]
MEPSPQPMGVAAGGSQVYPASAYPPAATVAPASVVSAGLQSGQPFPANPGHMSAQHQIVYQQAQQFHQQLQQQQQQQLQQFWVERMTEIEATTDFKNHNLPLARIKKIMKADEDVRMISAEAPVVFAKACEIFILELTLRSWMHTEENKRRTLQKNDIAAAITRTDIYDFLVDIVPRDEMKEDGIGLPRAGLPPMGAPADAYPYYYMPQQQVPGSGMVYGAQQGHPVTYLWQEPQQQQEQAPEEQQSA

SEQ ID NO: 12772 - protein, 241 aa, Zea mays subsp. mays
  peptide (1)..(241): Ceres Seq. ID no. 13492268
  misc_feature (79)..(219): Homolog of NCBI NO: 25404100 NR Description: transcription factor [imported] - Arabidopsis >gi|6056368|gb|AAF02832.1|AC009894_3 transcription factor hap5b thaliana] >gi|12321740|gb|AAG50900.1|AC069159_1 transcription
  misc_feature (79)..(203): Homolog of NCBI NO: 2398533 NR Description: Transcription factor [Arabidopsis thaliana]
  misc_feature (37)..(219): Homolog of NCBI NO: 15223482 NR Description: transcription factor Hap5a, putative [Arabidopsis >gi|18252953|gb|AAL62403.1| transcription factor, putative thaliana] >gi|21389649|gb|AAM48023.1| putative transcription
  misc_feature (37)..(219): Homolog of NCBI NO: 21554704 NR Description: transcription factor, putative [Arabidopsis
  misc_feature (24)..(237): Homolog of NCBI NO: 15223986 NR Description: transcription factor Hap5a, putative [Arabidopsis >gi|30680893|ref|NP_849619.1| transcription factor Hap5a, [Arabidopsis thaliana] >gi|21553992|gb|AAM63073.1| putative
  misc_feature (58)..(237): Homolog of NCBI NO: 25372763 NR Description: hypothetical protein [imported] - Arabidopsis
  misc_feature (24)..(237): Homolog of NCBI NO: 6289057 NR Description: heme activated protein [Arabidopsis thaliana]
  misc_feature (58)..(238): Homolog of NCBI NO: 15221912 NR Description: transcription factor Hap5a, putative [Arabidopsis >gi|30695834|ref|NP_849808.1| transcription factor Hap5a, [Arabidopsis thaliana] >gi|3776575|gb|AAC64892.1| Similar to
  misc_feature (17)..(229): Homolog of NCBI NO: 15242784 NR Description: transcription factor Hap5a, putative [Arabidopsis
  misc_feature (60)..(229): Homolog of NCBI NO: 15228405 NR Description: transcription factor Hap5a, putative [Arabidopsis
MGVAAGGSQVYPASAYPPAATVAPASVVSAGLQSGQPFPANPGHMSAQHQIVYQQAQQFHQQLQQQQQQQLQQFWVERMTEIEATTDFKNHNLPLARIKKIMKADEDVRMISAEAPVVFAKACEIFILELTLRSWMHTEENKRRTLQKNDIAAAITRTDIYDFLVDIVPRDEMKEDGIGLPRAGLPPMGAPADAYPYYYMPQQQVPGSGMVYGAQQGHPVTYLWQEPQQQQEQAPEEQQSA

SEQ ID NO: 12773 - protein, 197 aa, Zea mays subsp. mays
  peptide (1)..(197): Ceres Seq. ID no. 13492269
  misc_feature (1)..(175): Homolog of NCBI NO: 15223482 NR Description: transcription factor Hap5a, putative [Arabidopsis >gi|18252953|gb|AAL62403.1| transcription factor, putative thaliana] >gi|21389649|gb|AAM48023.1| putative transcription
  misc_feature (1)..(175): Homolog of NCBI NO: 21554704 NR Description: transcription factor, putative [Arabidopsis
  misc_feature (1)..(193): Homolog of NCBI NO: 15223986 NR Description: transcription factor Hap5a, putative [Arabidopsis >gi|30680893|ref|NP_849619.1| transcription factor Hap5a, [Arabidopsis thaliana] >gi|21553992|gb|AAM63073.1| putative
  misc_feature (14)..(193): Homolog of NCBI NO: 25372763 NR Description: hypothetical protein [imported] - Arabidopsis
  misc_feature (1)..(193): Homolog of NCBI NO: 6289057 NR Description: heme activated protein [Arabidopsis thaliana]
  misc_feature (14)..(194): Homolog of NCBI NO: 15221912 NR Description: transcription factor Hap5a, putative [Arabidopsis >gi|30695834|ref|NP_849808.1| transcription factor Hap5a, [Arabidopsis thaliana] >gi|3776575|gb|AAC64892.1| Similar to
  misc_feature (1)..(185): Homolog of NCBI NO: 15242784 NR Description: transcription factor Hap5a, putative [Arabidopsis
  misc_feature (16)..(185): Homolog of NCBI NO: 15228405 NR Description: transcription factor Hap5a, putative [Arabidopsis
  misc_feature (35)..(175): Homolog of NCBI NO: 25404100 NR Description: transcription factor [imported] - Arabidopsis >gi|6056368|gb|AAF02832.1|AC009894_3 transcription factor hap5b thaliana] >gi|12321740|gb|AAG50900.1|AC069159_1 transcription
  misc_feature (35)..(159): Homolog of NCBI NO: 2398533 NR Description: Transcription factor [Arabidopsis thaliana]
MSAQHQIVYQQAQQFHQQLQQQQQQQLQQFWVERMTEIEATTDFKNHNLPLARIKKIMKADEDVRMISAEAPVVFAKACEIFILELTLRSWMHTEENKRRTLQKNDIAAAITRTDIYDFLVDIVPRDEMKEDGIGLPRAGLPPMGAPADAYPYYYMPQQQVPGSGMVYGAQQGHPVTYLWQEPQQQQEQAPEEQQSA

SEQ ID NO: 12774 - DNA, 2031 bp, Zea mays subsp. mays; identical to SEQ ID NO: 1960
  misc_feature (1)..(2031): Ceres Seq. ID no. 12348893
  misc_feature: MA Experiment ID: 108527 Result: Up-regulated in Transcription
  misc_feature: MA Experiment 108527 PARAMETER Experiment Name: Zm_5mM_NO_P Parameter: Age (day) Value: 8
  misc_feature: MA Experiment 108527 PARAMETER Experiment Name: Zm_5mM_NO_P Parameter: Organism Value: Zea mays
  misc_feature: MA Experiment 108527 PARAMETER Experiment Name: Zm_5mM_NO_P Parameter: Plant Line Value: 35A19
  misc_feature: MA Experiment 108527 PARAMETER Experiment Name: Zm_5mM_NO_P Parameter: Timepoint (hr) Value: 6
  misc_feature: MA Experiment 108527 PARAMETER Experiment Name: Zm_5mM_NO_P Parameter: Tissue Value: Aerial
  misc_feature: MA Experiment 108527 PARAMETER Experiment Name: Zm_5mM_NO_P Parameter: Treatment Value: 5mM NO vs. No Treatment
  misc_feature: MA Experiment ID: 108534 Result: Up-regulated in Transcription
  misc_feature: MA Experiment 108534 PARAMETER Experiment Name: Zm_4deg_Cold_P Parameter: Age (hr) Value: 8
  misc_feature: MA Experiment 108534 PARAMETER Experiment Name: Zm_4deg_Cold_P Parameter: Organism Value: Zea mays
  misc_feature: MA Experiment 108534 PARAMETER Experiment Name: Zm_4deg_Cold_P Parameter: Plant Line Value: 35A19
  misc_feature: MA Experiment 108534 PARAMETER Experiment Name: Zm_4deg_Cold_P Parameter: Temperature (deg C) Value: 4 vs. 22
  misc_feature: MA Experiment 108534 PARAMETER Experiment Name: Zm_4deg_Cold_P Parameter: Timepoint (hr) Value: 6
  misc_feature: MA Experiment 108534 PARAMETER Experiment Name: Zm_4deg_Cold_P Parameter: Tissue Value: Aerial
  misc_feature: MA Experiment ID: 108544 Result: Up-regulated in Transcription
  misc_feature: MA Experiment ID: 108545 Result: Down-regulated in Transcription
  misc_feature: MA Experiment 108545 PARAMETER Experiment Name: Zm_Imbibed_Seeds_P Parameter: Age (day) Value: 3 vs. 2
  misc_feature: MA Experiment 108545 PARAMETER Experiment Name: Zm_Imbibed_Seeds_P Parameter: Organism Value: Zea mays
  misc_feature: MA Experiment 108545 PARAMETER Experiment Name: Zm_Imbibed_Seeds_P Parameter: Plant Line Value: 35A19
  misc_feature: MA Experiment 108545 PARAMETER Experiment Name: Zm_Imbibed_Seeds_P Parameter: Tissue Value: Aerial vs. Embryo
  misc_feature: MA Experiment ID: 108547 Result: Down-regulated in Transcription
  misc_feature: MA Experiment 108547 PARAMETER Experiment Name: Zm_Imbibed_Seeds_P Parameter: Age (day) Value: 4 vs. 2
  misc_feature: MA Experiment 108547 PARAMETER Experiment Name: Zm_Imbibed_Seeds_P Parameter: Organism Value: Zea mays
  misc_feature: MA Experiment 108547 PARAMETER Experiment Name: Zm_Imbibed_Seeds_P Parameter: Plant Line Value: 35A19
  misc_feature: MA Experiment 108547 PARAMETER Experiment Name: Zm_Imbibed_Seeds_P Parameter: Tissue Value: Aerial vs. Embryo
  misc_feature: MA Experiment ID: 108559 Result: Up-regulated in Transcription
  misc_feature: MA Experiment 108559 PARAMETER Experiment Name: Zm_5mM_NO_P Parameter: Age (day) Value: 8
  misc_feature: MA Experiment 108559 PARAMETER Experiment Name: Zm_5mM_NO_P Parameter: Organism Value: Zea mays
  misc_feature: MA Experiment 108559 PARAMETER Experiment Name: Zm_5mM_NO_P Parameter: Plant Line Value: 35A19
  misc_feature: MA Experiment 108559 PARAMETER Experiment Name: Zm_5mM_NO_P Parameter: Timepoint (hr) Value: 12
  misc_feature: MA Experiment 108559 PARAMETER Experiment Name: Zm_5mM_NO_P Parameter: Tissue Value: Aerial
  misc_feature: MA Experiment 108559 PARAMETER Experiment Name: Zm_5mM_NO_P Parameter: Treatment Value: 5mM NO vs. No Treatment
  misc_feature: MA Experiment ID: 108688 Result: Down-regulated in Transcription
  misc_feature: MA Experiment 108688 PARAMETER Experiment Name: Zm_Embryos-Flowers__P Parameter: Tissue Value: Immature Flowers vs. Aerial+
  misc_feature: MA Experiment ID: 20000626 Result: Up-regulated in Transcription
  misc_feature: MA Experiment 20000626 PARAMETER Experiment Name: Zm_Herbicide-Treatments_P Parameter: Timepoint (hr) Value: 12
  misc_feature: MA Experiment 20000626 PARAMETER Experiment Name: Zm_Herbicide-Treatments_P Parameter: Tissue Value: Aerial
  misc_feature: MA Experiment 20000626 PARAMETER Experiment Name: Zm_Herbicide-Treatments_P Parameter: Treatment Value: Roundup vs. No Treatment

SEQ ID NO: 12775 - protein, 393 aa, Zea mays subsp. mays; identical to SEQ ID NO: 1961
  peptide (1)..(393): Ceres Seq. ID no. 12348894
  misc_feature (13)..(346): Pfam Name: Adenosylmethionine decarboxylase Pfam Description: Adenosylmethionine decarboxylase
  misc_feature (1)..(382): Homolog of NCBI NO: 3913427 NR Description: S-adenosylmethionine decarboxylase proenzyme
  misc_feature (1)..(378): Homolog of NCBI NO: 19855056 NR Description: S-adenosylmethionine decarboxylase proenzyme
  misc_feature (1)..(378): Homolog of NCBI NO: 3929545 NR Description: S-adenosylmethionine decarboxylase [Oryza sativa]
  misc_feature (9)..(390): Homolog of NCBI NO: 3913438 NR Description: S-adenosylmethionine decarboxylase proenzyme
  misc_feature (9)..(378): Homolog of NCBI NO: 4325045 NR Description: S-adenosylmethionine decarboxylase precursor
  misc_feature (1)..(378): Homolog of NCBI NO: 7436593 NR Description: adenosylmethionine decarboxylase homolog
  misc_feature (1)..(370): Homolog of NCBI NO: 6646868 NR Description: S-adenosylmethionine decarboxylase 2 [Oryza
  misc_feature (1)..(278): Homolog of NCBI NO: 10241685 NR Description: S-adenosylmethionine decarboxylase [Oryza sativa
  misc_feature (13)..(363): Homolog of NCBI NO: 28566348 NR Description: S-adenosylmethionine decarboxylase [Narcissus
  misc_feature (9)..(359): Homolog of NCBI NO: 31980105 NR Description: S-adenosylmethionine decarboxylase proenzyme

SEQ ID NO: 12776 - protein, 281 aa, Zea mays subsp. mays; identical to SEQ ID NO: 1962
  peptide (1)..(281): Ceres Seq. ID no. 12348895
  misc_feature (1)..(234): Pfam Name: Adenosylmethionine decarboxylase Pfam Description: Adenosylmethionine decarboxylase
  misc_feature (1)..(270): Homolog of NCBI NO: 3913427 NR Description: S-adenosylmethionine decarboxylase proenzyme
  misc_feature (1)..(266): Homolog of NCBI NO: 19855056 NR Description: S-adenosylmethionine decarboxylase proenzyme
  misc_feature (1)..(266): Homolog of NCBI NO: 3929545 NR Description: S-adenosylmethionine decarboxylase [Oryza sativa]
  misc_feature (1)..(278): Homolog of NCBI NO: 3913438 NR Description: S-adenosylmethionine decarboxylase proenzyme
  misc_feature (1)..(266): Homolog of NCBI NO: 4325045 NR Description: S-adenosylmethionine decarboxylase precursor
  misc_feature (1)..(266): Homolog of NCBI NO: 7436593 NR Description: adenosylmethionine decarboxylase homolog
  misc_feature (1)..(258): Homolog of NCBI NO: 6646868 NR Description: S-adenosylmethionine decarboxylase 2 [Oryza
  misc_feature (1)..(166): Homolog of NCBI NO: 10241685 NR Description: S-adenosylmethionine decarboxylase [Oryza sativa
  misc_feature (1)..(251): Homolog of NCBI NO: 28566348 NR Description: S-adenosylmethionine decarboxylase [Narcissus
  misc_feature (1)..(247): Homolog of NCBI NO: 31980105 NR Description: S-adenosylmethionine decarboxylase proenzyme

SEQ ID NO: 12777 - protein, 210 aa, Zea mays subsp. mays; identical to SEQ ID NO: 1963
  peptide (1)..(210): Ceres Seq. ID no. 12348896
  misc_feature (1)..(163): Pfam Name: Adenosylmethionine decarboxylase Pfam Description: Adenosylmethionine decarboxylase
  misc_feature (1)..(199): Homolog of NCBI NO: 3913427 NR Description: S-adenosylmethionine decarboxylase proenzyme
  misc_feature (1)..(195): Homolog of NCBI NO: 19855056 NR Description: S-adenosylmethionine decarboxylase proenzyme
  misc_feature (1)..(195): Homolog of NCBI NO: 3929545 NR Description: S-adenosylmethionine decarboxylase [Oryza sativa]
  misc_feature (1)..(207): Homolog of NCBI NO: 3913438 NR Description: S-adenosylmethionine decarboxylase proenzyme
  misc_feature (1)..(195): Homolog of NCBI NO: 4325045 NR Description: S-adenosylmethionine decarboxylase precursor
  misc_feature (1)..(195): Homolog of NCBI NO: 7436593 NR Description: adenosylmethionine decarboxylase homolog
  misc_feature (1)..(187): Homolog of NCBI NO: 6646868 NR Description: S-adenosylmethionine decarboxylase 2 [Oryza
  misc_feature (1)..(95): Homolog of NCBI NO: 10241685 NR Description: S-adenosylmethionine decarboxylase [Oryza sativa
  misc_feature (1)..(180): Homolog of NCBI NO: 28566348 NR Description: S-adenosylmethionine decarboxylase [Narcissus
  misc_feature (1)..(176): Homolog of NCBI NO: 31980105 NR Description: S-adenosylmethionine decarboxylase proenzyme

SEQ ID NO: 12778 - DNA, 902 bp, Zea mays subsp. mays; identical to SEQ ID NO: 8007
  misc_feature (1)..(902): Ceres Seq. ID no. 12341316
  misc_feature: MA Experiment ID: 108534 Result: Down-regulated in Transcription
  misc_feature: MA Experiment 108534 PARAMETER Experiment Name: Zm_4deg_Cold_P Parameter: Age (hr) Value: 8
  misc_feature: MA Experiment 108534 PARAMETER Experiment Name: Zm_4deg_Cold_P Parameter: Organism Value: Zea mays
  misc_feature: MA Experiment 108534 PARAMETER Experiment Name: Zm_4deg_Cold_P Parameter: Plant Line Value: 35A19
  misc_feature: MA Experiment 108534 PARAMETER Experiment Name: Zm_4deg_Cold_P Parameter: Temperature (deg C) Value: 4 vs. 22
  misc_feature: MA Experiment 108534 PARAMETER Experiment Name: Zm_4deg_Cold_P Parameter: Timepoint (hr) Value: 6
  misc_feature: MA Experiment 108534 PARAMETER Experiment Name: Zm_4deg_Cold_P Parameter: Tissue Value: Aerial

SEQ ID NO: 12779 - protein, 213 aa, Zea mays subsp. mays; identical to SEQ ID NO: 8008
  peptide (1)..(213): Ceres Seq. ID no. 12341317
  misc_feature (29)..(204): Homolog of NCBI NO: 34393473 NR Description: bifunctional phosphopantetheine adenylyl
  misc_feature (40)..(204): Homolog of NCBI NO: 15224138 NR Description: hypothetical protein; protein id: At2g18250.1
  misc_feature (43)..(194): Homolog of NCBI NO: 25143409 NR Description: Cytidylyltransferase and Dephospho-CoA kinase kD) [Caenorhabditis elegans] >gi|25167211|gb|AAK29952.3|
  misc_feature (31)..(194): Homolog of NCBI NO: 39589394 NR Description: Hypothetical protein CBG22156 [Caenorhabditis
  misc_feature (1)..(193): Homolog of NCBI NO: 31213039 NR Description: ENSANGP00000014315 [Anopheles gambiae]
  misc_feature (56)..(205): Homolog of NCBI NO: 6321716 NR Description: Protein required for cell viability; Ygr277cp cerevisiae] >gi|1723781|sp|P53332|YG5T_YEAST HYPOTHETICAL 34.3 KD
  misc_feature (51)..(193): Homolog of NCBI NO: 20094940 NR Description: Predicted nucleotidyltransferase of the HIGH [Methanopyrus kandleri AV19] >gi|19888182|gb|AAM02717.1| nucleotidyltransferase of the HIGH superfamily [Methanopyrus
  misc_feature (40)..(193): Homolog of NCBI NO: 24658602 NR Description: CG10575-PA [Drosophila melanogaster]
  misc_feature (56)..(194): Homolog of NCBI NO: 20465246 NR Description: bifunctional phosphopantetheine adenylyl
  misc_feature (51)..(194): Homolog of NCBI NO: 27229125 NR Description: CoA synthase; 4'-phosphopantetheine
  misc_feature (29)..(204): Homolog of NCBI NO: 34393473 NR Description: bifunctional phosphopantetheine adenylyl
  misc_feature (40)..(204): Homolog of NCBI NO: 15224138 NR Description: hypothetical protein; protein id: At2g18250.1
  misc_feature (43)..(194): Homolog of NCBI NO: 25143409 NR Description: Cytidylyltransferase and Dephospho-CoA kinase kD) [Caenorhabditis elegans] >gi|25167211|gb|AAK29952.3|
  misc_feature (31)..(194): Homolog of NCBI NO: 39589394 NR Description: Hypothetical protein CBG22156 [Caenorhabditis
  misc_feature (1)..(193): Homolog of NCBI NO: 31213039 NR Description: ENSANGP00000014315 [Anopheles gambiae]
  misc_feature (56)..(205): Homolog of NCBI NO: 6321716 NR Description: Protein required for cell viability; Ygr277cp cerevisiae] >gi|1723781|sp|P53332|YG5T_YEAST HYPOTHETICAL 34.3 KD
  misc_feature (51)..(193): Homolog of NCBI NO: 20094940 NR Description: Predicted nucleotidyltransferase of the HIGH [Methanopyrus kandleri AV19] >gi|19888182|gb|AAM02717.1| nucleotidyltransferase of the HIGH superfamily [Methanopyrus
  misc_feature (40)..(193): Homolog of NCBI NO: 24658602 NR Description: CG10575-PA [Drosophila melanogaster]
  misc_feature (56)..(194): Homolog of NCBI NO: 20465246 NR Description: bifunctional phosphopantetheine adenylyl
  misc_feature (51)..(194): Homolog of NCBI NO: 27229125 NR Description: CoA synthase; 4'-phosphopantetheine

SEQ ID NO: 12780 - protein, 188 aa, Zea mays subsp. mays; identical to SEQ ID NO: 8009
  peptide (1)..(188): Ceres Seq. ID no. 12341318
  misc_feature (4)..(179): Homolog of NCBI NO: 34393473 NR Description: bifunctional phosphopantetheine adenylyl
  misc_feature (15)..(179): Homolog of NCBI NO: 15224138 NR Description: hypothetical protein; protein id: At2g18250.1
  misc_feature (18)..(169): Homolog of NCBI NO: 25143409 NR Description: Cytidylyltransferase and Dephospho-CoA kinase kD) [Caenorhabditis elegans] >gi|25167211|gb|AAK29952.3|
  misc_feature (6)..(169): Homolog of NCBI NO: 39589394 NR Description: Hypothetical protein CBG22156 [Caenorhabditis
  misc_feature (1)..(168): Homolog of NCBI NO: 31213039 NR Description: ENSANGP00000014315 [Anopheles gambiae]
  misc_feature (31)..(180): Homolog of NCBI NO: 6321716 NR Description: Protein required for cell viability; Ygr277cp cerevisiae] >gi|1723781|sp|P53332|YG5T_YEAST HYPOTHETICAL 34.3 KD
  misc_feature (26)..(168): Homolog of NCBI NO: 20094940 NR Description: Predicted nucleotidyltransferase of the HIGH [Methanopyrus kandleri AV19] >gi|19888182|gb|AAM02717.1| nucleotidyltransferase of the HIGH superfamily [Methanopyrus
  misc_feature (15)..(168): Homolog of NCBI NO: 24658602 NR Description: CG10575-PA [Drosophila melanogaster]
  misc_feature (31)..(169): Homolog of NCBI NO: 20465246 NR Description: bifunctional phosphopantetheine adenylyl
  misc_feature (26)..(169): Homolog of NCBI NO: 27229125 NR Description: CoA synthase; 4'-phosphopantetheine
  misc_feature (4)..(179): Homolog of NCBI NO: 34393473 NR Description: bifunctional phosphopantetheine adenylyl
  misc_feature (15)..(179): Homolog of NCBI NO: 15224138 NR Description: hypothetical protein; protein id: At2g18250.1
  misc_feature (18)..(169): Homolog of NCBI NO: 25143409 NR Description: Cytidylyltransferase and Dephospho-CoA kinase kD) [Caenorhabditis elegans] >gi|25167211|gb|AAK29952.3|
  misc_feature (6)..(169): Homolog of NCBI NO: 39589394 NR Description: Hypothetical protein CBG22156 [Caenorhabditis
  misc_feature (1)..(168): Homolog of NCBI NO: 31213039 NR Description: ENSANGP00000014315 [Anopheles gambiae]
  misc_feature (31)..(180): Homolog of NCBI NO: 6321716 NR Description: Protein required for cell viability; Ygr277cp cerevisiae] >gi|1723781|sp|P53332|YG5T_YEAST HYPOTHETICAL 34.3 KD
  misc_feature (26)..(168): Homolog of NCBI NO: 20094940 NR Description: Predicted nucleotidyltransferase of the HIGH [Methanopyrus kandleri AV19] >gi|19888182|gb|AAM02717.1| nucleotidyltransferase of the HIGH superfamily [Methanopyrus
  misc_feature (15)..(168): Homolog of NCBI NO: 24658602 NR Description: CG10575-PA [Drosophila melanogaster]
  misc_feature (31)..(169): Homolog of NCBI NO: 20465246 NR Description: bifunctional phosphopantetheine adenylyl
  misc_feature (26)..(169): Homolog of NCBI NO: 27229125 NR Description: CoA synthase; 4'-phosphopantetheine

SEQ ID NO: 12781 - protein, 123 aa, Zea mays subsp. mays; identical to SEQ ID NO: 8010
  peptide (1)..(123): Ceres Seq. ID no. 12341319
  misc_feature (1)..(114): Homolog of NCBI NO: 34393473 NR Description: bifunctional phosphopantetheine adenylyl
  misc_feature (1)..(114): Homolog of NCBI NO: 15224138 NR Description: hypothetical protein; protein id: At2g18250.1
  misc_feature (1)..(104): Homolog of NCBI NO: 25143409 NR Description: Cytidylyltransferase and Dephospho-CoA kinase kD) [Caenorhabditis elegans] >gi|25167211|gb|AAK29952.3|
  misc_feature (1)..(104): Homolog of NCBI NO: 39589394 NR Description: Hypothetical protein CBG22156 [Caenorhabditis
  misc_feature (1)..(103): Homolog of NCBI NO: 31213039 NR Description: ENSANGP00000014315 [Anopheles gambiae]
  misc_feature (1)..(115): Homolog of NCBI NO: 6321716 NR Description: Protein required for cell viability; Ygr277cp cerevisiae] >gi|1723781|sp|P53332|YG5T_YEAST HYPOTHETICAL 34.3 KD
  misc_feature (1)..(103): Homolog of NCBI NO: 20094940 NR Description: Predicted nucleotidyltransferase of the HIGH [Methanopyrus kandleri AV19] >gi|19888182|gb|AAM02717.1| nucleotidyltransferase of the HIGH superfamily [Methanopyrus
  misc_feature (1)..(103): Homolog of NCBI NO: 24658602 NR Description: CG10575-PA [Drosophila melanogaster]
  misc_feature (1)..(104): Homolog of NCBI NO: 20465246 NR Description: bifunctional phosphopantetheine adenylyl
  misc_feature (1)..(104): Homolog of NCBI NO: 27229125 NR Description: CoA synthase; 4'-phosphopantetheine
  misc_feature (1)..(114): Homolog of NCBI NO: 34393473 NR Description: bifunctional phosphopantetheine adenylyl
  misc_feature (1)..(114): Homolog of NCBI NO: 15224138 NR Description: hypothetical protein; protein id: At2g18250.1
  misc_feature (1)..(104): Homolog of NCBI NO: 25143409 NR Description: Cytidylyltransferase and Dephospho-CoA kinase kD) [Caenorhabditis elegans] >gi|25167211|gb|AAK29952.3|
  misc_feature (1)..(104): Homolog of NCBI NO: 39589394 NR Description: Hypothetical protein CBG22156 [Caenorhabditis
  misc_feature (1)..(103): Homolog of NCBI NO: 31213039 NR Description: ENSANGP00000014315 [Anopheles gambiae]
  misc_feature (1)..(115): Homolog of NCBI NO: 6321716 NR Description: Protein required for cell viability; Ygr277cp cerevisiae] >gi|1723781|sp|P53332|YG5T_YEAST HYPOTHETICAL 34.3 KD
  misc_feature (1)..(103): Homolog of NCBI NO: 20094940 NR Description: Predicted nucleotidyltransferase of the HIGH [Methanopyrus kandleri AV19] >gi|19888182|gb|AAM02717.1| nucleotidyltransferase of the HIGH superfamily [Methanopyrus
  misc_feature (1)..(103): Homolog of NCBI NO: 24658602 NR Description: CG10575-PA [Drosophila melanogaster]
  misc_feature (1)..(104): Homolog of NCBI NO: 20465246 NR Description: bifunctional phosphopantetheine adenylyl
  misc_feature (1)..(104): Homolog of NCBI NO: 27229125 NR Description: CoA synthase; 4'-phosphopantetheine

SEQ ID NO: 12782 - DNA, 960 bp, Zea mays subsp. mays
  misc_feature (1)..(960): Ceres Seq. ID no. 12344622
  misc_feature: MA Experiment ID: 108522 Result: Down-regulated in Transcription
  misc_feature: MA Experiment 108522 PARAMETER Experiment Name: Zm_42deg_Heat_P Parameter: Age (day) Value: 8
  misc_feature: MA Experiment 108522 PARAMETER Experiment Name: Zm_42deg_Heat_P Parameter: Organism Value: Zea mays
  misc_feature: MA Experiment 108522 PARAMETER Experiment Name: Zm_42deg_Heat_P Parameter: Plant Line Value: 35A19
  misc_feature: MA Experiment 108522 PARAMETER Experiment Name: Zm_42deg_Heat_P Parameter: Temperature (deg C) Value: 42 vs. 22
  misc_feature: MA Experiment 108522 PARAMETER Experiment Name: Zm_42deg_Heat_P Parameter: Timepoint (hr) Value: 1
  misc_feature: MA Experiment 108522 PARAMETER Experiment Name: Zm_42deg_Heat_P Parameter: Tissue Value: Aerial
  misc_feature: MA Experiment ID: 20000534 Result: Down-regulated in Transcription
  misc_feature: MA Experiment 20000534 PARAMETER Experiment Name: Zm_Hybrid_Pollen_P Parameter: Age (day) Value: 8
  misc_feature: MA Experiment 20000534 PARAMETER Experiment Name: Zm_Hybrid_Pollen_P Parameter: Organism Value: Zea mays
  misc_feature: MA Experiment 20000534 PARAMETER Experiment Name: Zm_Hybrid_Pollen_P Parameter: Plant Line Value: 35A19
  misc_feature: MA Experiment 20000534 PARAMETER Experiment Name: Zm_Hybrid_Pollen_P Parameter: Tissue Value: Pollen vs. Aerial
gactgccatcttcttccgcttctaacttccgttccgcaaattgaaagctcggcgttgccctgcctcgagctcgaaggactgtccctatacgtcgttgtccagctcctcgcatattgtggcctggtgcagattggagatccgcccggacttggatcgagtcctcctgtctttggacattcattggagtgctccattcattaggcagcatgcctaagataaagacaagccgtgtcaagtatcctgaaggatgggagcttattgaaccaacaatccgtgagttggatgccaaaatgagagaagctgaaaatgatccacatgatgggaagagaaagtgtgaagctctctggcctattttccgcatttctcatcaaaggagccgctacatatacgatctttactacagaaggaaggagatatcacaggagctttatgagttctgcctagaccagggttatgcagaccgtaacctgattgcaaagtggaaaaagccaggttacgagcgcctttgctgcctccggtgcatacagacacgtgaccacaacttcgcaacgacctgcgtctgccgcgtccccaagcatctgagggaggagcaggtgatagaatgtgtccactgcggctgcaggggttgtgccagcggtgactaatcttgtcatcatgtcgttcggctcacgagtcacgactcaccatcgcaaccttaaccggatgaggtgccctgctgtgaacatggatccggctgcggtgattagcattagtttattgggtaaactagtatggggaggactaaatttcctcacgtttggatgtttctaactgttatgtactactatgacgctctctcgtgtcacaattgcttgcgttaaattagtggcgcttttgcattttattgagtctgttaattggctactgttgtgggttctaacaatattaaattttatattttatatttttcaacgatttttc

SEQ ID NO: 12783 - protein, 145 aa, Zea mays subsp. mays
  peptide (1)..(145): Ceres Seq. ID no. 12344623
  misc_feature (1)..(143): Pfam Name: G10 protein Pfam Description: G10 protein
  misc_feature (1)..(145): Homolog of NCBI NO: 34908438 NR Description: putative G10 protein [Oryza sativa (japonica group)] >gi|15290013|dbj|BAB63707.1| putative G10 protein [Oryza
  misc_feature (1)..(145): Homolog of NCBI NO: 15233517 NR Description: G10 - like protein; protein id: At4g21110.1, by cDNA: gi_15294271 [Arabidopsis thaliana]
  misc_feature (1)..(145): Homolog of NCBI NO: 5852181 NR Description: zhb0011.1 [Oryza sativa (indica cultivar-group)]
  misc_feature (1)..(144): Homolog of NCBI NO: 544359 NR Description: G10 PROTEIN HOMOLOG >gi|7489496|pir||T03790
  misc_feature (1)..(142): Homolog of NCBI NO: 15029378 NR Description: G10 protein [Branchiostoma belcheri]
  misc_feature (2)..(142): Homolog of NCBI NO: 15128111 NR Description: G10-like protein [Branchiostoma belcheri]
  misc_feature (1)..(142): Homolog of NCBI NO: 120625 NR Description: G10 PROTEIN >gi|85772|pir||S05955 G10 protein -
  misc_feature (1)..(142): Homolog of NCBI NO: 32171175 NR Description: maternal G10 transcript [Homo sapiens]
  misc_feature (1)..(142): Homolog of NCBI NO: 31207407 NR Description: ENSANGP00000020650 [Anopheles gambiae]
  misc_feature (1)..(140): Homolog of NCBI NO: 16758328 NR Description: maternal G10 transcript [Rattus norvegicus]
MPKIKTSRVKYPEGWELIEPTIRELDAKMREAENDPHDGKRKCEALWPIFRISHQRSRYIYDLYYRRKEISQELYEFCLDQGYADRNLIAKWKKPGYERLCCLRCIQTRDHNFATTCVCRVPKHLREEQVIECVHCGCRGCASGD

SEQ ID NO: 12784 - protein, 117 aa, Zea mays subsp. mays
  peptide (1)..(117): Ceres Seq. ID no. 12344624
  misc_feature (1)..(115): Pfam Name: G10 protein Pfam Description: G10 protein
  misc_feature (1)..(117): Homolog of NCBI NO: 34908438 NR Description: putative G10 protein [Oryza sativa (japonica group)] >gi|15290013|dbj|BAB63707.1| putative G10 protein [Oryza
  misc_feature (1)..(117): Homolog of NCBI NO: 15233517 NR Description: G10 - like protein; protein id: At4g21110.1, by cDNA: gi_15294271 [Arabidopsis thaliana]
  misc_feature (1)..(117): Homolog of NCBI NO: 5852181 NR Description: zhb0011.1 [Oryza sativa (indica cultivar-group)]
  misc_feature (1)..(116): Homolog of NCBI NO: 544359 NR Description: G10 PROTEIN HOMOLOG >gi|7489496|pir||T03790
  misc_feature (1)..(114): Homolog of NCBI NO: 15029378 NR Description: G10 protein [Branchiostoma belcheri]
  misc_feature (1)..(114): Homolog of NCBI NO: 15128111 NR Description: G10-like protein [Branchiostoma belcheri]
  misc_feature (1)..(114): Homolog of NCBI NO: 120625 NR Description: G10 PROTEIN >gi|85772|pir||S05955 G10 protein -
  misc_feature (1)..(114): Homolog of NCBI NO: 32171175 NR Description: maternal G10 transcript [Homo sapiens]
  misc_feature (1)..(114): Homolog of NCBI NO: 31207407 NR Description: ENSANGP00000020650 [Anopheles gambiae]
  misc_feature (1)..(112): Homolog of NCBI NO: 16758328 NR Description: maternal G10 transcript [Rattus norvegicus]
MREAENDPHDGKRKCEALWPIFRISHQRSRYIYDLYYRRKEISQELYEFCLDQGYADRNLIAKWKKPGYERLCCLRCIQTRDHNFATTCVCRVPKHLREEQVIECVHCGCRGCASGD

SEQ ID NO: 12785 - DNA, 2419 bp, Zea mays subsp. mays
  misc_feature (1)..(2419): Ceres Seq. ID no. 12358117
  misc_feature: MA Experiment ID: 108528 Result: Up-regulated in Transcription
  misc_feature: MA Experiment 108528 PARAMETER Experiment Name: Zm_Imbibed_Seeds_P Parameter: Age (day) Value: 5 vs. 2
  misc_feature: MA Experiment 108528 PARAMETER Experiment Name: Zm_Imbibed_Seeds_P Parameter: Organism Value: Zea mays
  misc_feature: MA Experiment 108528 PARAMETER Experiment Name: Zm_Imbibed_Seeds_P Parameter: Plant Line Value: 35A19
  misc_feature: MA Experiment 108528 PARAMETER Experiment Name: Zm_Imbibed_Seeds_P Parameter: Tissue Value: Aerial vs. Embryo
  misc_feature: MA Experiment ID: 108530 Result: Up-regulated in Transcription
  misc_feature: MA Experiment 108530 PARAMETER Experiment Name: Zm_Imbibed_Seeds_P Parameter: Age (day) Value: 6 vs. 2
  misc_feature: MA Experiment 108530 PARAMETER Experiment Name: Zm_Imbibed_Seeds_P Parameter: Organism Value: Zea mays
  misc_feature: MA Experiment 108530 PARAMETER Experiment Name: Zm_Imbibed_Seeds_P Parameter: Plant Line Value: 35A19
  misc_feature: MA Experiment 108530 PARAMETER Experiment Name: Zm_Imbibed_Seeds_P Parameter: Tissue Value: Aerial vs. Embryo
  misc_feature: MA Experiment ID: 108545 Result: Up-regulated in Transcription
  misc_feature: MA Experiment 108545 PARAMETER Experiment Name: Zm_Imbibed_Seeds_P Parameter: Age (day) Value: 3 vs. 2
  misc_feature: MA Experiment 108545 PARAMETER Experiment Name: Zm_Imbibed_Seeds_P Parameter: Organism Value: Zea mays
  misc_feature: MA Experiment 108545 PARAMETER Experiment Name: Zm_Imbibed_Seeds_P Parameter: Plant Line Value: 35A19
  misc_feature: MA Experiment 108545 PARAMETER Experiment Name: Zm_Imbibed_Seeds_P Parameter: Tissue Value: Aerial vs. Embryo
  misc_feature: MA Experiment ID: 108547 Result: Up-regulated in Transcription
  misc_feature: MA Experiment 108547 PARAMETER Experiment Name: Zm_Imbibed_Seeds_P Parameter: Age (day) Value: 4 vs. 2
  misc_feature: MA Experiment 108547 PARAMETER Experiment Name: Zm_Imbibed_Seeds_P Parameter: Organism Value: Zea mays
  misc_feature: MA Experiment 108547 PARAMETER Experiment Name: Zm_Imbibed_Seeds_P Parameter: Plant Line Value: 35A19
  misc_feature: MA Experiment 108547 PARAMETER Experiment Name: Zm_Imbibed_Seeds_P Parameter: Tissue Value: Aerial vs. Embryo
  misc_feature: MA Experiment ID: 20000108 Result: Down-regulated in Transcription
  misc_feature: MA Experiment 20000108 PARAMETER Experiment Name: Zm_Root-Tips_P Parameter: Age (day) Value: 12
  misc_feature: MA Experiment 20000108 PARAMETER Experiment Name: Zm_Root-Tips_P Parameter: Organism Value: Zea mays
  misc_feature: MA Experiment 20000108 PARAMETER Experiment Name: Zm_Root-Tips_P Parameter: Tissue Value: Root tips vs. Root mid region    35
  misc_feature: MA Experiment 20000108 PARAMETER Experiment Name: Zm_Root-Tips_P Parameter: Tissue Value: Root tips vs. Root mid region   Sequence Listing-Misc Features (4)
  misc_feature: MA Experiment ID: 20000492 Result: Down-regulated in Transcription
  misc_feature: MA Experiment 20000492 PARAMETER Experiment Name: Zm_Hybrid_Seed_Dev_P Parameter: DAP Value: 12
  misc_feature: MA Experiment 20000492 PARAMETER Experiment Name: Zm_Hybrid_Seed_Dev_P Parameter: Organism Value: Zea mays
  misc_feature: MA Experiment 20000492 PARAMETER Experiment Name: Zm_Hybrid_Seed_Dev_P Parameter: Plant Line Value: 35A19
  misc_feature: MA Experiment 20000492 PARAMETER Experiment Name: Zm_Hybrid_Seed_Dev_P Parameter: Tissue Value: Fert Kernel vs. Unfert Floret
atgtgggctcatctcttccttatcgacgctgtggccgcccagccgcccacgttgcctcctccctgagacaatccccacgccaccgcgcaccggagacgaacctgaggagagaaaaatctgcgcccgtcagtgtgctcgcctacttctacgctccgctcgttcccccaaatagttcctcggcttcgctcccttcccctccctgctccggctccggtttgcacacagtaagaaaagatggcgctgccatccatgagtcttgcggcaaagggtgtgcttcccttctcagcacgtacctcgagtggtgtcacacaaaggccggtgtcagtgaccgcttccttggagcacaaaaccagcgatgccagaaggaagttcctaaaacttgcgcttgggaaccttggagttggactgcccaccttgttgggcgctaagaaagctctcgctgatgagcaaggcgtctcgtcctcgaggatgtcttattcgaggttccttgagtatcttgacaaggatagagtgaagaaggttgatttgtttgagaatgggacaattgctattgtggaggccatttctcctgagcttggtaaccgcatgcaaagagtccgtgtgcagcttcctggtctaagccaggagcttcttcagaagttgagggagaagaacatcgattttgctgctcacagcaaccaggaagactctggttctcttctgttcaaccttattggaaatttggcattcccgcttatccttatcggtggtctgtttttactttcaagaagggcacagggtggcctcggtggacccaatggtcctggctttccccttggttttggtcaatctagggccaagtttcagatggaacccaacactggtgttacatttgatgatgttgctggtgtcgatgaagcgaagcaagacttcatggaagtggttgagttcttgaagaaacccgaaaggttcactgctgttggtgctcgcattcctaagggtgttctgcttgtcggtcctcctgggacgggtaaaactttgcttgccaaggcaattgcaggagaggctggcgtgccatttttctcaatttcaggttctgagtttgtggagatgtttgttggtgttggagcttccagagttcgtgaccttttcaagaaggccaaggagaatgctccttgcatagtgtttgttgatgaaattgatgctgttggaaggcaaagaggtacaggtattggtggtggaaatgatgaaagggagcagactctcaatcaactactaactgagatggatggtttcgagggcaacactggaattattgttattgctgccactaaccgggctgacatcttggattccgctttacttagacctgggcgttttgatagacaggtgtctgtcgacgttcctgatgtacgtggaaggacagagattctaaaagtgcatggtagcaacaagaagtttgattctgatgtttctcttgatgtcatagcaatgagaacacctgggttcagcggagcagacttggcaaaccttctgaatgaagcagccattctggctggaagacggggaaggacagcaatttcttcaaaagagattgatgattctattgacagaattgtagctggtatggaagggactgtgatgacagactggaagagcaaaagtcttgttgcttaccatgaagttgggcatgcaatttgcggaactttgacgcctggccatgatcctgtccaaaaggttaccttagttccaaggggtcaagctcgtggtcttacatggtttatcccgatggatgacccaacactcatctccaggcagcaactttttgccagaattgttggcggccttggtggtagagctgctgaggaggtcatatttggagagcctgaggtgaccactggagctgctggtgacttgcagcaaattactggcttagccaagcagatggttgtgacattcggtatgtctgaaattggtccatggtctctgatggagggtggagcgcagagtggggacgtcatcatgagaatgatggcaaggaactccatgtcagagaagctcgcggaggacattgattcggccgtgaagcagttgtcggatgaggcctacgagatcgctttgaggcacattagaaacaacagggaggccattgacaaaatcgttgaggtgctcattgagaaggagacagtgaccggagacgagttccgggcgatcctttctgagtttgccgagatccctgttgagaaccgggttcccccagccacaccggcggccgcgctcccagcctaaaccctagccttgtaggggaggattttcttgttgtatggtgttcatattttggattcttggtgtacactaactctactaaatctgccggattttcggtacacgacatgtaagatgtaacttactcatggtgaattaatagtaaaatgtaatt

SEQ ID NO: 12786 - protein, 677 aa, Zea mays subsp. mays
  peptide (1)..(677): Ceres Seq. ID no. 12358118
  misc_feature (442)..(653): Pfam Name: Peptidase family M41 Pfam Description: Peptidase family M41
  misc_feature (16)..(674): Homolog of NCBI NO: 4325041 NR Description: FtsH-like protein Pftf precursor [Nicotiana
  misc_feature (13)..(674): Homolog of NCBI NO: 3808101 NR Description: chloroplast protease [Capsicum annuum]
  misc_feature (1)..(657): Homolog of NCBI NO: 6692685 NR Description: F12K11.22 [Arabidopsis thaliana]
  misc_feature (3)..(662): Homolog of NCBI NO: 18417611 NR Description: FtsH protease, putative; protein id: At5g15250.1
  misc_feature (179)..(677): Homolog of NCBI NO: 21954076 NR Description: putative FtsH protease [Arabidopsis thaliana]
  misc_feature (74)..(664): Homolog of NCBI NO: 11465793 NR Description: ORF25 [Porphyra purpurea] Cell division protein ftsH homolog >gi|2147534|pir||S73248
  misc_feature (72)..(661): Homolog of NCBI NO: 11467752 NR Description: hypothetical chloroplast RF25 [Guillardia theta] Cell division protein ftsH homolog >gi|3603077|gb|AAC35738.1|
  misc_feature (72)..(668): Homolog of NCBI NO: 23123765 NR Description: hypothetical protein [Nostoc punctiforme]
  misc_feature (70)..(668): Homolog of NCBI NO: 37522147 NR Description: cell division protein [Gloeobacter violaceus]
  misc_feature (78)..(659): Homolog of NCBI NO: 16329797 NR Description: cell division protein; FtsH [Synechocystis sp.
MALPSMSLAAKGVLPFSARTSSGVTQRPVSVTASLEHKTSDARRKFLKLALGNLGVGLPTLLGAKKALADEQGVSSSRMSYSRFLEYLDKDRVKKVDLFENGTIAIVEAISPELGNRMQRVRVQLPGLSQELLQKLREKNIDFAAHSNQEDSGSLLFNLIGNLAFPLILIGGLFLLSRRAQGGLGGPNGPGFPLGFGQSRAKFQMEPNTGVTFDDVAGVDEAKQDFMEVVEFLKKPERFTAVGARIPKGVLLVGPPGTGKTLLAKAIAGEAGVPFFSISGSEFVEMFVGVGASRVRDLFKKAKENAPCIVFVDEIDAVGRQRGTGIGGGNDEREQTLNQLLTEMDGFEGNTGIIVIAATNRADILDSALLRPGRFDRQVSVDVPDVRGRTEILKVHGSNKKFDSDVSLDVIAMRTPGFSGADLANLLNEAAILAGRRGRTAISSKEIDDSIDRIVAGMEGTVMTDWKSKSLVAYHEVGHAICGTLTPGHDPVQKVTLVPRGQARGLTWFIPMDDPTLISRQQLFARIVGGLGGRAAEEVIFGEPEVTTGAAGDLQQITGLAKQMVVTFGMSEIGPWSLMEGGAQSGDVIMRMMARNSMSEKLAEDIDSAVKQLSDEAYEIALRHIRNNREAIDKIVEVLIEKETVTGDEFRAILSEFAEIPVENRVPPATPAAALPA

SEQ ID NO: 12787 - protein, 672 aa, Zea mays subsp. mays
  peptide (1)..(672): Ceres Seq. ID no. 12358119
  misc_feature (437)..(648): Pfam Name: Peptidase family M41 Pfam Description: Peptidase family M41
  misc_feature (11)..(669): Homolog of NCBI NO: 4325041 NR Description: FtsH-like protein Pftf precursor [Nicotiana
  misc_feature (8)..(669): Homolog of NCBI NO: 3808101 NR Description: chloroplast protease [Capsicum annuum]
  misc_feature (1)..(652): Homolog of NCBI NO: 6692685 NR Description: F12K11.22 [Arabidopsis thaliana]
  misc_feature (1)..(657): Homolog of NCBI NO: 18417611 NR Description: FtsH protease, putative; protein id: At5g15250.1
  misc_feature (174)..(672): Homolog of NCBI NO: 21954076 NR Description: putative FtsH protease [Arabidopsis thaliana]
  misc_feature (69)..(659): Homolog of NCBI NO: 11465793 NR Description: ORF25 [Porphyra purpurea] Cell division protein ftsH homolog >gi|2147534|pir||S73248
  misc_feature (67)..(656): Homolog of NCBI NO: 11467752 NR Description: hypothetical chloroplast RF25 [Guillardia theta] Cell division protein ftsH homolog >gi|3603077|gb|AAC35738.1|
  misc_feature (67)..(663): Homolog of NCBI NO: 23123765 NR Description: hypothetical protein [Nostoc punctiforme]
  misc_feature (65)..(663): Homolog of NCBI NO: 37522147 NR Description: cell division protein [Gloeobacter violaceus]
  misc_feature (73)..(654): Homolog of NCBI NO: 16329797 NR Description: cell division protein; FtsH [Synechocystis sp.
MSLAAKGVLPFSARTSSGVTQRPVSVTASLEHKTSDARRKFLKLALGNLGVGLPTLLGAKKALADEQGVSSSRMSYSRFLEYLDKDRVKKVDLFENGTIAIVEAISPELGNRMQRVRVQLPGLSQELLQKLREKNIDFAAHSNQEDSGSLLFNLIGNLAFPLILIGGLFLLSRRAQGGLGGPNGPGFPLGFGQSRAKFQMEPNTGVTFDDVAGVDEAKQDFMEVVEFLKKPERFTAVGARIPKGVLLVGPPGTGKTLLAKAIAGEAGVPFFSISGSEFVEMFVGVGASRVRDLFKKAKENAPCIVFVDEIDAVGRQRGTGIGGGNDEREQTLNQLLTEMDGFEGNTGIIVIAATNRADILDSALLRPGRFDRQVSVDVPDVRGRTEILKVHGSNKKFDSDVSLDVIAMRTPGFSGADLANLLNEAAILAGRRGRTAISSKEIDDSIDRIVAGMEGTVMTDWKSKSLVAYHEVGHAICGTLTPGHDPVQKVTLVPRGQARGLTWFIPMDDPTLISRQQLFARIVGGLGGRAAEEVIFGEPEVTTGAAGDLQQITGLAKQMVVTFGMSEIGPWSLMEGGAQSGDVIMRMMARNSMSEKLAEDIDSAVKQLSDEAYEIALRHIRNNREAIDKIVEVLIEKETVTGDEFRAILSEFAEIPVENRVPPATPAAALPA

SEQ ID NO: 12788 - protein, 599 aa, Zea mays subsp. mays
  peptide (1)..(599): Ceres Seq. ID no. 12358120
  misc_feature (364)..(575): Pfam Name: Peptidase family M41 Pfam Description: Peptidase family M41
  misc_feature (1)..(586): Homolog of NCBI NO: 11465793 NR Description: ORF25 [Porphyra purpurea] Cell division protein ftsH homolog >gi|2147534|pir||S73248
  misc_feature (1)..(583): Homolog of NCBI NO: 11467752 NR Description: hypothetical chloroplast RF25 [Guillardia theta] Cell division protein ftsH homolog >gi|3603077|gb|AAC35738.1|
  misc_feature (1)..(590): Homolog of NCBI NO: 23123765 NR Description: hypothetical protein [Nostoc punctiforme]
  misc_feature (1)..(596): Homolog of NCBI NO: 3808101 NR Description: chloroplast protease [Capsicum annuum]
  misc_feature (1)..(584): Homolog of NCBI NO: 18417611 NR Description: FtsH protease, putative; protein id: At5g15250.1
  misc_feature (101)..(599): Homolog of NCBI NO: 21954076 NR Description: putative FtsH protease [Arabidopsis thaliana]
  misc_feature (1)..(579): Homolog of NCBI NO: 6692685 NR Description: F12K11.22 [Arabidopsis thaliana]
  misc_feature (1)..(596): Homolog of NCBI NO: 4325041 NR Description: FtsH-like protein Pftf precursor [Nicotiana
  misc_feature (1)..(590): Homolog of NCBI NO: 37522147 NR Description: cell division protein [Gloeobacter violaceus]
  misc_feature (1)..(581): Homolog of NCBI NO: 16329797 NR Description: cell division protein; FtsH [Synechocystis sp.
MSYSRFLEYLDKDRVKKVDLFENGTIAIVEAISPELGNRMQRVRVQLPGLSQELLQKLREKNIDFAAHSNQEDSGSLLFNLIGNLAFPLILIGGLFLLSRRAQGGLGGPNGPGFPLGFGQSRAKFQMEPNTGVTFDDVAGVDEAKQDFMEVVEFLKKPERFTAVGARIPKGVLLVGPPGTGKTLLAKAIAGEAGVPFFSISGSEFVEMFVGVGASRVRDLFKKAKENAPCIVFVDEIDAVGRQRGTGIGGGNDEREQTLNQLLTEMDGFEGNTGIIVIAATNRADILDSALLRPGRFDRQVSVDVPDVRGRTEILKVHGSNKKFDSDVSLDVIAMRTPGFSGADLANLLNEAAILAGRRGRTAISSKEIDDSIDRIVAGMEGTVMTDWKSKSLVAYHEVGHAICGTLTPGHDPVQKVTLVPRGQARGLTWFIPMDDPTLISRQQLFARIVGGLGGRAAEEVIFGEPEVTTGAAGDLQQITGLAKQMVVTFGMSEIGPWSLMEGGAQSGDVIMRMMARNSMSEKLAEDIDSAVKQLSDEAYEIALRHIRNNREAIDKIVEVLIEKETVTGDEFRAILSEFAEIPVENRVPPATPAAALPA

SEQ ID NO: 12789 - DNA, 1984 bp, Zea mays subsp. mays
  misc_feature (1)..(1984): Ceres Seq. ID no. 12365052
  misc_feature: MA Experiment ID: 108530 Result: Down-regulated in Transcription
  misc_feature: MA Experiment 108530 PARAMETER Experiment Name: Zm_Imbibed_Seeds_P Parameter: Age (day) Value: 6 vs. 2
  misc_feature: MA Experiment 108530 PARAMETER Experiment Name: Zm_Imbibed_Seeds_P Parameter: Organism Value: Zea mays
  misc_feature: MA Experiment 108530 PARAMETER Experiment Name: Zm_Imbibed_Seeds_P Parameter: Plant Line Value: 35A19
  misc_feature: MA Experiment 108530 PARAMETER Experiment Name: Zm_Imbibed_Seeds_P Parameter: Tissue Value: Aerial vs. Embryo
  misc_feature: MA Experiment ID: 108535 Result: Up-regulated in Transcription
  misc_feature: MA Experiment 108535 PARAMETER Experiment Name: Zm_Meristem_P Parameter: Age (day) Value: 8
  misc_feature: MA Experiment 108535 PARAMETER Experiment Name: Zm_Meristem_P Parameter: Organism Value: Zea mays
  misc_feature: MA Experiment 108535 PARAMETER Experiment Name: Zm_Meristem_P Parameter: Plant Line Value: 35A19
  misc_feature: MA Experiment 108535 PARAMETER Experiment Name: Zm_Meristem_P Parameter: Tissue Value: Root Meristem vs. Above Root Meristem
  misc_feature: MA Experiment ID: 108544 Result: Down-regulated in Transcription
  misc_feature: MA Experiment ID: 20000108 Result: Up-regulated in Transcription
  misc_feature: MA Experiment 20000108 PARAMETER Experiment Name: Zm_Root-Tips_P Parameter: Age (day) Value: 12
  misc_feature: MA Experiment 20000108 PARAMETER Experiment Name: Zm_Root-Tips_P Parameter: Organism Value: Zea mays
  misc_feature: MA Experiment 20000108 PARAMETER Experiment Name: Zm_Root-Tips_P Parameter: Tissue Value: Root tips vs. Root mid region    35
  misc_feature: MA Experiment 20000108 PARAMETER Experiment Name: Zm_Root-Tips_P Parameter: Tissue Value: Root tips vs. Root mid region   Sequence Listing-Misc Features (4)
  misc_feature: MA Experiment ID: 20000488 Result: Up-regulated in Transcription
  misc_feature: MA Experiment 20000488 PARAMETER Experiment Name: Zm_50mM_NH4NO3_L_to_H_P Parameter: Organism Value: Zea mays
  misc_feature: MA Experiment 20000488 PARAMETER Experiment Name: Zm_50mM_NH4NO3_L_to_H_P Parameter: Timepoint (hr) Value: 8
  misc_feature: MA Experiment 20000488 PARAMETER Experiment Name: Zm_50mM_NH4NO3_L_to_H_P Parameter: Tissue Value: Leaves
  misc_feature: MA Experiment 20000488 PARAMETER Experiment Name: Zm_50mM_NH4NO3_L_to_H_P Parameter: Treatment Value: 50mM NH4NO3 vs. 100mM Mannitol
  misc_feature: MA Experiment ID: 20000535 Result: Up-regulated in Transcription
  misc_feature: MA Experiment 20000535 PARAMETER Experiment Name: Zm_Hybrid_Seed_Dev_P Parameter: DAP Value: 30 vs. 12
  misc_feature: MA Experiment 20000535 PARAMETER Experiment Name: Zm_Hybrid_Seed_Dev_P Parameter: Organism Value: Zea mays
  misc_feature: MA Experiment 20000535 PARAMETER Experiment Name: Zm_Hybrid_Seed_Dev_P Parameter: Plant Line Value: 35A19
  misc_feature: MA Experiment 20000535 PARAMETER Experiment Name: Zm_Hybrid_Seed_Dev_P Parameter: Tissue Value: Embryo vs. Unfert Floret
  misc_feature: MA Experiment ID: 20001606 Result: Up-regulated in Transcription
  misc_feature: MA Experiment 20001606 PARAMETER Experiment Name: Zm_50ppm_KNO3_L-to-H_P Parameter: Age (day) Value: 19
  misc_feature: MA Experiment 20001606 PARAMETER Experiment Name: Zm_50ppm_KNO3_L-to-H_P Parameter: Organism Value: Zea mays
  misc_feature: MA Experiment 20001606 PARAMETER Experiment Name: Zm_50ppm_KNO3_L-to-H_P Parameter: Plant Line Value: 35A19
  misc_feature: MA Experiment 20001606 PARAMETER Experiment Name: Zm_50ppm_KNO3_L-to-H_P Parameter: Timepoint (hr) Value: 8
  misc_feature: MA Experiment 20001606 PARAMETER Experiment Name: Zm_50ppm_KNO3_L-to-H_P Parameter: Tissue Value: Shoots
  misc_feature: MA Experiment 20001606 PARAMETER Experiment Name: Zm_50ppm_KNO3_L-to-H_P Parameter: Treatment Value: 50ppm KNO3 vs. 50ppm KCl
atccacaccccggtcggctagtcccaaggctgctgccgccgcctgctgctaggggatcgcttgctttcctcggaccactctgccgaccacatctacaccgcatcaacggtccttccaagtgagctccaatcccctgtctgtagatggagagggtgctcaaggatgacgccgtcgaggagaagggcgagcgcgccaggatggcatcgtttgttggggccatggcaatctcggatttggtgaagaccacattgggcccaaaaggaatggacaagatcctgcaatcaactggcagaggacgtaatgttactgttacaaatgatggggctaccattttgaagtcacttcacattgacaatcctgctgcaaaggtccttgttgacatctcaaaagttcaagatgatgaagttggtgatgggacaacttctgttgttgttctagctggagaacttttgaaggaggctgagaagttaattaacatgaaaattcatccaatgactattattgcaggttacagaatggctctcgagtgtgccagagattctttgctaaaaaagaccatggacaacaaagaaaatacagataaattcagatctgatctcatgaatattgctatgactactcttagttcaaaaatactttcccaagacaaggagtacttcgctgaacttgcggttgatgctgtcttgaggcttaagggtagcaccaacttggaatctattcaaattctgaagaaacctggaggatctcttaaggattcctttttggacgaagggttcattcttgacaagaaaattggcattgggcagcccaaacgcattgagaatgccaaaattttggttgcaaacactgctatggacacagataaagttaagatatatggagcacgggtccgggtggattcaatgtctaaggttgcagatattgaagctgctgagaagcagaaaatgagagagaaagtccaaaagatcatagcacacgggatcaactgttttgtcaacaggcagttaatctataacttccctgaggaactctttgctgacgctggcatacttgcaattgagcatgctgactttgagggcattgaacggctggctcttgttactggtggtgagatcgcatcaacttttgataatccagagtctgttaagcttggtcactgcaaggtcattgaagagattatgattggggaggacaggctaatccatttctctggggttgcgatggggcaggcttgcaccattgtcctaaggggggctagtgagcatgtgctcgatgaggctgagaggtccttgcatgatgccttgtgcgtgttgtcccagacggtaaatgatacccgtgtcttgtttggaggcggatggcctgagatggtgatggccaaagaagtggatgaacttgcaaggaagacccctgggaagaaatcccatgctatcgatgctttctcacatgctctgcaagccatcccaacaatcatagctgacaatgctggtttggatagcgctgatttgatctctcagctacgagctgagcaccacaaagagaactccactgctggaattgatgtcatcacaggcactgttggggacatgcaaaagctagggattcaagagtcgttcaaggtgaagcaggccattcttctgtctgcaacagaggctgcggagatgatcctcagggtcgatgagatcataacctgtgccccgcgcagaagagaggataggatgtgatattacacgctgtttctcgatgtagcgggatgctcattaccctagttttgaggggtattatggtttaggggcgctcaagttggtcagatttcgagtgtttttggcccctaagcaactggtacttgttatttggttgaaacaatcagccttaggtttgtgttctacattctcatgctgtaccgtttggtagcgagttacgtcgtacgatatgcttgttccatattgtttttctattccttttaacgtaagaatgggcttgtctt

SEQ ID NO: 12790 - protein, 525 aa, Zea mays subsp. mays
  peptide (1)..(525): Ceres Seq. ID no. 12365053
  misc_feature (28)..(518): Pfam Name: TCP-1/cpn60 chaperonin family Pfam Description: TCP-1/cpn60 chaperonin family
  misc_feature (1)..(525): Homolog of NCBI NO: 15242093 NR Description: T-complex protein 1, beta subunit; protein id: supported by cDNA: 12972., supported by cDNA: gi_15809885, by cDNA: gi_17065149 [Arabidopsis thaliana]
  misc_feature (4)..(521): Homolog of NCBI NO: 27503862 NR Description: Similar to chaperonin subunit 2 (beta) [Xenopus
  misc_feature (4)..(521): Homolog of NCBI NO: 5453603 NR Description: chaperonin containing TCP1, subunit 2 (beta);
  misc_feature (4)..(521): Homolog of NCBI NO: 22654291 NR Description: T-complex protein 1, beta subunit (TCP-1-beta)
  misc_feature (4)..(521): Homolog of NCBI NO: 6671700 NR Description: chaperonin subunit 2 (beta) [Mus musculus]
  misc_feature (3)..(522): Homolog of NCBI NO: 17066722 NR Description: CCT chaperonin beta subunit [Physarum
  misc_feature (4)..(500): Homolog of NCBI NO: 21105454 NR Description: chaperonin-containing TCP-1 complex beta chain
  misc_feature (3)..(524): Homolog of NCBI NO: 18858175 NR Description: CG7033-PA [Drosophila melanogaster]
  misc_feature (3)..(524): Homolog of NCBI NO: 24640724 NR Description: CG7033-PB [Drosophila melanogaster]
  misc_feature (1)..(523): Homolog of NCBI NO: 27769226 NR Description: Similar to chaperonin subunit 7 (eta) [Xenopus
MERVLKDDAVEEKGERARMASFVGAMAISDLVKTTLGPKGMDKILQSTGRGRNVTVTNDGATILKSLHIDNPAAKVLVDISKVQDDEVGDGTTSVVVLAGELLKEAEKLINMKIHPMTIIAGYRMALECARDSLLKKTMDNKENTDKFRSDLMNIAMTTLSSKILSQDKEYFAELAVDAVLRLKGSTNLESIQILKKPGGSLKDSFLDEGFILDKKIGIGQPKRIENAKILVANTAMDTDKVKIYGARVRVDSMSKVADIEAAEKQKMREKVQKIIAHGINCFVNRQLIYNFPEELFADAGILAIEHADFEGIERLALVTGGEIASTFDNPESVKLGHCKVIEEIMIGEDRLIHFSGVAMGQACTIVLRGASEHVLDEAERSLHDALCVLSQTVNDTRVLFGGGWPEMVMAKEVDELARKTPGKKSHAIDAFSHALQAIPTIIADNAGLDSADLISQLRAEHHKENSTAGIDVITGTVGDMQKLGIQESFKVKQAILLSATEAAEMILRVDEIITCAPRRREDRM

SEQ ID NO: 12791 - protein, 507 aa, Zea mays subsp. mays
  peptide (1)..(507): Ceres Seq. ID no. 12365054
  misc_feature (10)..(500): Pfam Name: TCP-1/cpn60 chaperonin family Pfam Description: TCP-1/cpn60 chaperonin family
  misc_feature (1)..(507): Homolog of NCBI NO: 15242093 NR Description: T-complex protein 1, beta subunit; protein id: supported by cDNA: 12972., supported by cDNA: gi_15809885, by cDNA: gi_17065149 [Arabidopsis thaliana]
  misc_feature (1)..(503): Homolog of NCBI NO: 27503862 NR Description: Similar to chaperonin subunit 2 (beta) [Xenopus
  misc_feature (1)..(503): Homolog of NCBI NO: 5453603 NR Description: chaperonin containing TCP1, subunit 2 (beta);
  misc_feature (1)..(503): Homolog of NCBI NO: 22654291 NR Description: T-complex protein 1, beta subunit (TCP-1-beta)
  misc_feature (1)..(503): Homolog of NCBI NO: 6671700 NR Description: chaperonin subunit 2 (beta) [Mus musculus]
  misc_feature (1)..(504): Homolog of NCBI NO: 17066722 NR Description: CCT chaperonin beta subunit [Physarum
  misc_feature (1)..(482): Homolog of NCBI NO: 21105454 NR Description: chaperonin-containing TCP-1 complex beta chain
  misc_feature (1)..(506): Homolog of NCBI NO: 18858175 NR Description: CG7033-PA [Drosophila melanogaster]
  misc_feature (1)..(506): Homolog of NCBI NO: 24640724 NR Description: CG7033-PB [Drosophila melanogaster]
  misc_feature (1)..(505): Homolog of NCBI NO: 27769226 NR Description: Similar to chaperonin subunit 7 (eta) [Xenopus
MASFVGAMAISDLVKTTLGPKGMDKILQSTGRGRNVTVTNDGATILKSLHIDNPAAKVLVDISKVQDDEVGDGTTSVVVLAGELLKEAEKLINMKIHPMTIIAGYRMALECARDSLLKKTMDNKENTDKFRSDLMNIAMTTLSSKILSQDKEYFAELAVDAVLRLKGSTNLESIQILKKPGGSLKDSFLDEGFILDKKIGIGQPKRIENAKILVANTAMDTDKVKIYGARVRVDSMSKVADIEAAEKQKMREKVQKIIAHGINCFVNRQLIYNFPEELFADAGILAIEHADFEGIERLALVTGGEIASTFDNPESVKLGHCKVIEEIMIGEDRLIHFSGVAMGQACTIVLRGASEHVLDEAERSLHDALCVLSQTVNDTRVLFGGGWPEMVMAKEVDELARKTPGKKSHAIDAFSHALQAIPTIIADNAGLDSADLISQLRAEHHKENSTAGIDVITGTVGDMQKLGIQESFKVKQAILLSATEAAEMILRVDEIITCAPRRREDRM

SEQ ID NO: 12792 - protein, 500 aa, Zea mays subsp. mays
  peptide (1)..(500): Ceres Seq. ID no. 12365055
  misc_feature (3)..(493): Pfam Name: TCP-1/cpn60 chaperonin family Pfam Description: TCP-1/cpn60 chaperonin family
  misc_feature (1)..(500): Homolog of NCBI NO: 15242093 NR Description: T-complex protein 1, beta subunit; protein id: supported by cDNA: 12972., supported by cDNA: gi_15809885, by cDNA: gi_17065149 [Arabidopsis thaliana]
  misc_feature (1)..(496): Homolog of NCBI NO: 27503862 NR Description: Similar to chaperonin subunit 2 (beta) [Xenopus
  misc_feature (1)..(496): Homolog of NCBI NO: 5453603 NR Description: chaperonin containing TCP1, subunit 2 (beta);
  misc_feature (1)..(496): Homolog of NCBI NO: 22654291 NR Description: T-complex protein 1, beta subunit (TCP-1-beta)
  misc_feature (1)..(496): Homolog of NCBI NO: 6671700 NR Description: chaperonin subunit 2 (beta) [Mus musculus]
  misc_feature (1)..(497): Homolog of NCBI NO: 17066722 NR Description: CCT chaperonin beta subunit [Physarum
  misc_feature (1)..(475): Homolog of NCBI NO: 21105454 NR Description: chaperonin-containing TCP-1 complex beta chain
  misc_feature (1)..(499): Homolog of NCBI NO: 18858175 NR Description: CG7033-PA [Drosophila melanogaster]
  misc_feature (1)..(499): Homolog of NCBI NO: 24640724 NR Description: CG7033-PB [Drosophila melanogaster]
  misc_feature (1)..(498): Homolog of NCBI NO: 27769226 NR Description: Similar to chaperonin subunit 7 (eta) [Xenopus
MAISDLVKTTLGPKGMDKILQSTGRGRNVTVTNDGATILKSLHIDNPAAKVLVDISKVQDDEVGDGTTSVVVLAGELLKEAEKLINMKIHPMTIIAGYRMALECARDSLLKKTMDNKENTDKFRSDLMNIAMTTLSSKILSQDKEYFAELAVDAVLRLKGSTNLESIQILKKPGGSLKDSFLDEGFILDKKIGIGQPKRIENAKILVANTAMDTDKVKIYGARVRVDSMSKVADIEAAEKQKMREKVQKIIAHGINCFVNRQLIYNFPEELFADAGILAIEHADFEGIERLALVTGGEIASTFDNPESVKLGHCKVIEEIMIGEDRLIHFSGVAMGQACTIVLRGASEHVLDEAERSLHDALCVLSQTVNDTRVLFGGGWPEMVMAKEVDELARKTPGKKSHAIDAFSHALQAIPTIIADNAGLDSADLISQLRAEHHKENSTAGIDVITGTVGDMQKLGIQESFKVKQAILLSATEAAEMILRVDEIITCAPRRREDRM

SEQ ID NO: 12793 - DNA, 2671 bp, Zea mays subsp. mays
  misc_feature (1)..(2671): Ceres Seq. ID no. 12414664
  misc_feature: MA Experiment ID: 108522 Result: Up-regulated in Transcription
  misc_feature: MA Experiment 108522 PARAMETER Experiment Name: Zm_42deg_Heat_P Parameter: Age (day) Value: 8
  misc_feature: MA Experiment 108522 PARAMETER Experiment Name: Zm_42deg_Heat_P Parameter: Organism Value: Zea mays
  misc_feature: MA Experiment 108522 PARAMETER Experiment Name: Zm_42deg_Heat_P Parameter: Plant Line Value: 35A19
  misc_feature: MA Experiment 108522 PARAMETER Experiment Name: Zm_42deg_Heat_P Parameter: Temperature (deg C) Value: 42 vs. 22
  misc_feature: MA Experiment 108522 PARAMETER Experiment Name: Zm_42deg_Heat_P Parameter: Timepoint (hr) Value: 1
  misc_feature: MA Experiment 108522 PARAMETER Experiment Name: Zm_42deg_Heat_P Parameter: Tissue Value: Aerial
gcatctcgcattctcgccggtgctgctgcaattcacgccacccccggccaaccgcctgaaaactacctctgccgccggcgccgccatccccaacatggcgagccaaggggagccctcggcctctgcttccgatccgaaggagaagaaggactactcgacggcgatactagagaggaaaaagtcaccgaaccgccttgtcgtcgacgaggccaccaacgacgataactccgtcgtcgcactgcaccctgacaccatggagaggctgcagctcttccgcggcgatactgtgctcctcaagggtaagaagaggaaagacactatttgcattgtccttgcggatgagacctgtgaggagccaaaggttcggatgaacaaggttgtccgccagaacctgagggtgaggcttggtgatgtggtttctgtccaccagtgccaggatgtgaaatatgggaagcgtgtgcacattcttccaattgatgatacagttgaaggcattacagggaacctgtttgatgccttcttgaaaccatacttcctagaagcatacaggcccgtgaggaaaggagaccttttccttgtcaggggtggaatgagaagcgtggaattcaaagtgatagagactgacccttctgaatattgtatcgttgccccagatactgaaatattttgtgatggggagcctattaagagagaggatgaggagcgtcttgatgaagttggttatgatgatgttggtggagttagaaagcaaatggcccaaatcagagagcttgttgagcttccactacgccatcctcagcttttcaaatctattggtgtgaagccaccaaagggcatattgctgtatgggccacctggttctggaaagactcttattgctcgtgctgttgcaaatgagactggagcctttttctttctgatcaatggcccagagattatgtcgaagttagcaggagagagtgagagcaatctcagaaaggcatttgaagaagcagagaagaatgctccatctatcattttcattgatgaaattgattccattgcacccaagagagaaaagaccaatggagaagtagaacgtcgtattgtttcacagctactgactcttatggatggactcaaatctcgttcccatgttattgttatgggtgctacaaaccggccaaacagcattgatcctgctcttagaagatttggaaggtttgaccgggaaattgacattggagttcctgatgaagttggccggcttgaggttctccgtattcacactaagaacatgaagctagctgaagatgttaatttggaactcatttcaaaggatacccatggatacgttggtgctgatcttgctgccctttgcactgaggctgctcttcagtgcattcgtgagaagatggacatcatagatcttgaggatgagacaatagatgcagagatattgaactcgatggctgttacaaatgaccatttcaagactgcgcttggaacaagcaacccatctgctctccgtgaaactgttgttgaagtcccaaatgtcttgggaggatattggtgggctggagaatgtcaagagagagctccaggagactgttcaatatcctgtggagcatccagagaagttcgagaagtttggcatgtctccatccaaaggagttctgttttatggtcctcctggttgtggtaaaaccttgttggcaaaggcaattgccaatgagtgccaagctaacttcatcagtgtcaagggtcctgaattgcttaccatgtggtttggtgagagtgaagccaacgtccgcgaaatttttgataaggctcgccaatctgctccttgtgtcctcttctttgatgagcttgactcaattgcaactcagagaggaagtagtgtgggtgatgctgggggcgcggctgatagagtgcttaatcagctactgaccgagatggatggcatgaacgccaagaaaactgtgttcattattggtgctacaaacaggcctgacatcattgatcctgctcttctgaggccagggcgtcttaaccagctgatctacattccactgcctgatgagcagtctaggctccagatcttcaaggcctgcctaaggaagtcccctgtggcaaaggatgtggacctgaatgctcttgctaagtacacacaagggttcagtggagcagatatcacagaaatttgccagcgtgcgtgcaaatatgcaatcagagagaacattgagaaggacattgagagggaaaggcggatgaaggacaaccctgaggcgatggaggaagatgaagtggacgagattgccgagatcaaggcagctcatttcgaggagtctatgaagtattctcggcgcagtgtcagtgatgctgatatccgcaagtaccaggcgttcgcccagacgttgcagcagtcccgtgggttcggcagtgagttccgcttctcagagcaatcggcgacagctagtgctgctgcagccgatccgtttgcttctgccggtgccgcggctgacgatgacgatctatacagctaggtgtccttttgggttggttctgggttgtgcaatatcagtctcatcagtcatctgtttaaaactctgagtatacttagacacgggatgtcatgcaatgatatttgttttccgtacatttggacgttgagataatgcctgtttatttt

SEQ ID NO: 12794 - protein, 560 aa, Zea mays subsp. mays
  peptide (1)..(560): Ceres Seq. ID no. 12414665
  misc_feature (278)..(462): Pfam Name: ATPase family associated with various cellular Pfam Description: ATPase family associated with various cellular
  misc_feature (58)..(331): Homolog of NCBI NO: 23612274 NR Description: cell division cycle protein 48 homologue, [Plasmodium falciparum 3D7] >gi|23498515|emb|CAD50466.1| cell
  misc_feature (352)..(512): Homolog of NCBI NO: 23612274 NR Description: cell division cycle protein 48 homologue, [Plasmodium falciparum 3D7] >gi|23498515|emb|CAD50466.1| cell
  misc_feature (31)..(495): Homolog of NCBI NO: 23612492 NR Description: cell division cycle ATPase, putative [Plasmodium
  misc_feature (466)..(512): Homolog of NCBI NO: 23612492 NR Description: cell division cycle ATPase, putative [Plasmodium
  misc_feature (30)..(473): Homolog of NCBI NO: 23481659 NR Description: putative cell division cycle ATPase [Plasmodium
  misc_feature (65)..(512): Homolog of NCBI NO: 15669345 NR Description: cell division control protein 48 (cdc48), AAA [Methanococcus jannaschii] >gi|2492505|sp|Q58556|YB56_METJA Cell cycle protein 48 homolog MJ1156 >gi|2118117|pir||C64444 cell
  misc_feature (72)..(512): Homolog of NCBI NO: 15790615 NR Description: cell division cycle protein; Cdc48c sp. NRC- 1] >gi|12229754|sp|Q9HPF0|CDCH_HALN1 CdcH protein
  misc_feature (167)..(512): Homolog of NCBI NO: 20090664 NR Description: hypothetical protein [Methanosarcina acetivorans C2A] >gi|19915711|gb|AAM05219.1| hypothetical protein
  misc_feature (167)..(512): Homolog of NCBI NO: 21226350 NR Description: Cell division cycle protein [Methanosarcina mazei >gi|20904601|gb|AAM29944.1| Cell division cycle protein
  misc_feature (204)..(462): Homolog of NCBI NO: 20093924 NR Description: ATPase of the AAA+ class [Methanopyrus kandleri >gi|19886871|gb|AAM01701.1| ATPase of the AAA+ class
HLAFSPVLLQFTPPPANRLKTTSAAGAAIPNMASQGEPSASASDPKEKKDYSTAILERKKSPNRLVVDEATNDDNSVVALHPDTMERLQLFRGDTVLLKGKKRKDTICIVLADETCEEPKVRMNKVVRQNLRVRLGDVVSVHQCQDVKYGKRVHILPIDDTVEGITGNLFDAFLKPYFLEAYRPVRKGDLFLVRGGMRSVEFKVIETDPSEYCIVAPDTEIFCDGEPIKREDEERLDEVGYDDVGGVRKQMAQIRELVELPLRHPQLFKSIGVKPPKGILLYGPPGSGKTLIARAVANETGAFFFLINGPEIMSKLAGESESNLRKAFEEAEKNAPSIIFIDEIDSIAPKREKTNGEVERRIVSQLLTLMDGLKSRSHVIVMGATNRPNSIDPALRRFGRFDREIDIGVPDEVGRLEVLRIHTKNMKLAEDVNLELISKDTHGYVGADLAALCTEAALQCIREKMDIIDLEDETIDAEILNSMAVTNDHFKTALGTSNPSALRETVVEVPNVLGGYWWAGECQERAPGDCSISCGASREVREVWHVSIQRSSVLWSSWLW

SEQ ID NO: 12795 - protein, 529 aa, Zea mays subsp. mays
  peptide (1)..(529): Ceres Seq. ID no. 12414666
  misc_feature (247)..(431): Pfam Name: ATPase family associated with various cellular Pfam Description: ATPase family associated with various cellular
  misc_feature (27)..(300): Homolog of NCBI NO: 23612274 NR Description: cell division cycle protein 48 homologue, [Plasmodium falciparum 3D7] >gi|23498515|emb|CAD50466.1| cell
  misc_feature (321)..(481): Homolog of NCBI NO: 23612274 NR Description: cell division cycle protein 48 homologue, [Plasmodium falciparum 3D7] >gi|23498515|emb|CAD50466.1| cell
  misc_feature (1)..(464): Homolog of NCBI NO: 23612492 NR Description: cell division cycle ATPase, putative [Plasmodium
  misc_feature (435)..(481): Homolog of NCBI NO: 23612492 NR Description: cell division cycle ATPase, putative [Plasmodium
  misc_feature (1)..(442): Homolog of NCBI NO: 23481659 NR Description: putative cell division cycle ATPase [Plasmodium
  misc_feature (34)..(481): Homolog of NCBI NO: 15669345 NR Description: cell division control protein 48 (cdc48), AAA [Methanococcus jannaschii] >gi|2492505|sp|Q58556|YB56_METJA Cell cycle protein 48 homolog MJ1156 >gi|2118117|pir||C64444 cell
  misc_feature (41)..(481): Homolog of NCBI NO: 15790615 NR Description: cell division cycle protein; Cdc48c sp. NRC- 1] >gi|12229754|sp|Q9HPF0|CDCH_HALN1 CdcH protein
  misc_feature (136)..(481): Homolog of NCBI NO: 20090664 NR Description: hypothetical protein [Methanosarcina acetivorans C2A] >gi|19915711|gb|AAM05219.1| hypothetical protein
  misc_feature (136)..(481): Homolog of NCBI NO: 21226350 NR Description: Cell division cycle protein [Methanosarcina mazei >gi|20904601|gb|AAM29944.1| Cell division cycle protein
  misc_feature (173)..(431): Homolog of NCBI NO: 20093924 NR Description: ATPase of the AAA+ class [Methanopyrus kandleri >gi|19886871|gb|AAM01701.1| ATPase of the AAA+ class
MASQGEPSASASDPKEKKDYSTAILERKKSPNRLVVDEATNDDNSVVALHPDTMERLQLFRGDTVLLKGKKRKDTICIVLADETCEEPKVRMNKVVRQNLRVRLGDVVSVHQCQDVKYGKRVHILPIDDTVEGITGNLFDAFLKPYFLEAYRPVRKGDLFLVRGGMRSVEFKVIETDPSEYCIVAPDTEIFCDGEPIKREDEERLDEVGYDDVGGVRKQMAQIRELVELPLRHPQLFKSIGVKPPKGILLYGPPGSGKTLIARAVANETGAFFFLINGPEIMSKLAGESESNLRKAFEEAEKNAPSIIFIDEIDSIAPKREKTNGEVERRIVSQLLTLMDGLKSRSHVIVMGATNRPNSIDPALRRFGRFDREIDIGVPDEVGRLEVLRIHTKNMKLAEDVNLELISKDTHGYVGADLAALCTEAALQCIREKMDIIDLEDETIDAEILNSMAVTNDHFKTALGTSNPSALRETVVEVPNVLGGYWWAGECQERAPGDCSISCGASREVREVWHVSIQRSSVLWSSWLW

SEQ ID NO: 12796 - protein, 476 aa, Zea mays subsp. mays
  peptide (1)..(476): Ceres Seq. ID no. 12414667
  misc_feature (194)..(378): Pfam Name: ATPase family associated with various cellular Pfam Description: ATPase family associated with various cellular
  misc_feature (1)..(247): Homolog of NCBI NO: 23612274 NR Description: cell division cycle protein 48 homologue, [Plasmodium falciparum 3D7] >gi|23498515|emb|CAD50466.1| cell
  misc_feature (268)..(428): Homolog of NCBI NO: 23612274 NR Description: cell division cycle protein 48 homologue, [Plasmodium falciparum 3D7] >gi|23498515|emb|CAD50466.1| cell
  misc_feature (1)..(411): Homolog of NCBI NO: 23612492 NR Description: cell division cycle ATPase, putative [Plasmodium
  misc_feature (382)..(428): Homolog of NCBI NO: 23612492 NR Description: cell division cycle ATPase, putative [Plasmodium
  misc_feature (1)..(389): Homolog of NCBI NO: 23481659 NR Description: putative cell division cycle ATPase [Plasmodium
  misc_feature (1)..(428): Homolog of NCBI NO: 15669345 NR Description: cell division control protein 48 (cdc48), AAA [Methanococcus jannaschii] >gi|2492505|sp|Q58556|YB56_METJA Cell cycle protein 48 homolog MJ1156 >gi|2118117|pir||C64444 cell
  misc_feature (1)..(428): Homolog of NCBI NO: 15790615 NR Description: cell division cycle protein; Cdc48c sp. NRC- 1] >gi|12229754|sp|Q9HPF0|CDCH_HALN1 CdcH protein
  misc_feature (83)..(428): Homolog of NCBI NO: 20090664 NR Description: hypothetical protein [Methanosarcina acetivorans C2A] >gi|19915711|gb|AAM05219.1| hypothetical protein
  misc_feature (83)..(428): Homolog of NCBI NO: 21226350 NR Description: Cell division cycle protein [Methanosarcina mazei >gi|20904601|gb|AAM29944.1| Cell division cycle protein
  misc_feature (120)..(378): Homolog of NCBI NO: 20093924 NR Description: ATPase of the AAA+ class [Methanopyrus kandleri >gi|19886871|gb|AAM01701.1| ATPase of the AAA+ class
MERLQLFRGDTVLLKGKKRKDTICIVLADETCEEPKVRMNKVVRQNLRVRLGDVVSVHQCQDVKYGKRVHILPIDDTVEGITGNLFDAFLKPYFLEAYRPVRKGDLFLVRGGMRSVEFKVIETDPSEYCIVAPDTEIFCDGEPIKREDEERLDEVGYDDVGGVRKQMAQIRELVELPLRHPQLFKSIGVKPPKGILLYGPPGSGKTLIARAVANETGAFFFLINGPEIMSKLAGESESNLRKAFEEAEKNAPSIIFIDEIDSIAPKREKTNGEVERRIVSQLLTLMDGLKSRSHVIVMGATNRPNSIDPALRRFGRFDREIDIGVPDEVGRLEVLRIHTKNMKLAEDVNLELISKDTHGYVGADLAALCTEAALQCIREKMDIIDLEDETIDAEILNSMAVTNDHFKTALGTSNPSALRETVVEVPNVLGGYWWAGECQERAPGDCSISCGASREVREVWHVSIQRSSVLWSSWLW

SEQ ID NO: 12797 - DNA, 1112 bp, Zea mays subsp. mays
  misc_feature (1)..(1112): Ceres Seq. ID no. 13493435
  misc_feature: MA Experiment ID: 108544 Result: Up-regulated in Transcription
  misc_feature: MA Experiment ID: 108556 Result: Up-regulated in Transcription
  misc_feature: MA Experiment 108556 PARAMETER Experiment Name: Zm_Drought_P Parameter: Age (day) Value: 9
  misc_feature: MA Experiment 108556 PARAMETER Experiment Name: Zm_Drought_P Parameter: Organism Value: Zea mays
  misc_feature: MA Experiment 108556 PARAMETER Experiment Name: Zm_Drought_P Parameter: Plant Line Value: 35A19
  misc_feature: MA Experiment 108556 PARAMETER Experiment Name: Zm_Drought_P Parameter: Timepoint (hr) Value: 24
  misc_feature: MA Experiment 108556 PARAMETER Experiment Name: Zm_Drought_P Parameter: Tissue Value: Aerial
  misc_feature: MA Experiment 108556 PARAMETER Experiment Name: Zm_Drought_P Parameter: Treatment Value: Drought vs. No Drought
  misc_feature: MA Experiment ID: 108689 Result: Up-regulated in Transcription
  misc_feature: MA Experiment 108689 PARAMETER Experiment Name: Zm_Drought_Roots_P Parameter: Age (day) Value: 9
  misc_feature: MA Experiment 108689 PARAMETER Experiment Name: Zm_Drought_Roots_P Parameter: Organism Value: Zea mays
  misc_feature: MA Experiment 108689 PARAMETER Experiment Name: Zm_Drought_Roots_P Parameter: Plant Line Value: 35A19
  misc_feature: MA Experiment 108689 PARAMETER Experiment Name: Zm_Drought_Roots_P Parameter: Timepoint (hr) Value: 24
  misc_feature: MA Experiment 108689 PARAMETER Experiment Name: Zm_Drought_Roots_P Parameter: Tissue Value: Roots
  misc_feature: MA Experiment 108689 PARAMETER Experiment Name: Zm_Drought_Roots_P Parameter: Treatment Value: Drought vs. No Drought
  misc_feature: MA Experiment ID: 20000534 Result: Up-regulated in Transcription
  misc_feature: MA Experiment 20000534 PARAMETER Experiment Name: Zm_Hybrid_Pollen_P Parameter: Age (day) Value: 8
  misc_feature: MA Experiment 20000534 PARAMETER Experiment Name: Zm_Hybrid_Pollen_P Parameter: Organism Value: Zea mays
  misc_feature: MA Experiment 20000534 PARAMETER Experiment Name: Zm_Hybrid_Pollen_P Parameter: Plant Line Value: 35A19
  misc_feature: MA Experiment 20000534 PARAMETER Experiment Name: Zm_Hybrid_Pollen_P Parameter: Tissue Value: Pollen vs. Aerial
gtcttctcgcgatggggagcaccggcgacacgacgatggccgaggcggaggcgccggcgccggtgggtgactacgagctgctggagcgcctgggggggcgtcccccgtacacgtccgtgtggcgagcggtctcccggtccaccggcacgcccgtggctgtgaagcaggtgcggctcaccggcctccccgcgcgcctccgcgacagcctcgactgcgaggtccgcttcctcgccgccgtcagccaccccaacatcatccgcctcatcgacgtcgtccagacccagagctgcctttacctcgtcctggagctctgcgagggcggggacctggcggccttcatccggcgcaatgggagcgtagacgagcgcgtggccagaaattttatgaaacagatcggagctggcttacaagtgctgcaccggcaccatgtcgtccaccgggacttgaaacctcagaatatcctgctctcttctccgagaagcagcgatgcgatcctcaagatatctgattttggtcttgcaaggtttcttggacccggggagtacgcagacacatcttgtggttcttgtttgtacatggccccagaagttgctgtttcaaaagtacaatgacaaggtagacatgtggagcatcggcgcgatcctatttgagctcttgaatggctacccgccattctatggcagaagcaacgtgcagctgcttcagtacatcaacagaagcacgtctctcccgttctcggaaccactggcgtctaccttaggccccgattgtgtcgatatatgcaccaggctactatgcactaatccagtgaagcgtctgtccttccaagagttcttggaccaccgcttcttcagagtatgagtgcccaagccatggggaccaccgggcagcgacatgatctgaagaacatcaagaagtttcttgtccttggagtgctgactgactctgttataaagcgttcagaaattgatgcccagtgctcgtcgtcttggttttctgttcgcgtccatttccttctccaaagagccatgtggccaacgtttcaatctgttgtgatctggtctgtactgtttcaatctgctaacagtaggagttttaaagatatttagtcc

SEQ ID NO: 12798 - protein, 202 aa, Zea mays subsp. mays
  peptide (1)..(202): Ceres Seq. ID no. 13493436
  misc_feature (15)..(196): Homolog of NCBI NO: 38345825 NR Description: OSJNBa0070M12.8 [Oryza sativa (japonica
  misc_feature (37)..(196): Homolog of NCBI NO: 7770326 NR Description: F27J15.5 [Arabidopsis thaliana]
  misc_feature (37)..(196): Homolog of NCBI NO: 30694500 NR Description: protein kinase family [Arabidopsis thaliana]
  misc_feature (16)..(196): Homolog of NCBI NO: 18412205 NR Description: protein kinase family [Arabidopsis thaliana]
  misc_feature (16)..(196): Homolog of NCBI NO: 11358841 NR Description: serine/threonine-protein kinase-like protein -
  misc_feature (21)..(196): Homolog of NCBI NO: 30687274 NR Description: protein kinase family [Arabidopsis thaliana]
  misc_feature (21)..(196): Homolog of NCBI NO: 20268768 NR Description: unknown protein [Arabidopsis thaliana]
  misc_feature (21)..(196): Homolog of NCBI NO: 30693945 NR Description: protein kinase family [Arabidopsis thaliana]
  misc_feature (21)..(196): Homolog of NCBI NO: 25287591 NR Description: probable protein kinase [imported] - Arabidopsis
  misc_feature (61)..(196): Homolog of NCBI NO: 26452168 NR Description: unknown protein [Arabidopsis thaliana]
LLAMGSTGDTTMAEAEAPAPVGDYELLERLGGRPPYTSVWRAVSRSTGTPVAVKQVRLTGLPARLRDSLDCEVRFLAAVSHPNIIRLIDVVQTQSCLYLVLELCEGGDLAAFIRRNGSVDERVARNFMKQIGAGLQVLHRHHVVHRDLKPQNILLSSPRSSDAILKISDFGLARFLGPGEYADTSCGSCLYMAPEVAVSKVQ

SEQ ID NO: 12799 - protein, 199 aa, Zea mays subsp. mays
  peptide (1)..(199): Ceres Seq. ID no. 13493437
  misc_feature (12)..(193): Homolog of NCBI NO: 38345825 NR Description: OSJNBa0070M12.8 [Oryza sativa (japonica
  misc_feature (34)..(193): Homolog of NCBI NO: 7770326 NR Description: F27J15.5 [Arabidopsis thaliana]
  misc_feature (34)..(193): Homolog of NCBI NO: 30694500 NR Description: protein kinase family [Arabidopsis thaliana]
  misc_feature (13)..(193): Homolog of NCBI NO: 18412205 NR Description: protein kinase family [Arabidopsis thaliana]
  misc_feature (13)..(193): Homolog of NCBI NO: 11358841 NR Description: serine/threonine-protein kinase-like protein -
  misc_feature (18)..(193): Homolog of NCBI NO: 30687274 NR Description: protein kinase family [Arabidopsis thaliana]
  misc_feature (18)..(193): Homolog of NCBI NO: 20268768 NR Description: unknown protein [Arabidopsis thaliana]
  misc_feature (18)..(193): Homolog of NCBI NO: 30693945 NR Description: protein kinase family [Arabidopsis thaliana]
  misc_feature (18)..(193): Homolog of NCBI NO: 25287591 NR Description: probable protein kinase [imported] - Arabidopsis
  misc_feature (58)..(193): Homolog of NCBI NO: 26452168 NR Description: unknown protein [Arabidopsis thaliana]
MGSTGDTTMAEAEAPAPVGDYELLERLGGRPPYTSVWRAVSRSTGTPVAVKQVRLTGLPARLRDSLDCEVRFLAAVSHPNIIRLIDVVQTQSCLYLVLELCEGGDLAAFIRRNGSVDERVARNFMKQIGAGLQVLHRHHVVHRDLKPQNILLSSPRSSDAILKISDFGLARFLGPGEYADTSCGSCLYMAPEVAVSKVQ

SEQ ID NO: 12800 - protein, 191 aa, Zea mays subsp. mays
  peptide (1)..(191): Ceres Seq. ID no. 13493438
  misc_feature (4)..(185): Homolog of NCBI NO: 38345825 NR Description: OSJNBa0070M12.8 [Oryza sativa (japonica
  misc_feature (26)..(185): Homolog of NCBI NO: 7770326 NR Description: F27J15.5 [Arabidopsis thaliana]
  misc_feature (26)..(185): Homolog of NCBI NO: 30694500 NR Description: protein kinase family [Arabidopsis thaliana]
  misc_feature (5)..(185): Homolog of NCBI NO: 18412205 NR Description: protein kinase family [Arabidopsis thaliana]
  misc_feature (5)..(185): Homolog of NCBI NO: 11358841 NR Description: serine/threonine-protein kinase-like protein -
  misc_feature (10)..(185): Homolog of NCBI NO: 30687274 NR Description: protein kinase family [Arabidopsis thaliana]
  misc_feature (10)..(185): Homolog of NCBI NO: 20268768 NR Description: unknown protein [Arabidopsis thaliana]
  misc_feature (10)..(185): Homolog of NCBI NO: 30693945 NR Description: protein kinase family [Arabidopsis thaliana]
  misc_feature (10)..(185): Homolog of NCBI NO: 25287591 NR Description: probable protein kinase [imported] - Arabidopsis
  misc_feature (50)..(185): Homolog of NCBI NO: 26452168 NR Description: unknown protein [Arabidopsis thaliana]
MAEAEAPAPVGDYELLERLGGRPPYTSVWRAVSRSTGTPVAVKQVRLTGLPARLRDSLDCEVRFLAAVSHPNIIRLIDVVQTQSCLYLVLELCEGGDLAAFIRRNGSVDERVARNFMKQIGAGLQVLHRHHVVHRDLKPQNILLSSPRSSDAILKISDFGLARFLGPGEYADTSCGSCLYMAPEVAVSKVQ

SEQ ID NO: 12801 - DNA, 1229 bp, Zea mays subsp. mays
  misc_feature (1)..(1229): Ceres Seq. ID no. 12414660
  misc_feature: MA Experiment ID: 108522 Result: Up-regulated in Transcription
  misc_feature: MA Experiment 108522 PARAMETER Experiment Name: Zm_42deg_Heat_P Parameter: Age (day) Value: 8
  misc_feature: MA Experiment 108522 PARAMETER Experiment Name: Zm_42deg_Heat_P Parameter: Organism Value: Zea mays
  misc_feature: MA Experiment 108522 PARAMETER Experiment Name: Zm_42deg_Heat_P Parameter: Plant Line Value: 35A19
  misc_feature: MA Experiment 108522 PARAMETER Experiment Name: Zm_42deg_Heat_P Parameter: Temperature (deg C) Value: 42 vs. 22
  misc_feature: MA Experiment 108522 PARAMETER Experiment Name: Zm_42deg_Heat_P Parameter: Timepoint (hr) Value: 1
  misc_feature: MA Experiment 108522 PARAMETER Experiment Name: Zm_42deg_Heat_P Parameter: Tissue Value: Aerial
  misc_feature: MA Experiment ID: 108523 Result: Up-regulated in Transcription
  misc_feature: MA Experiment 108523 PARAMETER Experiment Name: Zm_42deg_Heat_P Parameter: Age (day) Value: 8
  misc_feature: MA Experiment 108523 PARAMETER Experiment Name: Zm_42deg_Heat_P Parameter: Organism Value: Zea mays
  misc_feature: MA Experiment 108523 PARAMETER Experiment Name: Zm_42deg_Heat_P Parameter: Plant Line Value: 35A19
  misc_feature: MA Experiment 108523 PARAMETER Experiment Name: Zm_42deg_Heat_P Parameter: Temperature (deg C) Value: 42 vs. 22
  misc_feature: MA Experiment 108523 PARAMETER Experiment Name: Zm_42deg_Heat_P Parameter: Timepoint (hr) Value: 6
  misc_feature: MA Experiment 108523 PARAMETER Experiment Name: Zm_42deg_Heat_P Parameter: Tissue Value: Aerial
  misc_feature: MA Experiment ID: 108544 Result: Up-regulated in Transcription
aaattccacccctcgccgccatctccgtctctctctctcccgcaaccaagcagttcaactcacacccgaagcggcgccgctagggtttgctccgacagccgcgaaacctagtccttactgcgccctcccacagaggccgtcattcactaatctagctgctacgcttcgcttcccactccgattgggagctagggtttagcttatctctgagctcagcttcgggtcgcggcacgcggcatggcggggtacggggaagagaaccagaacgccatgaacgggtacgaggaggaagaggaggaagaagaggttgaagaagtcgaggaggtgtacgaagaggaggaggagggggacggggagggggaaggagacgagggggcagccgccgaggcagcagcgatggcggccgagacgagaagtgtcgatggaggccggggcctagcggaggccgttgggaatgttgatgccggaggcgaggatgagagggatgcagattctagcggcggtgacgcttcggggaaggttttcgtagggggtgtagcctgggagacaactgaagaaacattcacaaagcattttcagaagtatggagctataactgattctgtgatcatgaaggacaagcatactaggatgcctcgtggatttggatttgttacattttccgatccgtctgtgcttgacagggttctagaggatgaacatgtcatagatggaaggacggttgaagtcaaaaggactgttccaaaagagctgtcgtcaaaagatggccctaagacaaaaaagatctttgtgggtggtatcccaccatctcttaccgaagataaattaaaggagcacttctcatcgtacgggaaggtggttgagcatcagattatgcttgatcatagcactggacgttcacggggctttggatttgtcacatttgaaagcgaggatgctgttgaaagggttatgtcagaggggagaatgcatgatcttggagggaagcaggtcacttctttatctctcattgtgttctgtgttggtaaatatcattggcatgtaagcagttctgcagttgtcaggttcaattagcaaatggtctaacctggcatgttgtctataattttgttgttgttaacttagttttggttagtaatcatgaagatgcgattctgtctgtacaatataactgatgtgtctgggagtttttgaacattgatcattgtttgtttagtactttctcttcc

SEQ ID NO: 12802 - protein, 278 aa, Zea mays subsp. mays
  peptide (1)..(278): Ceres Seq. ID no. 12414661
  misc_feature (183)..(252): Pfam Name: RNA recognition motif. (a.k.a. RRM, RBD, or RNP domain) Pfam Description: RNA recognition motif. (a.k.a. RRM, RBD, or RNP
  misc_feature (93)..(252): Homolog of NCBI NO: 22328624 NR Description: heterogeneous nuclear ribonucleoprotein(hnRNP), protein id: At4g14300.1 [Arabidopsis thaliana]
  misc_feature (93)..(252): Homolog of NCBI NO: 9758187 NR Description: RNA-binding protein-like [Arabidopsis thaliana]
  misc_feature (57)..(252): Homolog of NCBI NO: 15220810 NR Description: RRM-containing RNA-binding protein, putative;
  misc_feature (77)..(252): Homolog of NCBI NO: 30682553 NR Description: RNA recognition motif (RRM)-containing protein thaliana] >gi|11994764|dbj|BAB03120.1| contains similarity to RNA
  misc_feature (94)..(252): Homolog of NCBI NO: 8778468 NR Description: F1L3.34 [Arabidopsis thaliana]
  misc_feature (76)..(252): Homolog of NCBI NO: 35215091 NR Description: putative heterogeneous nuclear ribonucleoprotein
  misc_feature (75)..(252): Homolog of NCBI NO: 15242719 NR Description: RRM-containing RNA-binding protein, putative; id: At5g40490.1 [Arabidopsis thaliana] contains similarity to RNA binding protein~gene_id:MNF13.1
  misc_feature (77)..(253): Homolog of NCBI NO: 30682550 NR Description: RNA recognition motif (RRM)-containing protein thaliana] >gi|17065240|gb|AAL32774.1| Unknown protein thaliana] >gi|20260060|gb|AAM13377.1| unknown protein
  misc_feature (93)..(252): Homolog of NCBI NO: 18423760 NR Description: heterogeneous nuclear ribonucleoprotein (hnRNP), protein id: At5g55550.1, supported by cDNA: gi_15292724,
  misc_feature (93)..(252): Homolog of NCBI NO: 22531168 NR Description: RNA-binding protein-like [Arabidopsis thaliana]
MAGYGEENQNAMNGYEEEEEEEEVEEVEEVYEEEEEGDGEGEGDEGAAAEAAAMAAETRSVDGGRGLAEAVGNVDAGGEDERDADSSGGDASGKVFVGGVAWETTEETFTKHFQKYGAITDSVIMKDKHTRMPRGFGFVTFSDPSVLDRVLEDEHVIDGRTVEVKRTVPKELSSKDGPKTKKIFVGGIPPSLTEDKLKEHFSSYGKVVEHQIMLDHSTGRSRGFGFVTFESEDAVERVMSEGRMHDLGGKQVTSLSLIVFCVGKYHWHVSSSAVVRFN

SEQ ID NO: 12803 - protein, 267 aa, Zea mays subsp. mays
  peptide (1)..(267): Ceres Seq. ID no. 12414662
  misc_feature (172)..(241): Pfam Name: RNA recognition motif. (a.k.a. RRM, RBD, or RNP domain) Pfam Description: RNA recognition motif. (a.k.a. RRM, RBD, or RNP
  misc_feature (46)..(241): Homolog of NCBI NO: 15220810 NR Description: RRM-containing RNA-binding protein, putative;
  misc_feature (66)..(242): Homolog of NCBI NO: 30682550 NR Description: RNA recognition motif (RRM)-containing protein thaliana] >gi|17065240|gb|AAL32774.1| Unknown protein thaliana] >gi|20260060|gb|AAM13377.1| unknown protein
  misc_feature (66)..(241): Homolog of NCBI NO: 30682553 NR Description: RNA recognition motif (RRM)-containing protein thaliana] >gi|11994764|dbj|BAB03120.1| contains similarity to RNA
  misc_feature (64)..(241): Homolog of NCBI NO: 15242719 NR Description: RRM-containing RNA-binding protein, putative; id: At5g40490.1 [Arabidopsis thaliana] contains similarity to RNA binding protein~gene_id:MNF13.1
  misc_feature (83)..(241): Homolog of NCBI NO: 8778468 NR Description: F1L3.34 [Arabidopsis thaliana]
  misc_feature (65)..(241): Homolog of NCBI NO: 35215091 NR Description: putative heterogeneous nuclear ribonucleoprotein
  misc_feature (82)..(241): Homolog of NCBI NO: 22328624 NR Description: heterogeneous nuclear ribonucleoprotein(hnRNP), protein id: At4g14300.1 [Arabidopsis thaliana]
  misc_feature (82)..(241): Homolog of NCBI NO: 9758187 NR Description: RNA-binding protein-like [Arabidopsis thaliana]
  misc_feature (82)..(241): Homolog of NCBI NO: 18423760 NR Description: heterogeneous nuclear ribonucleoprotein (hnRNP), protein id: At5g55550.1, supported by cDNA: gi_15292724,
  misc_feature (82)..(241): Homolog of NCBI NO: 22531168 NR Description: RNA-binding protein-like [Arabidopsis thaliana]
MNGYEEEEEEEEVEEVEEVYEEEEEGDGEGEGDEGAAAEAAAMAAETRSVDGGRGLAEAVGNVDAGGEDERDADSSGGDASGKVFVGGVAWETTEETFTKHFQKYGAITDSVIMKDKHTRMPRGFGFVTFSDPSVLDRVLEDEHVIDGRTVEVKRTVPKELSSKDGPKTKKIFVGGIPPSLTEDKLKEHFSSYGKVVEHQIMLDHSTGRSRGFGFVTFESEDAVERVMSEGRMHDLGGKQVTSLSLIVFCVGKYHWHVSSSAVVRFN

SEQ ID NO: 12804 - protein, 225 aa, Zea mays subsp. mays
  peptide (1)..(225): Ceres Seq. ID no. 12414663
  misc_feature (130)..(199): Pfam Name: RNA recognition motif. (a.k.a. RRM, RBD, or RNP domain) Pfam Description: RNA recognition motif. (a.k.a. RRM, RBD, or RNP
  misc_feature (4)..(199): Homolog of NCBI NO: 15220810 NR Description: RRM-containing RNA-binding protein, putative;
  misc_feature (24)..(200): Homolog of NCBI NO: 30682550 NR Description: RNA recognition motif (RRM)-containing protein thaliana] >gi|17065240|gb|AAL32774.1| Unknown protein thaliana] >gi|20260060|gb|AAM13377.1| unknown protein
  misc_feature (24)..(199): Homolog of NCBI NO: 30682553 NR Description: RNA recognition motif (RRM)-containing protein thaliana] >gi|11994764|dbj|BAB03120.1| contains similarity to RNA
  misc_feature (22)..(199): Homolog of NCBI NO: 15242719 NR Description: RRM-containing RNA-binding protein, putative; id: At5g40490.1 [Arabidopsis thaliana] contains similarity to RNA binding protein~gene_id:MNF13.1
  misc_feature (41)..(199): Homolog of NCBI NO: 8778468 NR Description: F1L3.34 [Arabidopsis thaliana]
  misc_feature (23)..(199): Homolog of NCBI NO: 35215091 NR Description: putative heterogeneous nuclear ribonucleoprotein
  misc_feature (40)..(199): Homolog of NCBI NO: 22328624 NR Description: heterogeneous nuclear ribonucleoprotein(hnRNP), protein id: At4g14300.1 [Arabidopsis thaliana]
  misc_feature (40)..(199): Homolog of NCBI NO: 9758187 NR Description: RNA-binding protein-like [Arabidopsis thaliana]
  misc_feature (40)..(199): Homolog of NCBI NO: 18423760 NR Description: heterogeneous nuclear ribonucleoprotein (hnRNP), protein id: At5g55550.1, supported by cDNA: gi_15292724,
  misc_feature (40)..(199): Homolog of NCBI NO: 22531168 NR Description: RNA-binding protein-like [Arabidopsis thaliana]
MAAETRSVDGGRGLAEAVGNVDAGGEDERDADSSGGDASGKVFVGGVAWETTEETFTKHFQKYGAITDSVIMKDKHTRMPRGFGFVTFSDPSVLDRVLEDEHVIDGRTVEVKRTVPKELSSKDGPKTKKIFVGGIPPSLTEDKLKEHFSSYGKVVEHQIMLDHSTGRSRGFGFVTFESEDAVERVMSEGRMHDLGGKQVTSLSLIVFCVGKYHWHVSSSAVVRFN

SEQ ID NO: 12805 - DNA, 2019 bp, Zea mays subsp. mays
  misc_feature (1)..(2019): Ceres Seq. ID no. 12359674
  misc_feature: MA Experiment ID: 108504 Result: Up-regulated in Transcription
  misc_feature: MA Experiment 108504 PARAMETER Experiment Name: Zm_Drought_P Parameter: Age (day) Value: 8
  misc_feature: MA Experiment 108504 PARAMETER Experiment Name: Zm_Drought_P Parameter: Organism Value: Zea mays
  misc_feature: MA Experiment 108504 PARAMETER Experiment Name: Zm_Drought_P Parameter: Plant Line Value: 35A19
  misc_feature: MA Experiment 108504 PARAMETER Experiment Name: Zm_Drought_P Parameter: Timepoint (hr) Value: 12
  misc_feature: MA Experiment 108504 PARAMETER Experiment Name: Zm_Drought_P Parameter: Tissue Value: Aerial
  misc_feature: MA Experiment 108504 PARAMETER Experiment Name: Zm_Drought_P Parameter: Treatment Value: Drought vs. No Drought
  misc_feature: MA Experiment ID: 108556 Result: Up-regulated in Transcription
  misc_feature: MA Experiment 108556 PARAMETER Experiment Name: Zm_Drought_P Parameter: Age (day) Value: 9
  misc_feature: MA Experiment 108556 PARAMETER Experiment Name: Zm_Drought_P Parameter: Organism Value: Zea mays
  misc_feature: MA Experiment 108556 PARAMETER Experiment Name: Zm_Drought_P Parameter: Plant Line Value: 35A19
  misc_feature: MA Experiment 108556 PARAMETER Experiment Name: Zm_Drought_P Parameter: Timepoint (hr) Value: 24
  misc_feature: MA Experiment 108556 PARAMETER Experiment Name: Zm_Drought_P Parameter: Tissue Value: Aerial
  misc_feature: MA Experiment 108556 PARAMETER Experiment Name: Zm_Drought_P Parameter: Treatment Value: Drought vs. No Drought
  misc_feature: MA Experiment ID: 108597 Result: Up-regulated in Transcription
  misc_feature: MA Experiment 108597 PARAMETER Experiment Name: Zm_100uM_ABA_P Parameter: Age (day) Value: 9
  misc_feature: MA Experiment 108597 PARAMETER Experiment Name: Zm_100uM_ABA_P Parameter: Organism Value: Zea mays
  misc_feature: MA Experiment 108597 PARAMETER Experiment Name: Zm_100uM_ABA_P Parameter: Plant Line Value: 35A19
  misc_feature: MA Experiment 108597 PARAMETER Experiment Name: Zm_100uM_ABA_P Parameter: Timepoint (hr) Value: 24
  misc_feature: MA Experiment 108597 PARAMETER Experiment Name: Zm_100uM_ABA_P Parameter: Tissue Value: Aerial
  misc_feature: MA Experiment 108597 PARAMETER Experiment Name: Zm_100uM_ABA_P Parameter: Treatment Value: 100uM ABA vs. No Treatment
  misc_feature: MA Experiment ID: 108689 Result: Up-regulated in Transcription
  misc_feature: MA Experiment 108689 PARAMETER Experiment Name: Zm_Drought_Roots_P Parameter: Age (day) Value: 9
  misc_feature: MA Experiment 108689 PARAMETER Experiment Name: Zm_Drought_Roots_P Parameter: Organism Value: Zea mays
  misc_feature: MA Experiment 108689 PARAMETER Experiment Name: Zm_Drought_Roots_P Parameter: Plant Line Value: 35A19
  misc_feature: MA Experiment 108689 PARAMETER Experiment Name: Zm_Drought_Roots_P Parameter: Timepoint (hr) Value: 24
  misc_feature: MA Experiment 108689 PARAMETER Experiment Name: Zm_Drought_Roots_P Parameter: Tissue Value: Roots
  misc_feature: MA Experiment 108689 PARAMETER Experiment Name: Zm_Drought_Roots_P Parameter: Treatment Value: Drought vs. No Drought
  misc_feature: MA Experiment ID: 20000480 Result: Up-regulated in Transcription
  misc_feature: MA Experiment 20000480 PARAMETER Experiment Name: Zm_Drought_P Parameter: Age (day) Value: 11
  misc_feature: MA Experiment 20000480 PARAMETER Experiment Name: Zm_Drought_P Parameter: Organism Value: Zea mays
  misc_feature: MA Experiment 20000480 PARAMETER Experiment Name: Zm_Drought_P Parameter: Plant Line Value: 35A19
  misc_feature: MA Experiment 20000480 PARAMETER Experiment Name: Zm_Drought_P Parameter: Timepoint (hr) Value: 72
  misc_feature: MA Experiment 20000480 PARAMETER Experiment Name: Zm_Drought_P Parameter: Tissue Value: Aerial
  misc_feature: MA Experiment 20000480 PARAMETER Experiment Name: Zm_Drought_P Parameter: Treatment Value: Drought vs. No Drought
acccgcgatctccgcgaccgcaagcagctcggcaggcaggcctccaccgctccaccacctccactcggtctacgtgctccgtcaccaaacccacccgggccaacgccgaagcaaccccccctccgtccccagatccggcgccgcctccgccctcacttacactagcacgcacggcggacacgtcgcctcccccgcgcgatctgatgcaggcgcacgcggtggccagcggcgatgcggtggaagcttaactcctccgtctacaagcgcgtgccgtccagggaaaccgccatggaacccgacgtcgagacgccaatgagaatgacggacggcggcggcagcggcgcggggccgtcgtggcgcatgtcgttgccgcatgtctgtgtcgccacgctcacctcgttcctctttggataccactccggggtggtgaacgagcccttggaggtcatctccgctgaccttggcttcgccggcaacactcttgctgaagggctcgtggtgagtatctgtttgggaggagcttttgttgggtgcctcttcagcggctccatcgcagatggtattgggcgacgccgtgcgttccagctcagtgcgctgcctatgattattggtgctgccataagtgctctctccaatagtttggagggtatgctccttggaagatttttggtaggaacagggatgggattgggtccaccagtagcttcactttatataacggaggtttctccttctacagtgaggggtacatatggtagctttgttcagattgcaacctgccttggaattatagtatcactactcattggtacacctgtcaaagatattgatagatggtggagagtgtgtttctgggttgccgttatcccagcaactttacaagctctcggtatggagttttgtgctgagagccctcagtggctttataagtgtggaaaaataagtgaagcagagatgcaatttgaaaagcttttaggtccccttcatgtaaaatctgccatggcagaactttctagatatgaaagagtagatgatggagaaagtgtcaagtactcagagttgttctatggtcgccacttcaatgttgtttttattggcacaacgctctttgctttacaacagttatccggcataaattctgtgttctatttctcatcaactgtattcagaagtgtgggggtgccctctaaccttgccaacatatgcatggggatttctaatctatcaggatcaattgtagcaatgcttctaatggacaagctaggtagaaaagtgcttctttcagggagttttcttgggatggcttttgcaatggggcttcaggctgttggagcaaaccgtcagtatcttggttctgcatgtgtatatctttcagttggtggcattctgttgtttgtcttgtcattttcactaggagcaggccctgtcccaggacttcttttgcctgagattttccctaataaaatccgagctaaggctatggctctctgcatgtctgtacattggatcgtgaacttctttgttagtttgatgttcttgcgtcttctggagcaacttggtccacagcttctctacacaatattttcgtcagtctgtgtggtagcctcaatatttgtgaggcgccatgtgttggagacgaagggaaagactttacaagagatagaggtttcactcctgcaaccacaataaaggtacatatttgacgtggctggaaccttgggcaggctgtttgctgaacagaaacaagctggccctgcagaagttgattcctgaagtcatcggcaacgccctacaaatggtctcagggaagttccagatatgcgcctgcgacagctagggcggtgtttccatagagcatcatgtactgaagttatgcctgtatcgcccgccctagataggatattttcatacttgtgttgtcatctgttctatctatgagtcgtaatatcagaaaaaaaaggtactactgttttaccgttgatgagcacagttgaaaaaaggaactatcatcttcatttt

SEQ ID NO: 12806 - protein, 485 aa, Zea mays subsp. mays
  peptide (1)..(485): Ceres Seq. ID no. 12359675
  misc_feature (48)..(481): Pfam Name: Sugar (and other) transporter Pfam Description: Sugar (and other) transporter
  misc_feature (7)..(485): Homolog of NCBI NO: 27261731 NR Description: sugar transporter [Citrus unshiu]
  misc_feature (7)..(482): Homolog of NCBI NO: 15220399 NR Description: integral membrane protein, putative; protein id:
  misc_feature (11)..(482): Homolog of NCBI NO: 30699453 NR Description: hexose transporter, putative [Arabidopsis >gi|30699455|ref|NP_178100.3| hexose transporter, putative
  misc_feature (56)..(482): Homolog of NCBI NO: 25308946 NR Description: probable sugar transporter, 77409-81599 - Arabidopsis thaliana >gi|12324590|gb|AAG52251.1|AC011717_19
  misc_feature (56)..(482): Homolog of NCBI NO: 7715596 NR Description: F20B17.24 [Arabidopsis thaliana]
  misc_feature (124)..(482): Homolog of NCBI NO: 19347894 NR Description: putative hexose transporter protein [Arabidopsis
  misc_feature (1)..(481): Homolog of NCBI NO: 15625046 NR Description: hexose transporter pGlT [Olea europaea]
  misc_feature (7)..(481): Homolog of NCBI NO: 18417892 NR Description: sugar transporter-like protein; protein id: supported by cDNA: gi_16648752, supported by cDNA: gi_20259505 thaliana] >gi|16648753|gb|AAL25568.1| AT5g16150/T21H19_70
  misc_feature (16)..(481): Homolog of NCBI NO: 8347246 NR Description: hexose transporter [Solanum tuberosum]
  misc_feature (7)..(481): Homolog of NCBI NO: 8347250 NR Description: hexose transporter [Arabidopsis thaliana]
MRWKLNSSVYKRVPSRETAMEPDVETPMRMTDGGGSGAGPSWRMSLPHVCVATLTSFLFGYHSGVVNEPLEVISADLGFAGNTLAEGLVVSICLGGAFVGCLFSGSIADGIGRRRAFQLSALPMIIGAAISALSNSLEGMLLGRFLVGTGMGLGPPVASLYITEVSPSTVRGTYGSFVQIATCLGIIVSLLIGTPVKDIDRWWRVCFWVAVIPATLQALGMEFCAESPQWLYKCGKISEAEMQFEKLLGPLHVKSAMAELSRYERVDDGESVKYSELFYGRHFNVVFIGTTLFALQQLSGINSVFYFSSTVFRSVGVPSNLANICMGISNLSGSIVAMLLMDKLGRKVLLSGSFLGMAFAMGLQAVGANRQYLGSACVYLSVGGILLFVLSFSLGAGPVPGLLLPEIFPNKIRAKAMALCMSVHWIVNFFVSLMFLRLLEQLGPQLLYTIFSSVCVVASIFVRRHVLETKGKTLQEIEVSLLQPQ

SEQ ID NO: 12807 - protein, 466 aa, Zea mays subsp. mays
  peptide (1)..(466): Ceres Seq. ID no. 12359676
  misc_feature (29)..(462): Pfam Name: Sugar (and other) transporter Pfam Description: Sugar (and other) transporter
  misc_feature (1)..(466): Homolog of NCBI NO: 27261731 NR Description: sugar transporter [Citrus unshiu]
  misc_feature (1)..(463): Homolog of NCBI NO: 15220399 NR Description: integral membrane protein, putative; protein id:
  misc_feature (1)..(463): Homolog of NCBI NO: 30699453 NR Description: hexose transporter, putative [Arabidopsis >gi|30699455|ref|NP_178100.3| hexose transporter, putative
  misc_feature (37)..(463): Homolog of NCBI NO: 25308946 NR Description: probable sugar transporter, 77409-81599 - Arabidopsis thaliana >gi|12324590|gb|AAG52251.1|AC011717_19
  misc_feature (37)..(463): Homolog of NCBI NO: 7715596 NR Description: F20B17.24 [Arabidopsis thaliana]
  misc_feature (105)..(463): Homolog of NCBI NO: 19347894 NR Description: putative hexose transporter protein [Arabidopsis
  misc_feature (1)..(462): Homolog of NCBI NO: 15625046 NR Description: hexose transporter pGlT [Olea europaea]
  misc_feature (1)..(462): Homolog of NCBI NO: 18417892 NR Description: sugar transporter-like protein; protein id: supported by cDNA: gi_16648752, supported by cDNA: gi_20259505 thaliana] >gi|16648753|gb|AAL25568.1| AT5g16150/T21H19_70
  misc_feature (1)..(462): Homolog of NCBI NO: 8347246 NR Description: hexose transporter [Solanum tuberosum]
  misc_feature (1)..(462): Homolog of NCBI NO: 8347250 NR Description: hexose transporter [Arabidopsis thaliana]
MEPDVETPMRMTDGGGSGAGPSWRMSLPHVCVATLTSFLFGYHSGVVNEPLEVISADLGFAGNTLAEGLVVSICLGGAFVGCLFSGSIADGIGRRRAFQLSALPMIIGAAISALSNSLEGMLLGRFLVGTGMGLGPPVASLYITEVSPSTVRGTYGSFVQIATCLGIIVSLLIGTPVKDIDRWWRVCFWVAVIPATLQALGMEFCAESPQWLYKCGKISEAEMQFEKLLGPLHVKSAMAELSRYERVDDGESVKYSELFYGRHFNVVFIGTTLFALQQLSGINSVFYFSSTVFRSVGVPSNLANICMGISNLSGSIVAMLLMDKLGRKVLLSGSFLGMAFAMGLQAVGANRQYLGSACVYLSVGGILLFVLSFSLGAGPVPGLLLPEIFPNKIRAKAMALCMSVHWIVNFFVSLMFLRLLEQLGPQLLYTIFSSVCVVASIFVRRHVLETKGKTLQEIEVSLLQPQ

SEQ ID NO: 12808 - protein, 458 aa, Zea mays subsp. mays
  peptide (1)..(458): Ceres Seq. ID no. 12359677
  misc_feature (21)..(454): Pfam Name: Sugar (and other) transporter Pfam Description: Sugar (and other) transporter
  misc_feature (1)..(458): Homolog of NCBI NO: 27261731 NR Description: sugar transporter [Citrus unshiu]
  misc_feature (1)..(455): Homolog of NCBI NO: 15220399 NR Description: integral membrane protein, putative; protein id:
  misc_feature (1)..(455): Homolog of NCBI NO: 30699453 NR Description: hexose transporter, putative [Arabidopsis >gi|30699455|ref|NP_178100.3| hexose transporter, putative
  misc_feature (29)..(455): Homolog of NCBI NO: 25308946 NR Description: probable sugar transporter, 77409-81599 - Arabidopsis thaliana >gi|12324590|gb|AAG52251.1|AC011717_19
  misc_feature (29)..(455): Homolog of NCBI NO: 7715596 NR Description: F20B17.24 [Arabidopsis thaliana]
  misc_feature (97)..(455): Homolog of NCBI NO: 19347894 NR Description: putative hexose transporter protein [Arabidopsis
  misc_feature (1)..(454): Homolog of NCBI NO: 15625046 NR Description: hexose transporter pGlT [Olea europaea]
  misc_feature (1)..(454): Homolog of NCBI NO: 18417892 NR Description: sugar transporter-like protein; protein id: supported by cDNA: gi_16648752, supported by cDNA: gi_20259505 thaliana] >gi|16648753|gb|AAL25568.1| AT5g16150/T21H19_70
  misc_feature (1)..(454): Homolog of NCBI NO: 8347246 NR Description: hexose transporter [Solanum tuberosum]
  misc_feature (1)..(454): Homolog of NCBI NO: 8347250 NR Description: hexose transporter [Arabidopsis thaliana]
MRMTDGGGSGAGPSWRMSLPHVCVATLTSFLFGYHSGVVNEPLEVISADLGFAGNTLAEGLVVSICLGGAFVGCLFSGSIADGIGRRRAFQLSALPMIIGAAISALSNSLEGMLLGRFLVGTGMGLGPPVASLYITEVSPSTVRGTYGSFVQIATCLGIIVSLLIGTPVKDIDRWWRVCFWVAVIPATLQALGMEFCAESPQWLYKCGKISEAEMQFEKLLGPLHVKSAMAELSRYERVDDGESVKYSELFYGRHFNVVFIGTTLFALQQLSGINSVFYFSSTVFRSVGVPSNLANICMGISNLSGSIVAMLLMDKLGRKVLLSGSFLGMAFAMGLQAVGANRQYLGSACVYLSVGGILLFVLSFSLGAGPVPGLLLPEIFPNKIRAKAMALCMSVHWIVNFFVSLMFLRLLEQLGPQLLYTIFSSVCVVASIFVRRHVLETKGKTLQEIEVSLLQPQ

SEQ ID NO: 12809 - DNA, 921 bp, Zea mays subsp. mays
  misc_feature (1)..(921): Ceres Seq. ID no. 12414856
  misc_feature: MA Experiment ID: 108523 Result: Up-regulated in Transcription
  misc_feature: MA Experiment 108523 PARAMETER Experiment Name: Zm_42deg_Heat_P Parameter: Age (day) Value: 8
  misc_feature: MA Experiment 108523 PARAMETER Experiment Name: Zm_42deg_Heat_P Parameter: Organism Value: Zea mays
  misc_feature: MA Experiment 108523 PARAMETER Experiment Name: Zm_42deg_Heat_P Parameter: Plant Line Value: 35A19
  misc_feature: MA Experiment 108523 PARAMETER Experiment Name: Zm_42deg_Heat_P Parameter: Temperature (deg C) Value: 42 vs. 22
  misc_feature: MA Experiment 108523 PARAMETER Experiment Name: Zm_42deg_Heat_P Parameter: Timepoint (hr) Value: 6
  misc_feature: MA Experiment 108523 PARAMETER Experiment Name: Zm_42deg_Heat_P Parameter: Tissue Value: Aerial
  misc_feature: MA Experiment ID: 108527 Result: Up-regulated in Transcription
  misc_feature: MA Experiment 108527 PARAMETER Experiment Name: Zm_5mM_NO_P Parameter: Age (day) Value: 8
  misc_feature: MA Experiment 108527 PARAMETER Experiment Name: Zm_5mM_NO_P Parameter: Organism Value: Zea mays
  misc_feature: MA Experiment 108527 PARAMETER Experiment Name: Zm_5mM_NO_P Parameter: Plant Line Value: 35A19
  misc_feature: MA Experiment 108527 PARAMETER Experiment Name: Zm_5mM_NO_P Parameter: Timepoint (hr) Value: 6
  misc_feature: MA Experiment 108527 PARAMETER Experiment Name: Zm_5mM_NO_P Parameter: Tissue Value: Aerial
  misc_feature: MA Experiment 108527 PARAMETER Experiment Name: Zm_5mM_NO_P Parameter: Treatment Value: 5mM NO vs. No Treatment
  misc_feature: MA Experiment ID: 108534 Result: Up-regulated in Transcription
  misc_feature: MA Experiment 108534 PARAMETER Experiment Name: Zm_4deg_Cold_P Parameter: Age (hr) Value: 8
  misc_feature: MA Experiment 108534 PARAMETER Experiment Name: Zm_4deg_Cold_P Parameter: Organism Value: Zea mays
  misc_feature: MA Experiment 108534 PARAMETER Experiment Name: Zm_4deg_Cold_P Parameter: Plant Line Value: 35A19
  misc_feature: MA Experiment 108534 PARAMETER Experiment Name: Zm_4deg_Cold_P Parameter: Temperature (deg C) Value: 4 vs. 22
  misc_feature: MA Experiment 108534 PARAMETER Experiment Name: Zm_4deg_Cold_P Parameter: Timepoint (hr) Value: 6
  misc_feature: MA Experiment 108534 PARAMETER Experiment Name: Zm_4deg_Cold_P Parameter: Tissue Value: Aerial
  misc_feature: MA Experiment ID: 108543 Result: Up-regulated in Transcription
  misc_feature: MA Experiment ID: 20000626 Result: Down-regulated in Transcription
  misc_feature: MA Experiment 20000626 PARAMETER Experiment Name: Zm_Herbicide-Treatments_P Parameter: Timepoint (hr) Value: 12
  misc_feature: MA Experiment 20000626 PARAMETER Experiment Name: Zm_Herbicide-Treatments_P Parameter: Tissue Value: Aerial
  misc_feature: MA Experiment 20000626 PARAMETER Experiment Name: Zm_Herbicide-Treatments_P Parameter: Treatment Value: Roundup vs. No Treatment
atttttagacgacacccctacccgacccgatcggcgggagagcacgagacgccagcgccatccatcgcggcaaaagccgagacgacccaggaatctcggcaccgtcgcccccctttctctctcgctcaaaagttgctgctggagccctctcccctctctccgaccaccaaccatggatgaggcgcaagttgtggagtcaaaggatggaaccatctcggttgcttctgcatttgctggttatcaggaagctgtgcaagacagggatcacaaattcttgacaaaagcagtggaagaagcatatcgaggagtcgattgcggtgacggaggtccattcggagcagttgtcgtctgtaatgacgaagtagtagtcagctgccataacatggttctgaagcacactgaccctactgcgcatgctgaagtaactgcaattagagaggcttgcaaaaagcttgggaaaattgagctctcagactgcgaaatttacgcgtcctgcgagccatgcccaatgtgctttagtgcagttcatctctcccgaatcaagaggctggtttatggggccaaggcagaggctgccatcgccattggatttgatgacttcattgcagatgctctgagaggcactgggttctaccagaaggccaacttggagatcaagaaagctgacggcaatggtgcattgatcgctgagcaagtctttgaaaagactaaagagaagttccagatgtactgatgctgagcagaagagagatctcagatttgtacaatgcttactcataaggacaagaaataatacagtgcccaaatgtccattgtttcgggaaaaaaatctcaattccactgttcaacattttgatgatgcctgaatttcttgttaacagacacaagattgttatttgctgtaaaatgtgcagttgatgg

SEQ ID NO: 12810 - protein, 243 aa, Zea mays subsp. mays
  peptide (1)..(243): Ceres Seq. ID no. 12414857
  misc_feature (85)..(187): Pfam Name: Cytidine and deoxycytidylate deaminase Pfam Description: Cytidine and deoxycytidylate deaminase
  misc_feature (58)..(243): Homolog of NCBI NO: 40714681 NR Description: putative deoxycytidine deaminase [Oryza sativa
  misc_feature (64)..(243): Homolog of NCBI NO: 23928436 NR Description: putative cytidine deaminase [Zea mays]
  misc_feature (63)..(243): Homolog of NCBI NO: 3204108 NR Description: putative cytidine deaminase; putative
  misc_feature (58)..(243): Homolog of NCBI NO: 15241124 NR Description: putative cytidine deaminase - like; protein id: supported by cDNA: 37242., supported by cDNA: gi_14532497 thaliana] >gi|14532498|gb|AAK63977.1| AT5g28050/F15F15_120
  misc_feature (58)..(243): Homolog of NCBI NO: 18266045 NR Description: deoxycytidine deaminase [Brassica oleracea]
  misc_feature (128)..(242): Homolog of NCBI NO: 15229953 NR Description: unknown protein; protein id: At3g05300.1 thaliana] >gi|6729040|gb|AAF27036.1|AC009177_26 unknown protein
  misc_feature (91)..(241): Homolog of NCBI NO: 23021911 NR Description: hypothetical protein [Clostridium thermocellum
  misc_feature (90)..(243): Homolog of NCBI NO: 17554608 NR Description: Cytidine, cytosine, dCTP et al deaminase elegans] >gi|15144367|gb|AAK84461.1|AC006679_2 Hypothetical
  misc_feature (88)..(199): Homolog of NCBI NO: 39591749 NR Description: Hypothetical protein CBG18226 [Caenorhabditis
  misc_feature (90)..(222): Homolog of NCBI NO: 39582012 NR Description: Hypothetical protein CBG09150 [Caenorhabditis
FLDDTPTRPDRRESTRRQRHPSRQKPRRPRNLGTVAPLSLSLKSCCWSPLPSLRPPTMDEAQVVESKDGTISVASAFAGYQEAVQDRDHKFLTKAVEEAYRGVDCGDGGPFGAVVVCNDEVVVSCHNMVLKHTDPTAHAEVTAIREACKKLGKIELSDCEIYASCEPCPMCFSAVHLSRIKRLVYGAKAEAAIAIGFDDFIADALRGTGFYQKANLEIKKADGNGALIAEQVFEKTKEKFQMY

SEQ ID NO: 12811 - protein, 186 aa, Zea mays subsp. mays
  peptide (1)..(186): Ceres Seq. ID no. 12414858
  misc_feature (28)..(130): Pfam Name: Cytidine and deoxycytidylate deaminase Pfam Description: Cytidine and deoxycytidylate deaminase
  misc_feature (1)..(186): Homolog of NCBI NO: 40714681 NR Description: putative deoxycytidine deaminase [Oryza sativa
  misc_feature (7)..(186): Homolog of NCBI NO: 23928436 NR Description: putative cytidine deaminase [Zea mays]
  misc_feature (6)..(186): Homolog of NCBI NO: 3204108 NR Description: putative cytidine deaminase; putative
  misc_feature (1)..(186): Homolog of NCBI NO: 15241124 NR Description: putative cytidine deaminase - like; protein id: supported by cDNA: 37242., supported by cDNA: gi_14532497 thaliana] >gi|14532498|gb|AAK63977.1| AT5g28050/F15F15_120
  misc_feature (1)..(186): Homolog of NCBI NO: 18266045 NR Description: deoxycytidine deaminase [Brassica oleracea]
  misc_feature (71)..(185): Homolog of NCBI NO: 15229953 NR Description: unknown protein; protein id: At3g05300.1 thaliana] >gi|6729040|gb|AAF27036.1|AC009177_26 unknown protein
  misc_feature (34)..(184): Homolog of NCBI NO: 23021911 NR Description: hypothetical protein [Clostridium thermocellum
  misc_feature (33)..(186): Homolog of NCBI NO: 17554608 NR Description: Cytidine, cytosine, dCTP et al deaminase elegans] >gi|15144367|gb|AAK84461.1|AC006679_2 Hypothetical
  misc_feature (31)..(142): Homolog of NCBI NO: 39591749 NR Description: Hypothetical protein CBG18226 [Caenorhabditis
  misc_feature (33)..(165): Homolog of NCBI NO: 39582012 NR Description: Hypothetical protein CBG09150 [Caenorhabditis
MDEAQVVESKDGTISVASAFAGYQEAVQDRDHKFLTKAVEEAYRGVDCGDGGPFGAVVVCNDEVVVSCHNMVLKHTDPTAHAEVTAIREACKKLGKIELSDCEIYASCEPCPMCFSAVHLSRIKRLVYGAKAEAAIAIGFDDFIADALRGTGFYQKANLEIKKADGNGALIAEQVFEKTKEKFQMY

SEQ ID NO: 12812 - DNA, 939 bp, Zea mays subsp. mays
  misc_feature (1)..(939): Ceres Seq. ID no. 12346943
  misc_feature: MA Experiment ID: 108534 Result: Down-regulated in Transcription
  misc_feature: MA Experiment 108534 PARAMETER Experiment Name: Zm_4deg_Cold_P Parameter: Age (hr) Value: 8
  misc_feature: MA Experiment 108534 PARAMETER Experiment Name: Zm_4deg_Cold_P Parameter: Organism Value: Zea mays
  misc_feature: MA Experiment 108534 PARAMETER Experiment Name: Zm_4deg_Cold_P Parameter: Plant Line Value: 35A19
  misc_feature: MA Experiment 108534 PARAMETER Experiment Name: Zm_4deg_Cold_P Parameter: Temperature (deg C) Value: 4 vs. 22
  misc_feature: MA Experiment 108534 PARAMETER Experiment Name: Zm_4deg_Cold_P Parameter: Timepoint (hr) Value: 6
  misc_feature: MA Experiment 108534 PARAMETER Experiment Name: Zm_4deg_Cold_P Parameter: Tissue Value: Aerial
aaaaacaagaagccgtacctgtacggtcttctctatagagggagcaattggagagagagagaaagaacagcgaaaaatggtcgatgccggcgacataacggccggagggccgccgcgcgctcacgaggaggagcaagcgggaactccggcatacggttcggtggtcctcggcggcacttttgaccgcctccacgacggccaccgccgccttctcaaggcctccgcggatttggggagagaccggatcgtggtgggcgtctgcacgggacctatgctcgccaagaaggagtatgcggagcttattgagcccgttgacaagcgcatcaagggtgtggaggattacatcaagtctataaagccagaactgatagtacaagtggagcctattgaggacccttatggcccatccataactgatgagaagttggatgccattattgtcagtaaggagacattaaatggtggactggctgtaaataggaaaagagaagagaaagggttcccactgttgaaggttgaggttgttgatctcctttccggcggtgtggagggggaaaaattgagttcttctgctttaaggaaacttgaggcagaacaagctcaacaaagtgaaacaaaatctggtagccttgaagcttcttagggaggaaattgaatactttgatctggttagctgaatgcacaaatacgggggtgatctgctccaagctcagtgtgaacaaaaaatatgatcagagctgacagtttggttacctttctagaggaataatcttcgaacactggcccatggccctgtaacagtattgctctaaccttctaaaatcaacctggcaacatagactctcccctactaaccaaatttacaaattttgtattggcaatgccatctgaatgttaaaaggaaatcttcttgggtttgtataaatatctacaattgtg

SEQ ID NO: 12813 - protein, 213 aa, Zea mays subsp. mays
  peptide (1)..(213): Ceres Seq. ID no. 12346944
  misc_feature (29)..(204): Homolog of NCBI NO: 34393473 NR Description: bifunctional phosphopantetheine adenylyl
  misc_feature (40)..(204): Homolog of NCBI NO: 15224138 NR Description: hypothetical protein; protein id: At2g18250.1
  misc_feature (43)..(194): Homolog of NCBI NO: 25143409 NR Description: Cytidylyltransferase and Dephospho-CoA kinase kD) [Caenorhabditis elegans] >gi|25167211|gb|AAK29952.3|
  misc_feature (31)..(194): Homolog of NCBI NO: 39589394 NR Description: Hypothetical protein CBG22156 [Caenorhabditis
  misc_feature (56)..(205): Homolog of NCBI NO: 6321716 NR Description: Protein required for cell viability; Ygr277cp cerevisiae] >gi|1723781|sp|P53332|YG5T_YEAST HYPOTHETICAL 34.3 KD
  misc_feature (37)..(193): Homolog of NCBI NO: 31213039 NR Description: ENSANGP00000014315 [Anopheles gambiae]
  misc_feature (51)..(193): Homolog of NCBI NO: 20094940 NR Description: Predicted nucleotidyltransferase of the HIGH [Methanopyrus kandleri AV19] >gi|19888182|gb|AAM02717.1| nucleotidyltransferase of the HIGH superfamily [Methanopyrus
  misc_feature (40)..(193): Homolog of NCBI NO: 24658602 NR Description: CG10575-PA [Drosophila melanogaster]
  misc_feature (56)..(194): Homolog of NCBI NO: 20465246 NR Description: bifunctional phosphopantetheine adenylyl
  misc_feature (51)..(194): Homolog of NCBI NO: 27229125 NR Description: CoA synthase; 4'-phosphopantetheine
KTRSRTCTVFSIEGAIGEREKEQRKMVDAGDITAGGPPRAHEEEQAGTPAYGSVVLGGTFDRLHDGHRRLLKASADLGRDRIVVGVCTGPMLAKKEYAELIEPVDKRIKGVEDYIKSIKPELIVQVEPIEDPYGPSITDEKLDAIIVSKETLNGGLAVNRKREEKGFPLLKVEVVDLLSGGVEGEKLSSSALRKLEAEQAQQSETKSGSLEAS

SEQ ID NO: 12814 - protein, 188 aa, Zea mays subsp. mays; identical to SEQ ID NO: 8009
  peptide (1)..(188): Ceres Seq. ID no. 12346945
  misc_feature (4)..(179): Homolog of NCBI NO: 34393473 NR Description: bifunctional phosphopantetheine adenylyl
  misc_feature (15)..(179): Homolog of NCBI NO: 15224138 NR Description: hypothetical protein; protein id: At2g18250.1
  misc_feature (18)..(169): Homolog of NCBI NO: 25143409 NR Description: Cytidylyltransferase and Dephospho-CoA kinase kD) [Caenorhabditis elegans] >gi|25167211|gb|AAK29952.3|
  misc_feature (6)..(169): Homolog of NCBI NO: 39589394 NR Description: Hypothetical protein CBG22156 [Caenorhabditis
  misc_feature (31)..(180): Homolog of NCBI NO: 6321716 NR Description: Protein required for cell viability; Ygr277cp cerevisiae] >gi|1723781|sp|P53332|YG5T_YEAST HYPOTHETICAL 34.3 KD
  misc_feature (12)..(168): Homolog of NCBI NO: 31213039 NR Description: ENSANGP00000014315 [Anopheles gambiae]
  misc_feature (26)..(168): Homolog of NCBI NO: 20094940 NR Description: Predicted nucleotidyltransferase of the HIGH [Methanopyrus kandleri AV19] >gi|19888182|gb|AAM02717.1| nucleotidyltransferase of the HIGH superfamily [Methanopyrus
  misc_feature (15)..(168): Homolog of NCBI NO: 24658602 NR Description: CG10575-PA [Drosophila melanogaster]
  misc_feature (31)..(169): Homolog of NCBI NO: 20465246 NR Description: bifunctional phosphopantetheine adenylyl
  misc_feature (26)..(169): Homolog of NCBI NO: 27229125 NR Description: CoA synthase; 4'-phosphopantetheine

SEQ ID NO: 12815 - protein, 123 aa, Zea mays subsp. mays; identical to SEQ ID NO: 8010
  peptide (1)..(123): Ceres Seq. ID no. 12346946
  misc_feature (1)..(104): Homolog of NCBI NO: 20465246 NR Description: bifunctional phosphopantetheine adenylyl
  misc_feature (1)..(104): Homolog of NCBI NO: 27229125 NR Description: CoA synthase; 4'-phosphopantetheine
  misc_feature (1)..(114): Homolog of NCBI NO: 34393473 NR Description: bifunctional phosphopantetheine adenylyl
  misc_feature (1)..(114): Homolog of NCBI NO: 15224138 NR Description: hypothetical protein; protein id: At2g18250.1
  misc_feature (1)..(104): Homolog of NCBI NO: 25143409 NR Description: Cytidylyltransferase and Dephospho-CoA kinase kD) [Caenorhabditis elegans] >gi|25167211|gb|AAK29952.3|
  misc_feature (1)..(104): Homolog of NCBI NO: 39589394 NR Description: Hypothetical protein CBG22156 [Caenorhabditis
  misc_feature (1)..(115): Homolog of NCBI NO: 6321716 NR Description: Protein required for cell viability; Ygr277cp cerevisiae] >gi|1723781|sp|P53332|YG5T_YEAST HYPOTHETICAL 34.3 KD
  misc_feature (1)..(103): Homolog of NCBI NO: 31213039 NR Description: ENSANGP00000014315 [Anopheles gambiae]
  misc_feature (1)..(103): Homolog of NCBI NO: 20094940 NR Description: Predicted nucleotidyltransferase of the HIGH [Methanopyrus kandleri AV19] >gi|19888182|gb|AAM02717.1| nucleotidyltransferase of the HIGH superfamily [Methanopyrus
  misc_feature (1)..(103): Homolog of NCBI NO: 24658602 NR Description: CG10575-PA [Drosophila melanogaster]

SEQ ID NO: 12816 - DNA, 896 bp, Zea mays subsp. mays
  misc_feature (1)..(896): Ceres Seq. ID no. 13494469
  misc_feature: MA Experiment ID: 108527 Result: Down-regulated in Transcription
  misc_feature: MA Experiment 108527 PARAMETER Experiment Name: Zm_5mM_NO_P Parameter: Age (day) Value: 8
  misc_feature: MA Experiment 108527 PARAMETER Experiment Name: Zm_5mM_NO_P Parameter: Organism Value: Zea mays
  misc_feature: MA Experiment 108527 PARAMETER Experiment Name: Zm_5mM_NO_P Parameter: Plant Line Value: 35A19
  misc_feature: MA Experiment 108527 PARAMETER Experiment Name: Zm_5mM_NO_P Parameter: Timepoint (hr) Value: 6
  misc_feature: MA Experiment 108527 PARAMETER Experiment Name: Zm_5mM_NO_P Parameter: Tissue Value: Aerial
  misc_feature: MA Experiment 108527 PARAMETER Experiment Name: Zm_5mM_NO_P Parameter: Treatment Value: 5mM NO vs. No Treatment
  misc_feature: MA Experiment ID: 108528 Result: Up-regulated in Transcription
  misc_feature: MA Experiment 108528 PARAMETER Experiment Name: Zm_Imbibed_Seeds_P Parameter: Age (day) Value: 5 vs. 2
  misc_feature: MA Experiment 108528 PARAMETER Experiment Name: Zm_Imbibed_Seeds_P Parameter: Organism Value: Zea mays
  misc_feature: MA Experiment 108528 PARAMETER Experiment Name: Zm_Imbibed_Seeds_P Parameter: Plant Line Value: 35A19
  misc_feature: MA Experiment 108528 PARAMETER Experiment Name: Zm_Imbibed_Seeds_P Parameter: Tissue Value: Aerial vs. Embryo
  misc_feature: MA Experiment ID: 108529 Result: Down-regulated in Transcription
  misc_feature: MA Experiment 108529 PARAMETER Experiment Name: Zm_Imbibed_Seeds_P Parameter: Age (day) Value: 5 vs. 2
  misc_feature: MA Experiment 108529 PARAMETER Experiment Name: Zm_Imbibed_Seeds_P Parameter: Organism Value: Zea mays
  misc_feature: MA Experiment 108529 PARAMETER Experiment Name: Zm_Imbibed_Seeds_P Parameter: Plant Line Value: 35A19
  misc_feature: MA Experiment 108529 PARAMETER Experiment Name: Zm_Imbibed_Seeds_P Parameter: Tissue Value: Roots vs. Embryo
  misc_feature: MA Experiment ID: 108530 Result: Up-regulated in Transcription
  misc_feature: MA Experiment 108530 PARAMETER Experiment Name: Zm_Imbibed_Seeds_P Parameter: Age (day) Value: 6 vs. 2
  misc_feature: MA Experiment 108530 PARAMETER Experiment Name: Zm_Imbibed_Seeds_P Parameter: Organism Value: Zea mays
  misc_feature: MA Experiment 108530 PARAMETER Experiment Name: Zm_Imbibed_Seeds_P Parameter: Plant Line Value: 35A19
  misc_feature: MA Experiment 108530 PARAMETER Experiment Name: Zm_Imbibed_Seeds_P Parameter: Tissue Value: Aerial vs. Embryo
  misc_feature: MA Experiment ID: 108534 Result: Up-regulated in Transcription
  misc_feature: MA Experiment 108534 PARAMETER Experiment Name: Zm_4deg_Cold_P Parameter: Age (hr) Value: 8
  misc_feature: MA Experiment 108534 PARAMETER Experiment Name: Zm_4deg_Cold_P Parameter: Organism Value: Zea mays
  misc_feature: MA Experiment 108534 PARAMETER Experiment Name: Zm_4deg_Cold_P Parameter: Plant Line Value: 35A19
  misc_feature: MA Experiment 108534 PARAMETER Experiment Name: Zm_4deg_Cold_P Parameter: Temperature (deg C) Value: 4 vs. 22
  misc_feature: MA Experiment 108534 PARAMETER Experiment Name: Zm_4deg_Cold_P Parameter: Timepoint (hr) Value: 6
  misc_feature: MA Experiment 108534 PARAMETER Experiment Name: Zm_4deg_Cold_P Parameter: Tissue Value: Aerial
  misc_feature: MA Experiment ID: 108536 Result: Down-regulated in Transcription
  misc_feature: MA Experiment 108536 PARAMETER Experiment Name: Zm_Meristem_P Parameter: Age (day) Value: 8
  misc_feature: MA Experiment 108536 PARAMETER Experiment Name: Zm_Meristem_P Parameter: Organism Value: Zea mays
  misc_feature: MA Experiment 108536 PARAMETER Experiment Name: Zm_Meristem_P Parameter: Plant Line Value: 35A19
  misc_feature: MA Experiment 108536 PARAMETER Experiment Name: Zm_Meristem_P Parameter: Tissue Value: Shoot Meristem vs. Above Shoot Meristem
  misc_feature: MA Experiment ID: 108545 Result: Up-regulated in Transcription
  misc_feature: MA Experiment 108545 PARAMETER Experiment Name: Zm_Imbibed_Seeds_P Parameter: Age (day) Value: 3 vs. 2
  misc_feature: MA Experiment 108545 PARAMETER Experiment Name: Zm_Imbibed_Seeds_P Parameter: Organism Value: Zea mays
  misc_feature: MA Experiment 108545 PARAMETER Experiment Name: Zm_Imbibed_Seeds_P Parameter: Plant Line Value: 35A19
  misc_feature: MA Experiment 108545 PARAMETER Experiment Name: Zm_Imbibed_Seeds_P Parameter: Tissue Value: Aerial vs. Embryo
  misc_feature: MA Experiment ID: 108546 Result: Down-regulated in Transcription
  misc_feature: MA Experiment 108546 PARAMETER Experiment Name: Zm_Imbibed_Seeds_P Parameter: Age (day) Value: 3 vs. 2
  misc_feature: MA Experiment 108546 PARAMETER Experiment Name: Zm_Imbibed_Seeds_P Parameter: Organism Value: Zea mays
  misc_feature: MA Experiment 108546 PARAMETER Experiment Name: Zm_Imbibed_Seeds_P Parameter: Plant Line Value: 35A19
  misc_feature: MA Experiment 108546 PARAMETER Experiment Name: Zm_Imbibed_Seeds_P Parameter: Tissue Value: Roots vs. Embryo
  misc_feature: MA Experiment ID: 108547 Result: Up-regulated in Transcription
  misc_feature: MA Experiment 108547 PARAMETER Experiment Name: Zm_Imbibed_Seeds_P Parameter: Age (day) Value: 4 vs. 2
  misc_feature: MA Experiment 108547 PARAMETER Experiment Name: Zm_Imbibed_Seeds_P Parameter: Organism Value: Zea mays
  misc_feature: MA Experiment 108547 PARAMETER Experiment Name: Zm_Imbibed_Seeds_P Parameter: Plant Line Value: 35A19
  misc_feature: MA Experiment 108547 PARAMETER Experiment Name: Zm_Imbibed_Seeds_P Parameter: Tissue Value: Aerial vs. Embryo
  misc_feature: MA Experiment ID: 108559 Result: Down-regulated in Transcription
  misc_feature: MA Experiment 108559 PARAMETER Experiment Name: Zm_5mM_NO_P Parameter: Age (day) Value: 8
  misc_feature: MA Experiment 108559 PARAMETER Experiment Name: Zm_5mM_NO_P Parameter: Organism Value: Zea mays
  misc_feature: MA Experiment 108559 PARAMETER Experiment Name: Zm_5mM_NO_P Parameter: Plant Line Value: 35A19
  misc_feature: MA Experiment 108559 PARAMETER Experiment Name: Zm_5mM_NO_P Parameter: Timepoint (hr) Value: 12
  misc_feature: MA Experiment 108559 PARAMETER Experiment Name: Zm_5mM_NO_P Parameter: Tissue Value: Aerial
  misc_feature: MA Experiment 108559 PARAMETER Experiment Name: Zm_5mM_NO_P Parameter: Treatment Value: 5mM NO vs. No Treatment
  misc_feature: MA Experiment ID: 108687 Result: Down-regulated in Transcription
  misc_feature: MA Experiment 108687 PARAMETER Experiment Name: Zm_Embryos-Flowers__P Parameter: Tissue Value: Embryo vs. Aerial+
  misc_feature: MA Experiment ID: 20000478 Result: Down-regulated in Transcription
  misc_feature: MA Experiment 20000478 PARAMETER Experiment Name: Zm_5mM_SA_P Parameter: Age (day) Value: 11
  misc_feature: MA Experiment 20000478 PARAMETER Experiment Name: Zm_5mM_SA_P Parameter: Organism Value: Zea mays
  misc_feature: MA Experiment 20000478 PARAMETER Experiment Name: Zm_5mM_SA_P Parameter: Plant Line Value: 35A19
  misc_feature: MA Experiment 20000478 PARAMETER Experiment Name: Zm_5mM_SA_P Parameter: Timepoint (hr) Value: 72
  misc_feature: MA Experiment 20000478 PARAMETER Experiment Name: Zm_5mM_SA_P Parameter: Tissue Value: Aerial
  misc_feature: MA Experiment 20000478 PARAMETER Experiment Name: Zm_5mM_SA_P Parameter: Treatment Value: 5mM SA vs. No Treatment
  misc_feature: MA Experiment ID: 20000480 Result: Down-regulated in Transcription
  misc_feature: MA Experiment 20000480 PARAMETER Experiment Name: Zm_Drought_P Parameter: Age (day) Value: 11
  misc_feature: MA Experiment 20000480 PARAMETER Experiment Name: Zm_Drought_P Parameter: Organism Value: Zea mays
  misc_feature: MA Experiment 20000480 PARAMETER Experiment Name: Zm_Drought_P Parameter: Plant Line Value: 35A19
  misc_feature: MA Experiment 20000480 PARAMETER Experiment Name: Zm_Drought_P Parameter: Timepoint (hr) Value: 72
  misc_feature: MA Experiment 20000480 PARAMETER Experiment Name: Zm_Drought_P Parameter: Tissue Value: Aerial
  misc_feature: MA Experiment 20000480 PARAMETER Experiment Name: Zm_Drought_P Parameter: Treatment Value: Drought vs. No Drought
  misc_feature: MA Experiment ID: 20000492 Result: Down-regulated in Transcription
  misc_feature: MA Experiment 20000492 PARAMETER Experiment Name: Zm_Hybrid_Seed_Dev_P Parameter: DAP Value: 12
  misc_feature: MA Experiment 20000492 PARAMETER Experiment Name: Zm_Hybrid_Seed_Dev_P Parameter: Organism Value: Zea mays
  misc_feature: MA Experiment 20000492 PARAMETER Experiment Name: Zm_Hybrid_Seed_Dev_P Parameter: Plant Line Value: 35A19
  misc_feature: MA Experiment 20000492 PARAMETER Experiment Name: Zm_Hybrid_Seed_Dev_P Parameter: Tissue Value: Fert Kernel vs. Unfert Floret
  misc_feature: MA Experiment ID: 20000535 Result: Down-regulated in Transcription
  misc_feature: MA Experiment 20000535 PARAMETER Experiment Name: Zm_Hybrid_Seed_Dev_P Parameter: DAP Value: 30 vs. 12
  misc_feature: MA Experiment 20000535 PARAMETER Experiment Name: Zm_Hybrid_Seed_Dev_P Parameter: Organism Value: Zea mays
  misc_feature: MA Experiment 20000535 PARAMETER Experiment Name: Zm_Hybrid_Seed_Dev_P Parameter: Plant Line Value: 35A19
  misc_feature: MA Experiment 20000535 PARAMETER Experiment Name: Zm_Hybrid_Seed_Dev_P Parameter: Tissue Value: Embryo vs. Unfert Floret
accacatctccagtcctccactgacaagccgccgccgctcttccacccccaccacccacccacctctccccggcctcgcacccatggccacgactttgatggttgcagccaccacctcctgctccccgggccgcgccgcgccgcgcctgaagccggtggcctcctcctcctccagcagcagcagcagcagctcggcgcggccgcggcggcccttggcgcagcagctcccgcggctgctggcgacggcggcggcggcggcggtggcagccgcgccgctcccggcgctggcggagcagatggagaaggccgcactgtttgacttcaacctgacgctcccggcgatcgcgaccgagttcctgctgctcatggtggcgctggacaagctctacttcacgccgctaggcaagttcatggatgagcgggacgccaagatccgcggtgagctcggcgatgtcaagggcgcctccgaggaggtgaagcagctggaggaccaggcggcggccatcatgaaggcggcgcgcgccgagatcgcggcggcgcttaacaagatgaagaaggagaccaccgcggagctggaggccaagctggacgagggacgcagccgtgtggaggccgagctcgtagaggcgctcgccaacctcgaggcgcagaaggaggaggctgtcaaggcgctcgacgcccagatcgcctcgctcagtgatgagatcgtcaagaaggtgctcccatccgcgtgatgaaaccaaaccggccctgccttatcctacgactatagttacatgaacatcataaattaatgataattttgaagaaaattggccgatgactccgacactttactcatgaaagattattggatgggttgtgtccaccgcctgtgttgggcgtggattggttgt

SEQ ID NO: 12817 - protein, 243 aa, Zea mays subsp. mays
  peptide (1)..(243): Ceres Seq. ID no. 13494470
  misc_feature (28)..(243): Homolog of NCBI NO: 29367413 NR Description: H+-transporting ATP synthase chain 9-like protein
  misc_feature (33)..(242): Homolog of NCBI NO: 15236722 NR Description: H+-transporting ATP synthase chain 9 - like
  misc_feature (33)..(242): Homolog of NCBI NO: 14596171 NR Description: H+-transporting ATP synthase-like protein
  misc_feature (25)..(241): Homolog of NCBI NO: 461595 NR Description: ATP synthase B' chain, chloroplast precursor
  misc_feature (25)..(241): Homolog of NCBI NO: 448445 NR Description: CF0 ATP synthase:SUBUNIT=9
  misc_feature (65)..(241): Homolog of NCBI NO: 5902610 NR Description: CFO ATP synthase subunit II precursor [Volvox
  misc_feature (93)..(240): Homolog of NCBI NO: 461596 NR Description: ATP synthase B' chain (Subunit II)
  misc_feature (104)..(240): Homolog of NCBI NO: 22297975 NR Description: H+-transporting ATP synthase chain b'
  misc_feature (92)..(242): Homolog of NCBI NO: 11465711 NR Description: ATP synthase CF0 B' chain [Porphyra purpurea]
  misc_feature (95)..(240): Homolog of NCBI NO: 2493072 NR Description: ATP synthase B' chain (Subunit II)
HISSPPLTSRRRSSTPTTHPPLPGLAPMATTLMVAATTSCSPGRAAPRLKPVASSSSSSSSSSSARPRRPLAQQLPRLLATAAAAAVAAAPLPALAEQMEKAALFDFNLTLPAIATEFLLLMVALDKLYFTPLGKFMDERDAKIRGELGDVKGASEEVKQLEDQAAAIMKAARAEIAAALNKMKKETTAELEAKLDEGRSRVEAELVEALANLEAQKEEAVKALDAQIASLSDEIVKKVLPSA

SEQ ID NO: 12818 - protein, 216 aa, Zea mays subsp. mays
  peptide (1)..(216): Ceres Seq. ID no. 13494471
  misc_feature (1)..(216): Homolog of NCBI NO: 29367413 NR Description: H+-transporting ATP synthase chain 9-like protein
  misc_feature (6)..(215): Homolog of NCBI NO: 15236722 NR Description: H+-transporting ATP synthase chain 9 - like
  misc_feature (6)..(215): Homolog of NCBI NO: 14596171 NR Description: H+-transporting ATP synthase-like protein
  misc_feature (1)..(214): Homolog of NCBI NO: 461595 NR Description: ATP synthase B' chain, chloroplast precursor
  misc_feature (1)..(214): Homolog of NCBI NO: 448445 NR Description: CF0 ATP synthase:SUBUNIT=9
  misc_feature (38)..(214): Homolog of NCBI NO: 5902610 NR Description: CFO ATP synthase subunit II precursor [Volvox
  misc_feature (66)..(213): Homolog of NCBI NO: 461596 NR Description: ATP synthase B' chain (Subunit II)
  misc_feature (77)..(213): Homolog of NCBI NO: 22297975 NR Description: H+-transporting ATP synthase chain b'
  misc_feature (65)..(215): Homolog of NCBI NO: 11465711 NR Description: ATP synthase CF0 B' chain [Porphyra purpurea]
  misc_feature (68)..(213): Homolog of NCBI NO: 2493072 NR Description: ATP synthase B' chain (Subunit II)
MATTLMVAATTSCSPGRAAPRLKPVASSSSSSSSSSSARPRRPLAQQLPRLLATAAAAAVAAAPLPALAEQMEKAALFDFNLTLPAIATEFLLLMVALDKLYFTPLGKFMDERDAKIRGELGDVKGASEEVKQLEDQAAAIMKAARAEIAAALNKMKKETTAELEAKLDEGRSRVEAELVEALANLEAQKEEAVKALDAQIASLSDEIVKKVLPSA

SEQ ID NO: 12819 - protein, 211 aa, Zea mays subsp. mays
  peptide (1)..(211): Ceres Seq. ID no. 13494472
  misc_feature (1)..(211): Homolog of NCBI NO: 29367413 NR Description: H+-transporting ATP synthase chain 9-like protein
  misc_feature (1)..(210): Homolog of NCBI NO: 15236722 NR Description: H+-transporting ATP synthase chain 9 - like
  misc_feature (1)..(210): Homolog of NCBI NO: 14596171 NR Description: H+-transporting ATP synthase-like protein
  misc_feature (1)..(209): Homolog of NCBI NO: 461595 NR Description: ATP synthase B' chain, chloroplast precursor
  misc_feature (1)..(209): Homolog of NCBI NO: 448445 NR Description: CF0 ATP synthase:SUBUNIT=9
  misc_feature (33)..(209): Homolog of NCBI NO: 5902610 NR Description: CFO ATP synthase subunit II precursor [Volvox
  misc_feature (61)..(208): Homolog of NCBI NO: 461596 NR Description: ATP synthase B' chain (Subunit II)
  misc_feature (72)..(208): Homolog of NCBI NO: 22297975 NR Description: H+-transporting ATP synthase chain b'
  misc_feature (60)..(210): Homolog of NCBI NO: 11465711 NR Description: ATP synthase CF0 B' chain [Porphyra purpurea]
  misc_feature (63)..(208): Homolog of NCBI NO: 2493072 NR Description: ATP synthase B' chain (Subunit II)
MVAATTSCSPGRAAPRLKPVASSSSSSSSSSSARPRRPLAQQLPRLLATAAAAAVAAAPLPALAEQMEKAALFDFNLTLPAIATEFLLLMVALDKLYFTPLGKFMDERDAKIRGELGDVKGASEEVKQLEDQAAAIMKAARAEIAAALNKMKKETTAELEAKLDEGRSRVEAELVEALANLEAQKEEAVKALDAQIASLSDEIVKKVLPSA

SEQ ID NO: 12820 - DNA, 1486 bp, Zea mays subsp. mays
  misc_feature (1)..(1486): Ceres Seq. ID no. 13499131
  misc_feature: MA Experiment ID: 108527 Result: Up-regulated in Transcription
  misc_feature: MA Experiment 108527 PARAMETER Experiment Name: Zm_5mM_NO_P Parameter: Age (day) Value: 8
  misc_feature: MA Experiment 108527 PARAMETER Experiment Name: Zm_5mM_NO_P Parameter: Organism Value: Zea mays
  misc_feature: MA Experiment 108527 PARAMETER Experiment Name: Zm_5mM_NO_P Parameter: Plant Line Value: 35A19
  misc_feature: MA Experiment 108527 PARAMETER Experiment Name: Zm_5mM_NO_P Parameter: Timepoint (hr) Value: 6
  misc_feature: MA Experiment 108527 PARAMETER Experiment Name: Zm_5mM_NO_P Parameter: Tissue Value: Aerial
  misc_feature: MA Experiment 108527 PARAMETER Experiment Name: Zm_5mM_NO_P Parameter: Treatment Value: 5mM NO vs. No Treatment
aaaattcgtcacaggtctcctggtccaggccgccgccggttcaatctctcctctgacttctccggctgtcctcgactgcgaacccgatctcgattcgatccccaagccatcccatggcggctgccctctcctcgcggcgtgccctgcacagcctccaccgccgcctcctcttccacccctccccctcacccgccgccgcacgccgcgcgctacccacttccactcgcagccccatccccgcacactcccccaccttctccttctccttctactcctcctcccgcttcttcaccaccgcgcgccccgatgcgaggctgcggcacgggatgctgccgcagcggctgataggcggggtcaggtcggtggcgaacggtgggtcgaaactgggaccgctgggtcagggggtcaaggggctggggcggcccatggaggcggcgaggagcgcggccgcgcggtaccgcgcggccgtcggcctgcaggtcgaggccttctggcggcgcaactccatgatcctcgtcggtgcggggggagtcatcgtctgtttcttgctctggaggatcatgttcggcatcgccagcaccttcgtcggcctctccgagggtatggccaagtacggcttcctcgcccttgccaccgccattgtcgcctttgccggtatgtatgcccgggcaaggttaaccataaaccctgacaaggtttaccggctggctatgacaaaactcaatacatctgctgccatccttgaagttatgggtgcgcccctaactggtactgatgtcagagcatatgttatgtctggaggaggcccgaaactgaaggacttcaaatttaagcttggcagtaaacggtgcttcctcattttccccatcaaaggatcagaaagaaggggcctcgtaagtgttgaggccaagaagaaaaatggacagtatgacatgaagctactagctgttgacataccaatggcatcaggtcctgaccagcggctgttcctcgtcggtgatgaacaagagtacaaggtgggcggggggcttgatatctgagctgcgagacccgatcgtaaaagctatggccgcggagaaggagtttgactatctcgacgagagagaggatgaggaggacgagcggagggagcgtgaggaggcggagcaagaggaagcggaagcattgaggcgcgaggaggaaaggctgcgccaggagggtgaagagcgtaggcggcgggaggaggctgagagcctggagaaagctacgtgacatgacttactgtactgactttccaccttgccttgtgcattgtcttctacctctgtctctaccggagtgtagcgatcagcggtttccacagcaggagattgcttccgagttcacttgagtttctggtggtcagttcggcgtcactagtctcaaagttgttgagaaggaaggaataattttgacggttacgcgacaggtcacttcggcgaagcaatgtaatttatagtggttgatc

SEQ ID NO: 12821 - protein, 308 aa, Zea mays subsp. mays
  peptide (1)..(308): Ceres Seq. ID no. 13499132
  misc_feature (1)..(306): Homolog of NCBI NO: 34896160 NR Description: hypothetical protein~similar to Arabidopsis
  misc_feature (99)..(306): Homolog of NCBI NO: 15228922 NR Description: expressed protein [Arabidopsis thaliana]
  misc_feature (99)..(306): Homolog of NCBI NO: 15226745 NR Description: expressed protein [Arabidopsis thaliana]
MAAALSSRRALHSLHRRLLFHPSPSPAAARRALPTSTRSPIPAHSPTFSFSFYSSSRFFTTARPDARLRHGMLPQRLIGGVRSVANGGSKLGPLGQGVKGLGRPMEAARSAAARYRAAVGLQVEAFWRRNSMILVGAGGVIVCFLLWRIMFGIASTFVGLSEGMAKYGFLALATAIVAFAGMYARARLTINPDKVYRLAMTKLNTSAAILEVMGAPLTGTDVRAYVMSGGGPKLKDFKFKLGSKRCFLIFPIKGSERRGLVSVEAKKKNGQYDMKLLAVDIPMASGPDQRLFLVGDEQEYKVGGGLDI

SEQ ID NO: 12822 - protein, 237 aa, Zea mays subsp. mays
  peptide (1)..(237): Ceres Seq. ID no. 13499133
  misc_feature (1)..(235): Homolog of NCBI NO: 34896160 NR Description: hypothetical protein~similar to Arabidopsis
  misc_feature (28)..(235): Homolog of NCBI NO: 15228922 NR Description: expressed protein [Arabidopsis thaliana]
  misc_feature (28)..(235): Homolog of NCBI NO: 15226745 NR Description: expressed protein [Arabidopsis thaliana]
MLPQRLIGGVRSVANGGSKLGPLGQGVKGLGRPMEAARSAAARYRAAVGLQVEAFWRRNSMILVGAGGVIVCFLLWRIMFGIASTFVGLSEGMAKYGFLALATAIVAFAGMYARARLTINPDKVYRLAMTKLNTSAAILEVMGAPLTGTDVRAYVMSGGGPKLKDFKFKLGSKRCFLIFPIKGSERRGLVSVEAKKKNGQYDMKLLAVDIPMASGPDQRLFLVGDEQEYKVGGGLDI

SEQ ID NO: 12823 - protein, 229 aa, Zea mays subsp. mays
  peptide (1)..(229): Ceres Seq. ID no. 13499134
KFVTGLLVQAAAGSISPLTSPAVLDCEPDLDSIPKPSHGGCPLLAACPAQPPPPPPLPPLPLTRRRTPRATHFHSQPHPRTLPHLLLLLLLLLPLLHHRAPRCEAAARDAAAAADRRGQVGGERWVETGTAGSGGQGAGAAHGGGEERGRAVPRGRRPAGRGLLAAQLHDPRRCGGSHRLFLALEDHVRHRQHLRRPLRGYGQVRLPRPCHRHCRLCRYVCPGKVNHKP

SEQ ID NO: 12824 - DNA, 900 bp, Zea mays subsp. mays
  misc_feature (1)..(900): Ceres Seq. ID no. 12414562
  misc_feature: MA Experiment ID: 108528 Result: Up-regulated in Transcription
  misc_feature: MA Experiment 108528 PARAMETER Experiment Name: Zm_Imbibed_Seeds_P Parameter: Age (day) Value: 5 vs. 2
  misc_feature: MA Experiment 108528 PARAMETER Experiment Name: Zm_Imbibed_Seeds_P Parameter: Organism Value: Zea mays
  misc_feature: MA Experiment 108528 PARAMETER Experiment Name: Zm_Imbibed_Seeds_P Parameter: Plant Line Value: 35A19
  misc_feature: MA Experiment 108528 PARAMETER Experiment Name: Zm_Imbibed_Seeds_P Parameter: Tissue Value: Aerial vs. Embryo
  misc_feature: MA Experiment ID: 108535 Result: Up-regulated in Transcription
  misc_feature: MA Experiment 108535 PARAMETER Experiment Name: Zm_Meristem_P Parameter: Age (day) Value: 8
  misc_feature: MA Experiment 108535 PARAMETER Experiment Name: Zm_Meristem_P Parameter: Organism Value: Zea mays
  misc_feature: MA Experiment 108535 PARAMETER Experiment Name: Zm_Meristem_P Parameter: Plant Line Value: 35A19
  misc_feature: MA Experiment 108535 PARAMETER Experiment Name: Zm_Meristem_P Parameter: Tissue Value: Root Meristem vs. Above Root Meristem
  misc_feature: MA Experiment ID: 108543 Result: Up-regulated in Transcription
  misc_feature: MA Experiment ID: 108545 Result: Up-regulated in Transcription
  misc_feature: MA Experiment 108545 PARAMETER Experiment Name: Zm_Imbibed_Seeds_P Parameter: Age (day) Value: 3 vs. 2
  misc_feature: MA Experiment 108545 PARAMETER Experiment Name: Zm_Imbibed_Seeds_P Parameter: Organism Value: Zea mays
  misc_feature: MA Experiment 108545 PARAMETER Experiment Name: Zm_Imbibed_Seeds_P Parameter: Plant Line Value: 35A19
  misc_feature: MA Experiment 108545 PARAMETER Experiment Name: Zm_Imbibed_Seeds_P Parameter: Tissue Value: Aerial vs. Embryo
  misc_feature: MA Experiment ID: 108547 Result: Up-regulated in Transcription
  misc_feature: MA Experiment 108547 PARAMETER Experiment Name: Zm_Imbibed_Seeds_P Parameter: Age (day) Value: 4 vs. 2
  misc_feature: MA Experiment 108547 PARAMETER Experiment Name: Zm_Imbibed_Seeds_P Parameter: Organism Value: Zea mays
  misc_feature: MA Experiment 108547 PARAMETER Experiment Name: Zm_Imbibed_Seeds_P Parameter: Plant Line Value: 35A19
  misc_feature: MA Experiment 108547 PARAMETER Experiment Name: Zm_Imbibed_Seeds_P Parameter: Tissue Value: Aerial vs. Embryo
tcttccttatccagatggcggcgccggccaactccaccaccttctccggcgacgtgtgggcggagctccgcctggccgacgcccgcgacgtgccgcacatccaccgcctcatacaccatatggccgagttcgagctgctcaccgacctcttcgccgccaccgaagagctcctcacgtccacgctcttcccatcgccgacgccgcctcccttcacctccttcacagccctcgtccttgacctatcccccacccccatcctcccggactcctcttccaccatcgcctcccgccgcctcgacctctccgcgtccccgctcgcagacccggaggccgccaccttcgcctccccgcgcggcggcgggcgcgtcactgccgggttcgtgatctgcttccccaactactccaccttcctctccaagcccgggctgtacgttgaggacatcttcgtgcgcgcaccctggcgccgccgcggccttggccggatgatgctgtctgccgtcgccggcagggccnccgagctcgggatgggccgggtggagtggtgcgtgctcgactggancaagaacgccatcgacttntacgaggggatgggcnccgatgtgctcccgcagtggcgcatntgccggctcgccggcgcagcccttgacaaatacaaggtcagccagaaggaggccgccggtgggaaggctgcagagtaggagggcctggaaattcgcttattgagagtgcctgccaataataaaggtggtggatttgcttgcgctgcttagctctggcatggtttagaactagatgattagtgattcagtgcatttgatcagctcattagggcgagatgggcaatcgggacttgttgtggtataaaccttgctgcattatgctagactgtcttctgatttg

SEQ ID NO: 12825 - protein, 231 aa, Zea mays subsp. mays
  peptide (1)..(231): Ceres Seq. ID no. 12414563
  misc_feature (122)..(197): Pfam Name: Acetyltransferase (GNAT) family Pfam Description: Acetyltransferase (GNAT) family
  misc_feature (5)..(217): Homolog of NCBI NO: 15225009 NR Description: unknown protein; protein id: At2g39020.1
  misc_feature (8)..(214): Homolog of NCBI NO: 18404927 NR Description: expressed protein; protein id: At2g39030.1, by cDNA: gi_15451161 [Arabidopsis thaliana]
  misc_feature (18)..(214): Homolog of NCBI NO: 15451162 NR Description: Unknown protein [Arabidopsis thaliana]
  misc_feature (2)..(222): Homolog of NCBI NO: 5852154 NR Description: tyramine hydroxycinnamoyltransferase [Nicotiana
  misc_feature (5)..(222): Homolog of NCBI NO: 17369608 NR Description: Tyramine N-feruloyltransferase 4/11
  misc_feature (5)..(222): Homolog of NCBI NO: 17380562 NR Description: Tyramine N-feruloyltransferase 10/30
  misc_feature (125)..(216): Homolog of NCBI NO: 22982569 NR Description: hypothetical protein [Burkholderia fungorum]
  misc_feature (20)..(62): Homolog of NCBI NO: 22982569 NR Description: hypothetical protein [Burkholderia fungorum]
  misc_feature (120)..(216): Homolog of NCBI NO: 22976703 NR Description: hypothetical protein [Ralstonia metallidurans]
  misc_feature (9)..(217): Homolog of NCBI NO: 19908257 NR Description: N-hydroxycinnamoyl-CoA:tyramine N-hydroxycinnamoyl
  misc_feature (171)..(171): Xaa is any aa, unknown or other
  misc_feature (186)..(186): Xaa is any aa, unknown or other
  misc_feature (192)..(192): Xaa is any aa, unknown or other
  misc_feature (198)..(198): Xaa is any aa, unknown or other
  misc_feature (206)..(206): Xaa is any aa, unknown or other
FLIQMAAPANSTTFSGDVWAELRLADARDVPHIHRLIHHMAEFELLTDLFAATEELLTSTLFPSPTPPPFTSFTALVLDLSPTPILPDSSSTIASRRLDLSASPLADPEAATFASPRGGGRVTAGFVICFPNYSTFLSKPGLYVEDIFVRAPWRRRGLGRMMLSAVAGRAXELGMGRVEWCVLDWXKNAIDXYEGMGXDVLPQWRXCRLAGAALDKYKVSQKEAAGGKAAE

SEQ ID NO: 12826 - protein, 227 aa, Zea mays subsp. mays
  peptide (1)..(227): Ceres Seq. ID no. 12414564
  misc_feature (118)..(193): Pfam Name: Acetyltransferase (GNAT) family Pfam Description: Acetyltransferase (GNAT) family
  misc_feature (1)..(213): Homolog of NCBI NO: 15225009 NR Description: unknown protein; protein id: At2g39020.1
  misc_feature (4)..(210): Homolog of NCBI NO: 18404927 NR Description: expressed protein; protein id: At2g39030.1, by cDNA: gi_15451161 [Arabidopsis thaliana]
  misc_feature (14)..(210): Homolog of NCBI NO: 15451162 NR Description: Unknown protein [Arabidopsis thaliana]
  misc_feature (1)..(218): Homolog of NCBI NO: 5852154 NR Description: tyramine hydroxycinnamoyltransferase [Nicotiana
  misc_feature (1)..(218): Homolog of NCBI NO: 17369608 NR Description: Tyramine N-feruloyltransferase 4/11
  misc_feature (1)..(218): Homolog of NCBI NO: 17380562 NR Description: Tyramine N-feruloyltransferase 10/30
  misc_feature (121)..(212): Homolog of NCBI NO: 22982569 NR Description: hypothetical protein [Burkholderia fungorum]
  misc_feature (16)..(58): Homolog of NCBI NO: 22982569 NR Description: hypothetical protein [Burkholderia fungorum]
  misc_feature (116)..(212): Homolog of NCBI NO: 22976703 NR Description: hypothetical protein [Ralstonia metallidurans]
  misc_feature (5)..(213): Homolog of NCBI NO: 19908257 NR Description: N-hydroxycinnamoyl-CoA:tyramine N-hydroxycinnamoyl
  misc_feature (167)..(167): Xaa is any aa, unknown or other
  misc_feature (182)..(182): Xaa is any aa, unknown or other
  misc_feature (188)..(188): Xaa is any aa, unknown or other
  misc_feature (194)..(194): Xaa is any aa, unknown or other
  misc_feature (202)..(202): Xaa is any aa, unknown or other
MAAPANSTTFSGDVWAELRLADARDVPHIHRLIHHMAEFELLTDLFAATEELLTSTLFPSPTPPPFTSFTALVLDLSPTPILPDSSSTIASRRLDLSASPLADPEAATFASPRGGGRVTAGFVICFPNYSTFLSKPGLYVEDIFVRAPWRRRGLGRMMLSAVAGRAXELGMGRVEWCVLDWXKNAIDXYEGMGXDVLPQWRXCRLAGAALDKYKVSQKEAAGGKAAE

SEQ ID NO: 12827 - protein, 192 aa, Zea mays subsp. mays
  peptide (1)..(192): Ceres Seq. ID no. 12414565
  misc_feature (83)..(158): Pfam Name: Acetyltransferase (GNAT) family Pfam Description: Acetyltransferase (GNAT) family
  misc_feature (1)..(178): Homolog of NCBI NO: 15225009 NR Description: unknown protein; protein id: At2g39020.1
  misc_feature (1)..(175): Homolog of NCBI NO: 18404927 NR Description: expressed protein; protein id: At2g39030.1, by cDNA: gi_15451161 [Arabidopsis thaliana]
  misc_feature (1)..(175): Homolog of NCBI NO: 15451162 NR Description: Unknown protein [Arabidopsis thaliana]
  misc_feature (1)..(183): Homolog of NCBI NO: 5852154 NR Description: tyramine hydroxycinnamoyltransferase [Nicotiana
  misc_feature (1)..(183): Homolog of NCBI NO: 17369608 NR Description: Tyramine N-feruloyltransferase 4/11
  misc_feature (1)..(183): Homolog of NCBI NO: 17380562 NR Description: Tyramine N-feruloyltransferase 10/30
  misc_feature (86)..(177): Homolog of NCBI NO: 22982569 NR Description: hypothetical protein [Burkholderia fungorum]
  misc_feature (1)..(23): Homolog of NCBI NO: 22982569 NR Description: hypothetical protein [Burkholderia fungorum]
  misc_feature (81)..(177): Homolog of NCBI NO: 22976703 NR Description: hypothetical protein [Ralstonia metallidurans]
  misc_feature (1)..(178): Homolog of NCBI NO: 19908257 NR Description: N-hydroxycinnamoyl-CoA:tyramine N-hydroxycinnamoyl
  misc_feature (132)..(132): Xaa is any aa, unknown or other
  misc_feature (147)..(147): Xaa is any aa, unknown or other
  misc_feature (153)..(153): Xaa is any aa, unknown or other
  misc_feature (159)..(159): Xaa is any aa, unknown or other
  misc_feature (167)..(167): Xaa is any aa, unknown or other
MAEFELLTDLFAATEELLTSTLFPSPTPPPFTSFTALVLDLSPTPILPDSSSTIASRRLDLSASPLADPEAATFASPRGGGRVTAGFVICFPNYSTFLSKPGLYVEDIFVRAPWRRRGLGRMMLSAVAGRAXELGMGRVEWCVLDWXKNAIDXYEGMGXDVLPQWRXCRLAGAALDKYKVSQKEAAGGKAAE

SEQ ID NO: 12828 - DNA, 2286 bp, Zea mays subsp. mays
  misc_feature (1)..(2286): Ceres Seq. ID no. 12414637
  misc_feature: MA Experiment ID: 108529 Result: Up-regulated in Transcription
  misc_feature: MA Experiment 108529 PARAMETER Experiment Name: Zm_Imbibed_Seeds_P Parameter: Age (day) Value: 5 vs. 2
  misc_feature: MA Experiment 108529 PARAMETER Experiment Name: Zm_Imbibed_Seeds_P Parameter: Organism Value: Zea mays
  misc_feature: MA Experiment 108529 PARAMETER Experiment Name: Zm_Imbibed_Seeds_P Parameter: Plant Line Value: 35A19
  misc_feature: MA Experiment 108529 PARAMETER Experiment Name: Zm_Imbibed_Seeds_P Parameter: Tissue Value: Roots vs. Embryo
  misc_feature: MA Experiment ID: 108535 Result: Down-regulated in Transcription
  misc_feature: MA Experiment 108535 PARAMETER Experiment Name: Zm_Meristem_P Parameter: Age (day) Value: 8
  misc_feature: MA Experiment 108535 PARAMETER Experiment Name: Zm_Meristem_P Parameter: Organism Value: Zea mays
  misc_feature: MA Experiment 108535 PARAMETER Experiment Name: Zm_Meristem_P Parameter: Plant Line Value: 35A19
  misc_feature: MA Experiment 108535 PARAMETER Experiment Name: Zm_Meristem_P Parameter: Tissue Value: Root Meristem vs. Above Root Meristem
  misc_feature: MA Experiment ID: 108536 Result: Down-regulated in Transcription
  misc_feature: MA Experiment 108536 PARAMETER Experiment Name: Zm_Meristem_P Parameter: Age (day) Value: 8
  misc_feature: MA Experiment 108536 PARAMETER Experiment Name: Zm_Meristem_P Parameter: Organism Value: Zea mays
  misc_feature: MA Experiment 108536 PARAMETER Experiment Name: Zm_Meristem_P Parameter: Plant Line Value: 35A19
  misc_feature: MA Experiment 108536 PARAMETER Experiment Name: Zm_Meristem_P Parameter: Tissue Value: Shoot Meristem vs. Above Shoot Meristem
  misc_feature: MA Experiment ID: 108543 Result: Up-regulated in Transcription
  misc_feature: MA Experiment ID: 108556 Result: Down-regulated in Transcription
  misc_feature: MA Experiment 108556 PARAMETER Experiment Name: Zm_Drought_P Parameter: Age (day) Value: 9
  misc_feature: MA Experiment 108556 PARAMETER Experiment Name: Zm_Drought_P Parameter: Organism Value: Zea mays
  misc_feature: MA Experiment 108556 PARAMETER Experiment Name: Zm_Drought_P Parameter: Plant Line Value: 35A19
  misc_feature: MA Experiment 108556 PARAMETER Experiment Name: Zm_Drought_P Parameter: Timepoint (hr) Value: 24
  misc_feature: MA Experiment 108556 PARAMETER Experiment Name: Zm_Drought_P Parameter: Tissue Value: Aerial
  misc_feature: MA Experiment 108556 PARAMETER Experiment Name: Zm_Drought_P Parameter: Treatment Value: Drought vs. No Drought
  misc_feature: MA Experiment ID: 108687 Result: Down-regulated in Transcription
  misc_feature: MA Experiment 108687 PARAMETER Experiment Name: Zm_Embryos-Flowers__P Parameter: Tissue Value: Embryo vs. Aerial+
  misc_feature: MA Experiment ID: 108689 Result: Down-regulated in Transcription
  misc_feature: MA Experiment 108689 PARAMETER Experiment Name: Zm_Drought_Roots_P Parameter: Age (day) Value: 9
  misc_feature: MA Experiment 108689 PARAMETER Experiment Name: Zm_Drought_Roots_P Parameter: Organism Value: Zea mays
  misc_feature: MA Experiment 108689 PARAMETER Experiment Name: Zm_Drought_Roots_P Parameter: Plant Line Value: 35A19
  misc_feature: MA Experiment 108689 PARAMETER Experiment Name: Zm_Drought_Roots_P Parameter: Timepoint (hr) Value: 24
  misc_feature: MA Experiment 108689 PARAMETER Experiment Name: Zm_Drought_Roots_P Parameter: Tissue Value: Roots
  misc_feature: MA Experiment 108689 PARAMETER Experiment Name: Zm_Drought_Roots_P Parameter: Treatment Value: Drought vs. No Drought
  misc_feature: MA Experiment ID: 20000477 Result: Down-regulated in Transcription
  misc_feature: MA Experiment 20000477 PARAMETER Experiment Name: Zm_5mM_SA_P Parameter: Age (day) Value: 10
  misc_feature: MA Experiment 20000477 PARAMETER Experiment Name: Zm_5mM_SA_P Parameter: Organism Value: Zea mays
  misc_feature: MA Experiment 20000477 PARAMETER Experiment Name: Zm_5mM_SA_P Parameter: Plant Line Value: 35A19
  misc_feature: MA Experiment 20000477 PARAMETER Experiment Name: Zm_5mM_SA_P Parameter: Timepoint (hr) Value: 48
  misc_feature: MA Experiment 20000477 PARAMETER Experiment Name: Zm_5mM_SA_P Parameter: Tissue Value: Aerial
  misc_feature: MA Experiment 20000477 PARAMETER Experiment Name: Zm_5mM_SA_P Parameter: Treatment Value: 5mM SA vs. No Treatment
  misc_feature: MA Experiment ID: 20000478 Result: Down-regulated in Transcription
  misc_feature: MA Experiment 20000478 PARAMETER Experiment Name: Zm_5mM_SA_P Parameter: Age (day) Value: 11
  misc_feature: MA Experiment 20000478 PARAMETER Experiment Name: Zm_5mM_SA_P Parameter: Organism Value: Zea mays
  misc_feature: MA Experiment 20000478 PARAMETER Experiment Name: Zm_5mM_SA_P Parameter: Plant Line Value: 35A19
  misc_feature: MA Experiment 20000478 PARAMETER Experiment Name: Zm_5mM_SA_P Parameter: Timepoint (hr) Value: 72
  misc_feature: MA Experiment 20000478 PARAMETER Experiment Name: Zm_5mM_SA_P Parameter: Tissue Value: Aerial
  misc_feature: MA Experiment 20000478 PARAMETER Experiment Name: Zm_5mM_SA_P Parameter: Treatment Value: 5mM SA vs. No Treatment
  misc_feature: MA Experiment ID: 20000479 Result: Down-regulated in Transcription
  misc_feature: MA Experiment 20000479 PARAMETER Experiment Name: Zm_Drought_P Parameter: Age (day) Value: 10
  misc_feature: MA Experiment 20000479 PARAMETER Experiment Name: Zm_Drought_P Parameter: Organism Value: Zea mays
  misc_feature: MA Experiment 20000479 PARAMETER Experiment Name: Zm_Drought_P Parameter: Plant Line Value: 35A19
  misc_feature: MA Experiment 20000479 PARAMETER Experiment Name: Zm_Drought_P Parameter: Timepoint (hr) Value: 48
  misc_feature: MA Experiment 20000479 PARAMETER Experiment Name: Zm_Drought_P Parameter: Tissue Value: Aerial
  misc_feature: MA Experiment 20000479 PARAMETER Experiment Name: Zm_Drought_P Parameter: Treatment Value: Drought vs. No Drought
  misc_feature: MA Experiment ID: 20000480 Result: Down-regulated in Transcription
  misc_feature: MA Experiment 20000480 PARAMETER Experiment Name: Zm_Drought_P Parameter: Age (day) Value: 11
  misc_feature: MA Experiment 20000480 PARAMETER Experiment Name: Zm_Drought_P Parameter: Organism Value: Zea mays
  misc_feature: MA Experiment 20000480 PARAMETER Experiment Name: Zm_Drought_P Parameter: Plant Line Value: 35A19
  misc_feature: MA Experiment 20000480 PARAMETER Experiment Name: Zm_Drought_P Parameter: Timepoint (hr) Value: 72
  misc_feature: MA Experiment 20000480 PARAMETER Experiment Name: Zm_Drought_P Parameter: Tissue Value: Aerial
  misc_feature: MA Experiment 20000480 PARAMETER Experiment Name: Zm_Drought_P Parameter: Treatment Value: Drought vs. No Drought
  misc_feature: MA Experiment ID: 20000492 Result: Down-regulated in Transcription
  misc_feature: MA Experiment 20000492 PARAMETER Experiment Name: Zm_Hybrid_Seed_Dev_P Parameter: DAP Value: 12
  misc_feature: MA Experiment 20000492 PARAMETER Experiment Name: Zm_Hybrid_Seed_Dev_P Parameter: Organism Value: Zea mays
  misc_feature: MA Experiment 20000492 PARAMETER Experiment Name: Zm_Hybrid_Seed_Dev_P Parameter: Plant Line Value: 35A19
  misc_feature: MA Experiment 20000492 PARAMETER Experiment Name: Zm_Hybrid_Seed_Dev_P Parameter: Tissue Value: Fert Kernel vs. Unfert Floret
  misc_feature: MA Experiment ID: 20000535 Result: Down-regulated in Transcription
  misc_feature: MA Experiment 20000535 PARAMETER Experiment Name: Zm_Hybrid_Seed_Dev_P Parameter: DAP Value: 30 vs. 12
  misc_feature: MA Experiment 20000535 PARAMETER Experiment Name: Zm_Hybrid_Seed_Dev_P Parameter: Organism Value: Zea mays
  misc_feature: MA Experiment 20000535 PARAMETER Experiment Name: Zm_Hybrid_Seed_Dev_P Parameter: Plant Line Value: 35A19
  misc_feature: MA Experiment 20000535 PARAMETER Experiment Name: Zm_Hybrid_Seed_Dev_P Parameter: Tissue Value: Embryo vs. Unfert Floret
atctgcctctctcttcccctccctctctggaaccagggtggttgtcaagcggtgttggagttgggagtccttgccattggtacaagagcaagaagcaaggacagggaggggcgagaggaggaagaaagcgagggacactagaaaggtgcttgctttgtttccagttgcttcttctctctccctgggcgggagagaaagaagcaggagagatatgggcgagatggtcgtggccgggtatggcatggacaaggctctgcgggccagcgtcagcttcgacacgccatgcggcgcgctgctgcgcgagcttgagcaaatatggacagagattggggagcgtgaacaagataaagatcgcatgttccttgaactggaaacaggagtgcatgcgtgtgtaccgtagaaaggttgatagtgccaatgctgagagagcccagctccgtcagtcactgatggccaaagaagcagagcttaaagctctagttgcttctatcggggaaaatggcccacgatttacggtggatgaaaagcacacatcgttgaaagatcaaacttgctgcagtggcacctcttttggaagatcttagagtaaagaaacaagacagagtcaaacaaatctcaaatgtgcaatgtcaaatcgagaagataaaagcacaaatttctgatcacaattatcaggacagtgatggttccatcaaacaacttaacgatgaccatgacttatcgaccagaagaatttctgatcttcaaatgcaactgcgtaatctacagaaggagaagtccgatcgtcttcagaaggtttttatatatgtggatgaagtgcacagcctatgtgcagtgcttgggatggattttccaaagactgtaaaagaggtccacccgagtttgcatggatccaactctgaaaattcaacaaatattagtgatagcactcttgaaggtcttactcagactatcctgaagctcaaagcagaaaagaagacaagagttttaaagttgcaagagactgtagaaaaacttcacaagttatggaatctgatggagtcaactgagaaagagaggatacacttctctgaagtagctgctattcttggatctactgaggaagagatcaattctccaggcattctgtcattagagacaattcagaagactgaagaggaagtcgaaaagctaactgtacaaaaaactagtagaatgaaggagcttgttctcaagaaaaggttagaactagaaggcatctgtagaaatgcacacatggagcctgatatgagcacagcaccagagaagatcaccgcgctgattgattccggtttagtggatccttgcgaactcctttccagcattgaagtgcaaataacaaaagcaaatgaagagtccttaacgaggaaagatatcatggagagagtggataaatggctatcagcttgtgatgaagagacttggcttgaggaatataaccaagatgataataggtatagtgctggcaggggtgcccacttgaatcttaagcgtgcagagaaggcaaggataactgtccaaaagattccaactatgattgacagcttgatagccaaaacttttgcatgggaggatgaaagaaatgtgccatttttatatgatgggattcgtttggttgccattttggaagagcaaaaactcagaagggcacaaagggaggaagagaagagacgcagccgggatcagaggaagctgcacagtttattgcttaaggagaaggagttgattttcgggtccaaacctagtcctagaaagacaagcagcttcaataggaggaccagcaaccaccatccaaacgcaaatggcgctggattcatgactccggtgccacgccgagtttcagctggcagtgccaccccagagcttctgaccccacgctcgtattctggccggtacaacaactacttcaaggagaacaggcgcctgacagctgcaccactgaacttctcagttggttccaaggaggatagcatgtcatccttcgcatccatcagtggctcggaacctgattcgccattgtttttgcactaagtgttggttagggaggagacttcttggtgagaagggtggatagcctcaagatcggaccattgtgtgtgtgtgtgtgtggcagctgttaacattgctgattggtaacaacaggttgtgacaagtttagatgcgattgcttgtagatataatatctaacattcatggttctgctgtacttccaaatttaagttgtaagtcgtttggttaggaaggatgcaatgcccaagtgtgcaatgt

SEQ ID NO: 12829 - protein, 433 aa, Zea mays subsp. mays
  peptide (1)..(433): Ceres Seq. ID no. 12414638
  misc_feature (1)..(429): Pfam Name: Microtubule associated protein (MAP65/ASE1 family) Pfam Description: Microtubule associated protein (MAP65/ASE1
  misc_feature (1)..(433): Homolog of NCBI NO: 27357984 NR Description: Unknown protein [Oryza sativa (japonica
  misc_feature (1)..(430): Homolog of NCBI NO: 25410943 NR Description: hypothetical protein At2g01910 [imported] - thaliana >gi|4522009|gb|AAD21782.1| unknown protein [Arabidopsis
  misc_feature (1)..(430): Homolog of NCBI NO: 30677965 NR Description: microtubule associated protein (MAP65/ASE1)
  misc_feature (1)..(431): Homolog of NCBI NO: 21539547 NR Description: unknown protein [Arabidopsis thaliana]
  misc_feature (81)..(431): Homolog of NCBI NO: 8778239 NR Description: F10B6.9 [Arabidopsis thaliana]
  misc_feature (1)..(85): Homolog of NCBI NO: 8778239 NR Description: F10B6.9 [Arabidopsis thaliana]
  misc_feature (1)..(424): Homolog of NCBI NO: 15240485 NR Description: putative protein; protein id: At5g55230.1 thaliana] >gi|9758120|dbj|BAB08592.1| similarity to unknown protein [Arabidopsis thaliana]
  misc_feature (1)..(411): Homolog of NCBI NO: 28301942 NR Description: unknown protein [Oryza sativa (japonica
  misc_feature (1)..(429): Homolog of NCBI NO: 11558254 NR Description: microtubule-associated protein MAP65-1b
  misc_feature (1)..(429): Homolog of NCBI NO: 11558256 NR Description: microtubule-associated protein MAP65-1c
MQLRNLQKEKSDRLQKVFIYVDEVHSLCAVLGMDFPKTVKEVHPSLHGSNSENSTNISDSTLEGLTQTILKLKAEKKTRVLKLQETVEKLHKLWNLMESTEKERIHFSEVAAILGSTEEEINSPGILSLETIQKTEEEVEKLTVQKTSRMKELVLKKRLELEGICRNAHMEPDMSTAPEKITALIDSGLVDPCELLSSIEVQITKANEESLTRKDIMERVDKWLSACDEETWLEEYNQDDNRYSAGRGAHLNLKRAEKARITVQKIPTMIDSLIAKTFAWEDERNVPFLYDGIRLVAILEEQKLRRAQREEEKRRSRDQRKLHSLLLKEKELIFGSKPSPRKTSSFNRRTSNHHPNANGAGFMTPVPRRVSAGSATPELLTPRSYSGRYNNYFKENRRLTAAPLNFSVGSKEDSMSSFASISGSEPDSPLFLH

SEQ ID NO: 12830 - protein, 401 aa, Zea mays subsp. mays
  peptide (1)..(401): Ceres Seq. ID no. 12414639
  misc_feature (1)..(397): Pfam Name: Microtubule associated protein (MAP65/ASE1 family) Pfam Description: Microtubule associated protein (MAP65/ASE1
  misc_feature (1)..(401): Homolog of NCBI NO: 27357984 NR Description: Unknown protein [Oryza sativa (japonica
  misc_feature (1)..(398): Homolog of NCBI NO: 25410943 NR Description: hypothetical protein At2g01910 [imported] - thaliana >gi|4522009|gb|AAD21782.1| unknown protein [Arabidopsis
  misc_feature (1)..(398): Homolog of NCBI NO: 30677965 NR Description: microtubule associated protein (MAP65/ASE1)
  misc_feature (1)..(399): Homolog of NCBI NO: 21539547 NR Description: unknown protein [Arabidopsis thaliana]
  misc_feature (49)..(399): Homolog of NCBI NO: 8778239 NR Description: F10B6.9 [Arabidopsis thaliana]
  misc_feature (1)..(53): Homolog of NCBI NO: 8778239 NR Description: F10B6.9 [Arabidopsis thaliana]
  misc_feature (1)..(392): Homolog of NCBI NO: 15240485 NR Description: putative protein; protein id: At5g55230.1 thaliana] >gi|9758120|dbj|BAB08592.1| similarity to unknown protein [Arabidopsis thaliana]
  misc_feature (1)..(379): Homolog of NCBI NO: 28301942 NR Description: unknown protein [Oryza sativa (japonica
  misc_feature (1)..(397): Homolog of NCBI NO: 11558254 NR Description: microtubule-associated protein MAP65-1b
  misc_feature (1)..(397): Homolog of NCBI NO: 11558256 NR Description: microtubule-associated protein MAP65-1c
MDFPKTVKEVHPSLHGSNSENSTNISDSTLEGLTQTILKLKAEKKTRVLKLQETVEKLHKLWNLMESTEKERIHFSEVAAILGSTEEEINSPGILSLETIQKTEEEVEKLTVQKTSRMKELVLKKRLELEGICRNAHMEPDMSTAPEKITALIDSGLVDPCELLSSIEVQITKANEESLTRKDIMERVDKWLSACDEETWLEEYNQDDNRYSAGRGAHLNLKRAEKARITVQKIPTMIDSLIAKTFAWEDERNVPFLYDGIRLVAILEEQKLRRAQREEEKRRSRDQRKLHSLLLKEKELIFGSKPSPRKTSSFNRRTSNHHPNANGAGFMTPVPRRVSAGSATPELLTPRSYSGRYNNYFKENRRLTAAPLNFSVGSKEDSMSSFASISGSEPDSPLFLH

SEQ ID NO: 12831 - protein, 337 aa, Zea mays subsp. mays
  peptide (1)..(337): Ceres Seq. ID no. 12414640
  misc_feature (1)..(333): Pfam Name: Microtubule associated protein (MAP65/ASE1 family) Pfam Description: Microtubule associated protein (MAP65/ASE1
  misc_feature (1)..(337): Homolog of NCBI NO: 27357984 NR Description: Unknown protein [Oryza sativa (japonica
  misc_feature (1)..(334): Homolog of NCBI NO: 25410943 NR Description: hypothetical protein At2g01910 [imported] - thaliana >gi|4522009|gb|AAD21782.1| unknown protein [Arabidopsis
  misc_feature (1)..(334): Homolog of NCBI NO: 30677965 NR Description: microtubule associated protein (MAP65/ASE1)
  misc_feature (1)..(335): Homolog of NCBI NO: 21539547 NR Description: unknown protein [Arabidopsis thaliana]
  misc_feature (1)..(335): Homolog of NCBI NO: 8778239 NR Description: F10B6.9 [Arabidopsis thaliana]
  misc_feature (1)..(328): Homolog of NCBI NO: 15240485 NR Description: putative protein; protein id: At5g55230.1 thaliana] >gi|9758120|dbj|BAB08592.1| similarity to unknown protein [Arabidopsis thaliana]
  misc_feature (1)..(315): Homolog of NCBI NO: 28301942 NR Description: unknown protein [Oryza sativa (japonica
  misc_feature (1)..(333): Homolog of NCBI NO: 11558254 NR Description: microtubule-associated protein MAP65-1b
  misc_feature (1)..(333): Homolog of NCBI NO: 11558256 NR Description: microtubule-associated protein MAP65-1c
  misc_feature (1)..(333): Homolog of NCBI NO: 11558252 NR Description: microtubule-associated protein MAP65-1a
MESTEKERIHFSEVAAILGSTEEEINSPGILSLETIQKTEEEVEKLTVQKTSRMKELVLKKRLELEGICRNAHMEPDMSTAPEKITALIDSGLVDPCELLSSIEVQITKANEESLTRKDIMERVDKWLSACDEETWLEEYNQDDNRYSAGRGAHLNLKRAEKARITVQKIPTMIDSLIAKTFAWEDERNVPFLYDGIRLVAILEEQKLRRAQREEEKRRSRDQRKLHSLLLKEKELIFGSKPSPRKTSSFNRRTSNHHPNANGAGFMTPVPRRVSAGSATPELLTPRSYSGRYNNYFKENRRLTAAPLNFSVGSKEDSMSSFASISGSEPDSPLFLH

SEQ ID NO: 12832 - DNA, 1289 bp, Zea mays subsp. mays
  misc_feature (1)..(1289): Ceres Seq. ID no. 13492669
  misc_feature: MA Experiment ID: 108535 Result: Down-regulated in Transcription
  misc_feature: MA Experiment 108535 PARAMETER Experiment Name: Zm_Meristem_P Parameter: Age (day) Value: 8
  misc_feature: MA Experiment 108535 PARAMETER Experiment Name: Zm_Meristem_P Parameter: Organism Value: Zea mays
  misc_feature: MA Experiment 108535 PARAMETER Experiment Name: Zm_Meristem_P Parameter: Plant Line Value: 35A19
  misc_feature: MA Experiment 108535 PARAMETER Experiment Name: Zm_Meristem_P Parameter: Tissue Value: Root Meristem vs. Above Root Meristem
  misc_feature: MA Experiment ID: 108556 Result: Up-regulated in Transcription
  misc_feature: MA Experiment 108556 PARAMETER Experiment Name: Zm_Drought_P Parameter: Age (day) Value: 9
  misc_feature: MA Experiment 108556 PARAMETER Experiment Name: Zm_Drought_P Parameter: Organism Value: Zea mays
  misc_feature: MA Experiment 108556 PARAMETER Experiment Name: Zm_Drought_P Parameter: Plant Line Value: 35A19
  misc_feature: MA Experiment 108556 PARAMETER Experiment Name: Zm_Drought_P Parameter: Timepoint (hr) Value: 24
  misc_feature: MA Experiment 108556 PARAMETER Experiment Name: Zm_Drought_P Parameter: Tissue Value: Aerial
  misc_feature: MA Experiment 108556 PARAMETER Experiment Name: Zm_Drought_P Parameter: Treatment Value: Drought vs. No Drought
  misc_feature: MA Experiment ID: 20000488 Result: Down-regulated in Transcription
  misc_feature: MA Experiment 20000488 PARAMETER Experiment Name: Zm_50mM_NH4NO3_L_to_H_P Parameter: Organism Value: Zea mays
  misc_feature: MA Experiment 20000488 PARAMETER Experiment Name: Zm_50mM_NH4NO3_L_to_H_P Parameter: Timepoint (hr) Value: 8
  misc_feature: MA Experiment 20000488 PARAMETER Experiment Name: Zm_50mM_NH4NO3_L_to_H_P Parameter: Tissue Value: Leaves
  misc_feature: MA Experiment 20000488 PARAMETER Experiment Name: Zm_50mM_NH4NO3_L_to_H_P Parameter: Treatment Value: 50mM NH4NO3 vs. 100mM Mannitol
  misc_feature: MA Experiment ID: 20000627 Result: Up-regulated in Transcription
  misc_feature: MA Experiment 20000627 PARAMETER Experiment Name: Zm_Herbicide-Treatments_P Parameter: Timepoint (hr) Value: 12
  misc_feature: MA Experiment 20000627 PARAMETER Experiment Name: Zm_Herbicide-Treatments_P Parameter: Tissue Value: Aerial
  misc_feature: MA Experiment 20000627 PARAMETER Experiment Name: Zm_Herbicide-Treatments_P Parameter: Treatment Value: Finale vs. No Treatment
  misc_feature: MA Experiment ID: 20000633 Result: Down-regulated in Transcription
  misc_feature: MA Experiment 20000633 PARAMETER Experiment Name: Zm_Herbicide-Treatments_P Parameter: Timepoint (hr) Value: 4
  misc_feature: MA Experiment 20000633 PARAMETER Experiment Name: Zm_Herbicide-Treatments_P Parameter: Tissue Value: Aerial
  misc_feature: MA Experiment 20000633 PARAMETER Experiment Name: Zm_Herbicide-Treatments_P Parameter: Treatment Value: Trimec vs. No Treatment
ctttgttgcctacagcctgtaacctactaccacaccaagctaatctgggtgaggtatcccgtgctcagcgcactattgaagccgtggagaagctgttgctgcaggggatgggttcagttattgaatccaaggacattattggaatctacaggactccattattggatgaccacggacaagtccgttaccatattcaccaaaagcaagtacaggttaccggatgtcatcgtggaaacgcaaatgtccgttatgcatggcttccttgctccaaaagcactgtgcatgtaatgatgctgaatggtgttttgcaagttgataagcctcccaataagtgtgcagcctatggagagggcactctccttacaccagcaaatcgttcggatgcctgtgtgaaatactctgatgttgatgaaaatggcattgtccgtatgatgttgtgccgtgtaataatggggaacgtagaaatagttcaccctggatctaagcagtgccaacctagtaataagtattttgatagtggagtagacgaccttaaaaatccacggcattacgttgtgtgggatatgaatctgaatagtcatatctattctgagtttgtagtcactgtcaaattgccttctaaaaccaaagattcctttgtatcgcaagaaaactgtcagaattcgtctgatctatcactggtgttgaactctagttcacctgattgtatttcacaggagatgaacctggaggcacctccagcattgggaggtggatgtgcagcccccatgctaggagattcgatggaaaaggctccaagctcaccttggatgcctttctccatgctgtttgcagcgatctctaccaaagtgtctcctgagaatatggacgtgattattggttgctatgaagagtttaagagcaagaaaataagccgaggtgaactagtgaagaagctgaggcatgtagttggtgatagagtgctaatatcgacgataatgcgtctccaagataagttacctccagtggataagcgtgaggaaccagacacatcggcgtccaaggtggtggcggaaccatgagatgggtgtcaggaggtgggcgaggaatgcagaaagggaggaaccagccgacttgacatagaaaaccctgtgggaagcagcaactatgaagcctcttgcatcagtcttgtgcatggaggctgctgtttgttctctgtatcgtaggtgtctacgtttgcgaggaaattgtatccggtgtttctctttcttcaaattaaaccacgcacatgcagctgccgtactttttgg

SEQ ID NO: 12833 - protein, 352 aa, Zea mays subsp. mays
  peptide (1)..(352): Ceres Seq. ID no. 13492670
  misc_feature (1)..(341): Homolog of NCBI NO: 37537150 NR Description: putative CEO protein [Oryza sativa (japonica group)] >gi|18057156|gb|AAL58179.1| putative CEO protein [Oryza
  misc_feature (22)..(340): Homolog of NCBI NO: 29126336 NR Description: putative CEO protein [Oryza sativa (japonica
  misc_feature (22)..(234): Homolog of NCBI NO: 29126337 NR Description: putative CEO protein, C-terminus truncated due to
  misc_feature (26)..(331): Homolog of NCBI NO: 30692664 NR Description: expressed protein [Arabidopsis thaliana] unknown protein [Arabidopsis thaliana]
  misc_feature (26)..(331): Homolog of NCBI NO: 18398335 NR Description: expressed protein [Arabidopsis thaliana]
  misc_feature (26)..(331): Homolog of NCBI NO: 11044957 NR Description: ceo protein [Arabidopsis thaliana]
  misc_feature (26)..(331): Homolog of NCBI NO: 14150488 NR Description: ATP8 [Arabidopsis thaliana]
  misc_feature (26)..(332): Homolog of NCBI NO: 15810143 NR Description: unknown protein [Arabidopsis thaliana]
  misc_feature (26)..(332): Homolog of NCBI NO: 18403862 NR Description: expressed protein [Arabidopsis thaliana] expressed protein [Arabidopsis thaliana]
  misc_feature (26)..(331): Homolog of NCBI NO: 25403152 NR Description: unknown protein [imported] - Arabidopsis thaliana
LLPTACNLLPHQANLGEVSRAQRTIEAVEKLLLQGMGSVIESKDIIGIYRTPLLDDHGQVRYHIHQKQVQVTGCHRGNANVRYAWLPCSKSTVHVMMLNGVLQVDKPPNKCAAYGEGTLLTPANRSDACVKYSDVDENGIVRMMLCRVIMGNVEIVHPGSKQCQPSNKYFDSGVDDLKNPRHYVVWDMNLNSHIYSEFVVTVKLPSKTKDSFVSQENCQNSSDLSLVLNSSSPDCISQEMNLEAPPALGGGCAAPMLGDSMEKAPSSPWMPFSMLFAAISTKVSPENMDVIIGCYEEFKSKKISRGELVKKLRHVVGDRVLISTIMRLQDKLPPVDKREEPDTSASKVVAEP

SEQ ID NO: 12834 - protein, 317 aa, Zea mays subsp. mays
  peptide (1)..(317): Ceres Seq. ID no. 13492671
  misc_feature (1)..(306): Homolog of NCBI NO: 37537150 NR Description: putative CEO protein [Oryza sativa (japonica group)] >gi|18057156|gb|AAL58179.1| putative CEO protein [Oryza
  misc_feature (1)..(305): Homolog of NCBI NO: 29126336 NR Description: putative CEO protein [Oryza sativa (japonica
  misc_feature (1)..(199): Homolog of NCBI NO: 29126337 NR Description: putative CEO protein, C-terminus truncated due to
  misc_feature (1)..(296): Homolog of NCBI NO: 30692664 NR Description: expressed protein [Arabidopsis thaliana] unknown protein [Arabidopsis thaliana]
  misc_feature (1)..(296): Homolog of NCBI NO: 18398335 NR Description: expressed protein [Arabidopsis thaliana]
  misc_feature (1)..(296): Homolog of NCBI NO: 11044957 NR Description: ceo protein [Arabidopsis thaliana]
  misc_feature (1)..(296): Homolog of NCBI NO: 14150488 NR Description: ATP8 [Arabidopsis thaliana]
  misc_feature (1)..(297): Homolog of NCBI NO: 15810143 NR Description: unknown protein [Arabidopsis thaliana]
  misc_feature (1)..(297): Homolog of NCBI NO: 18403862 NR Description: expressed protein [Arabidopsis thaliana] expressed protein [Arabidopsis thaliana]
  misc_feature (1)..(296): Homolog of NCBI NO: 25403152 NR Description: unknown protein [imported] - Arabidopsis thaliana
MGSVIESKDIIGIYRTPLLDDHGQVRYHIHQKQVQVTGCHRGNANVRYAWLPCSKSTVHVMMLNGVLQVDKPPNKCAAYGEGTLLTPANRSDACVKYSDVDENGIVRMMLCRVIMGNVEIVHPGSKQCQPSNKYFDSGVDDLKNPRHYVVWDMNLNSHIYSEFVVTVKLPSKTKDSFVSQENCQNSSDLSLVLNSSSPDCISQEMNLEAPPALGGGCAAPMLGDSMEKAPSSPWMPFSMLFAAISTKVSPENMDVIIGCYEEFKSKKISRGELVKKLRHVVGDRVLISTIMRLQDKLPPVDKREEPDTSASKVVAEP

SEQ ID NO: 12835 - protein, 257 aa, Zea mays subsp. mays
  peptide (1)..(257): Ceres Seq. ID no. 13492672
  misc_feature (1)..(237): Homolog of NCBI NO: 15810143 NR Description: unknown protein [Arabidopsis thaliana]
  misc_feature (1)..(237): Homolog of NCBI NO: 18403862 NR Description: expressed protein [Arabidopsis thaliana] expressed protein [Arabidopsis thaliana]
  misc_feature (1)..(236): Homolog of NCBI NO: 25403152 NR Description: unknown protein [imported] - Arabidopsis thaliana
  misc_feature (1)..(246): Homolog of NCBI NO: 37537150 NR Description: putative CEO protein [Oryza sativa (japonica group)] >gi|18057156|gb|AAL58179.1| putative CEO protein [Oryza
  misc_feature (1)..(245): Homolog of NCBI NO: 29126336 NR Description: putative CEO protein [Oryza sativa (japonica
  misc_feature (1)..(139): Homolog of NCBI NO: 29126337 NR Description: putative CEO protein, C-terminus truncated due to
  misc_feature (1)..(236): Homolog of NCBI NO: 30692664 NR Description: expressed protein [Arabidopsis thaliana] unknown protein [Arabidopsis thaliana]
  misc_feature (1)..(236): Homolog of NCBI NO: 18398335 NR Description: expressed protein [Arabidopsis thaliana]
  misc_feature (1)..(236): Homolog of NCBI NO: 11044957 NR Description: ceo protein [Arabidopsis thaliana]
  misc_feature (1)..(236): Homolog of NCBI NO: 14150488 NR Description: ATP8 [Arabidopsis thaliana]
MMLNGVLQVDKPPNKCAAYGEGTLLTPANRSDACVKYSDVDENGIVRMMLCRVIMGNVEIVHPGSKQCQPSNKYFDSGVDDLKNPRHYVVWDMNLNSHIYSEFVVTVKLPSKTKDSFVSQENCQNSSDLSLVLNSSSPDCISQEMNLEAPPALGGGCAAPMLGDSMEKAPSSPWMPFSMLFAAISTKVSPENMDVIIGCYEEFKSKKISRGELVKKLRHVVGDRVLISTIMRLQDKLPPVDKREEPDTSASKVVAEP

SEQ ID NO: 12836 - DNA, 1091 bp, Zea mays subsp. mays
  misc_feature (1)..(1091): Ceres Seq. ID no. 12414629
  misc_feature: MA Experiment ID: 20000534 Result: Down-regulated in Transcription
  misc_feature: MA Experiment 20000534 PARAMETER Experiment Name: Zm_Hybrid_Pollen_P Parameter: Age (day) Value: 8
  misc_feature: MA Experiment 20000534 PARAMETER Experiment Name: Zm_Hybrid_Pollen_P Parameter: Organism Value: Zea mays
  misc_feature: MA Experiment 20000534 PARAMETER Experiment Name: Zm_Hybrid_Pollen_P Parameter: Plant Line Value: 35A19
  misc_feature: MA Experiment 20000534 PARAMETER Experiment Name: Zm_Hybrid_Pollen_P Parameter: Tissue Value: Pollen vs. Aerial
gcacgcgcgcgcacgacgcacagatacctttcctctcttctcccgtcccctcttacgcggcaaccccggcgcggcatggcgagcccgtcctcctcctctttcccgtcccggaaggccctgagcaagatcgcctgcaggcgcctgcagaaggagctaacggagtggcaggtcaacccgcccgccggcttcgagcacagggtcaccgacaacctccagagttccttggcggcggcagctagctcacgtcccggcgaaccctcgtcggtggccaagggccgttacaggatgaaacaacaacaaaaaaggtgggtcgtcgatgtagccggggcaccaggcacgctctacaccggcgagacctacaaactgcaggtggatttctccgagcattatcccatggaggcacctcaggttatatttctgcatccagcaccgatgcatccacacatttacagtaatggacacatctgtttagatatattgtatgattcgtggtccccagcaatgactgtcagttctatctgtatcagcatattatctatgctgtccagctcaccagcaaagcaacgcccagccgataacgatcgctatgtcaggaactgtcgcaatgggaggtcaccaaaggagaccacgtggtggttccatgacgacactgtgtgatgggtgtttccggctgttgtcctgcccgcattttagttgccagactacatgggagatgatctaggcatatttcaagcgacccatttgaccagaaactaacacgctcttctggtttgtaaatcagtgtgcatcagcgtcaggtctctgtacttgttgatccttacaccgtctatagtatgtagaataatgtttgtatctttgtcaatttacggaacagacatgaaatgcaggtcactgttgacttgcaagatttctgaatccttctagttgaaagttgaaacgagggttatatatgcttggtagtctgctccagatgcagcagctttagctctagttccacttaactctagctcaaactatggcagagctcttttgggagtggctgtgtgatcgtgtaataatatagctgttgtgtgagtattgcaaaattctgt

SEQ ID NO: 12837 - protein, 218 aa, Zea mays subsp. mays
  peptide (1)..(218): Ceres Seq. ID no. 12414630
  misc_feature (93)..(218): Homolog of NCBI NO: 481811 NR Description: ubiquitin-conjugating enzyme UBC2-1 - Arabidopsis
  misc_feature (30)..(72): Homolog of NCBI NO: 481811 NR Description: ubiquitin-conjugating enzyme UBC2-1 - Arabidopsis
  misc_feature (93)..(218): Homolog of NCBI NO: 18401461 NR Description: E2, ubiquitin-conjugating enzyme 15 (UBC15);
  misc_feature (30)..(72): Homolog of NCBI NO: 18401461 NR Description: E2, ubiquitin-conjugating enzyme 15 (UBC15);
  misc_feature (93)..(218): Homolog of NCBI NO: 18410856 NR Description: E2, ubiquitin-conjugating enzyme 16 (UBC16); id: At1g75440.1, supported by cDNA: gi_17529345, supported by
  misc_feature (30)..(72): Homolog of NCBI NO: 18410856 NR Description: E2, ubiquitin-conjugating enzyme 16 (UBC16); id: At1g75440.1, supported by cDNA: gi_17529345, supported by
  misc_feature (93)..(218): Homolog of NCBI NO: 2801444 NR Description: ubiquitin-conjugating enzyme 16 [Arabidopsis
  misc_feature (30)..(72): Homolog of NCBI NO: 2801444 NR Description: ubiquitin-conjugating enzyme 16 [Arabidopsis
  misc_feature (93)..(218): Homolog of NCBI NO: 18419831 NR Description: E2, ubiquitin-conjugating enzyme 17 (UBC17); id: At4g36410.1, supported by cDNA: 40968., supported by cDNA:
  misc_feature (30)..(72): Homolog of NCBI NO: 18419831 NR Description: E2, ubiquitin-conjugating enzyme 17 (UBC17); id: At4g36410.1, supported by cDNA: 40968., supported by cDNA:
ARARTTHRYLSSLLPSPLTRQPRRGMASPSSSSFPSRKALSKIACRRLQKELTEWQVNPPAGFEHRVTDNLQSSLAAAASSRPGEPSSVAKGRYRMKQQQKRWVVDVAGAPGTLYTGETYKLQVDFSEHYPMEAPQVIFLHPAPMHPHIYSNGHICLDILYDSWSPAMTVSSICISILSMLSSSPAKQRPADNDRYVRNCRNGRSPKETTWWFHDDTV

SEQ ID NO: 12838 - protein, 193 aa, Zea mays subsp. mays
  peptide (1)..(193): Ceres Seq. ID no. 12414631
  misc_feature (68)..(193): Homolog of NCBI NO: 481811 NR Description: ubiquitin-conjugating enzyme UBC2-1 - Arabidopsis
  misc_feature (5)..(47): Homolog of NCBI NO: 481811 NR Description: ubiquitin-conjugating enzyme UBC2-1 - Arabidopsis
  misc_feature (68)..(193): Homolog of NCBI NO: 18401461 NR Description: E2, ubiquitin-conjugating enzyme 15 (UBC15);
  misc_feature (5)..(47): Homolog of NCBI NO: 18401461 NR Description: E2, ubiquitin-conjugating enzyme 15 (UBC15);
  misc_feature (68)..(193): Homolog of NCBI NO: 18410856 NR Description: E2, ubiquitin-conjugating enzyme 16 (UBC16); id: At1g75440.1, supported by cDNA: gi_17529345, supported by
  misc_feature (5)..(47): Homolog of NCBI NO: 18410856 NR Description: E2, ubiquitin-conjugating enzyme 16 (UBC16); id: At1g75440.1, supported by cDNA: gi_17529345, supported by
  misc_feature (68)..(193): Homolog of NCBI NO: 2801444 NR Description: ubiquitin-conjugating enzyme 16 [Arabidopsis
  misc_feature (5)..(47): Homolog of NCBI NO: 2801444 NR Description: ubiquitin-conjugating enzyme 16 [Arabidopsis
  misc_feature (68)..(193): Homolog of NCBI NO: 18419831 NR Description: E2, ubiquitin-conjugating enzyme 17 (UBC17); id: At4g36410.1, supported by cDNA: 40968., supported by cDNA:
  misc_feature (5)..(47): Homolog of NCBI NO: 18419831 NR Description: E2, ubiquitin-conjugating enzyme 17 (UBC17); id: At4g36410.1, supported by cDNA: 40968., supported by cDNA:
MASPSSSSFPSRKALSKIACRRLQKELTEWQVNPPAGFEHRVTDNLQSSLAAAASSRPGEPSSVAKGRYRMKQQQKRWVVDVAGAPGTLYTGETYKLQVDFSEHYPMEAPQVIFLHPAPMHPHIYSNGHICLDILYDSWSPAMTVSSICISILSMLSSSPAKQRPADNDRYVRNCRNGRSPKETTWWFHDDTV

SEQ ID NO: 12839 - protein, 123 aa, Zea mays subsp. mays
  peptide (1)..(123): Ceres Seq. ID no. 12414632
  misc_feature (1)..(123): Homolog of NCBI NO: 481811 NR Description: ubiquitin-conjugating enzyme UBC2-1 - Arabidopsis
  misc_feature (1)..(123): Homolog of NCBI NO: 18401461 NR Description: E2, ubiquitin-conjugating enzyme 15 (UBC15);
  misc_feature (1)..(123): Homolog of NCBI NO: 18410856 NR Description: E2, ubiquitin-conjugating enzyme 16 (UBC16); id: At1g75440.1, supported by cDNA: gi_17529345, supported by
  misc_feature (1)..(123): Homolog of NCBI NO: 2801444 NR Description: ubiquitin-conjugating enzyme 16 [Arabidopsis
  misc_feature (1)..(123): Homolog of NCBI NO: 18419831 NR Description: E2, ubiquitin-conjugating enzyme 17 (UBC17); id: At4g36410.1, supported by cDNA: 40968., supported by cDNA:
  misc_feature (1)..(92): Homolog of NCBI NO: 34897008 NR Description: putative ubiquitin-conjugating enzyme E2 [Oryza
  misc_feature (1)..(123): Homolog of NCBI NO: 18422281 NR Description: E2, ubiquitin-conjugating enzyme 18 (UBC18); id: At5g42990.1, supported by cDNA: gi_16648721, supported by gi_20856299 [Arabidopsis thaliana] >gi|9758588|dbj|BAB09201.1|
  misc_feature (1)..(123): Homolog of NCBI NO: 4090259 NR Description: ubiquitin-conjugating enzyme E2 [Pseudotsuga
  misc_feature (27)..(123): Homolog of NCBI NO: 25293670 NR Description: ubiquitin-conjugating enzyme 18 [imported] -
  misc_feature (1)..(64): Homolog of NCBI NO: 25293672 NR Description: protein F27F5.13 [imported] - Arabidopsis >gi|7767660|gb|AAF69157.1|AC007915_9 F27F5.13 [Arabidopsis
MKQQQKRWVVDVAGAPGTLYTGETYKLQVDFSEHYPMEAPQVIFLHPAPMHPHIYSNGHICLDILYDSWSPAMTVSSICISILSMLSSSPAKQRPADNDRYVRNCRNGRSPKETTWWFHDDTV

SEQ ID NO: 12840 - DNA, 1530 bp, Zea mays subsp. mays
  misc_feature (1)..(1530): Ceres Seq. ID no. 12358125
  misc_feature: MA Experiment ID: 20000492 Result: Down-regulated in Transcription
  misc_feature: MA Experiment 20000492 PARAMETER Experiment Name: Zm_Hybrid_Seed_Dev_P Parameter: DAP Value: 12
  misc_feature: MA Experiment 20000492 PARAMETER Experiment Name: Zm_Hybrid_Seed_Dev_P Parameter: Organism Value: Zea mays
  misc_feature: MA Experiment 20000492 PARAMETER Experiment Name: Zm_Hybrid_Seed_Dev_P Parameter: Plant Line Value: 35A19
  misc_feature: MA Experiment 20000492 PARAMETER Experiment Name: Zm_Hybrid_Seed_Dev_P Parameter: Tissue Value: Fert Kernel vs. Unfert Floret
aatacgatcaggtctagatcttatcggattatcgttttttgttgcctaggcgtgatgtgatttcgttggattgctgttggaagctattttttctgatctggatcggcctaaaagcaactccaagaacgagttctaaacttgagccttaaaatttgtgttaggaccttatttgatttatttaggatctccaacaaccaggccttaaaatcaggatacccagcttccatcttctctgccaggcaacgcgcttttttctagcatatccttctcgtcagctacgcattcgttcgcaatcggccgcatgaggcccacatcatccttcctcaagggctgcacagttaagcgcgacggctgcacatcacggctgcaaggtacagctcgacggctgctggtaggggcatcagcattaccgcatcatccctgcacggtaggcccttgacccctgcacaatacggctggacggctacgagacgagtggtggcggagtctgctcgctggaggttgggtgcgtggacgaggtgaatagttcatttagaacctgctgcagatttgcaacaaaaacatgtatgcaactaggagatctatgatccatctcgaagatgaagaattagatgatgaacttgaccacctcatgcttctcatgatgggtgaatatcggaagaggaagcataagcagcgaaagaagcatcgaggttcagtttttggacacaaggtttacaatcaaaatagagatgaacacgggcaagaagcaaatactggacacccatctcctcctagctgttcactcttaagtgctggaagatcttttgctgggactcaaaatgtttcaagcctgcagaaggatgaagcatggaaagtgaatgtacgcatccatggttgtgatcttgaacagggttatttatgtggaacgatggaagcgcttaatgttccattagcagatacacctgttgtgactttctgggagggggagatagtggatgctaaaaattacacttttttcactggaaagtgggaggcatcaccagatgatgatataagacattggtccaagttcccatcatttacgcctcttctgggtcagattgagacagatggtggcaagtctctggactttagcaactatccttatatatttatgagatggaaagagcaatattttgtcaacgttggagtcgactgtgggttaaccatcgctggtttctactacgtctgcttttcttgtagcgatggctccattaatggattttattatgatccaaatagcagtccatttcagaagctcgagctgaagtgtaccaatgagaaaaaatccgggttcaccttttcatcctacgagctgcagtgacaggacagatgccctcgacagacaactttctgttagcatatagtgtgtgtactgaactcgtactccctaatgaaaggaatgagtggtcgtttacgtaacagtttgttttctagcaagactaagcaaactgtcactttgtaatctgcagaagcatcctgtcctttctaaaatctaccttttgtatt

SEQ ID NO: 12841 - protein, 260 aa, Zea mays subsp. mays
  peptide (1)..(260): Ceres Seq. ID no. 12358126
  misc_feature (60)..(260): Homolog of NCBI NO: 29150393 NR Description: unknown protein [Oryza sativa (japonica
  misc_feature (80)..(170): Homolog of NCBI NO: 15224341 NR Description: hypothetical protein; protein id: At2g37680.1
  misc_feature (184)..(235): Homolog of NCBI NO: 15224341 NR Description: hypothetical protein; protein id: At2g37680.1
  misc_feature (168)..(260): Homolog of NCBI NO: 34895748 NR Description: P0024G09.20 [Oryza sativa (japonica
  misc_feature (74)..(243): Homolog of NCBI NO: 40747141 NR Description: hypothetical protein AN1179.2 [Aspergillus
  misc_feature (64)..(242): Homolog of NCBI NO: 23111007 NR Description: hypothetical protein MGC3048 [Homo sapiens]
  misc_feature (64)..(242): Homolog of NCBI NO: 12848536 NR Description: unnamed protein product [Mus musculus] unnamed protein product [Mus musculus] unnamed protein product [Mus musculus]
  misc_feature (64)..(242): Homolog of NCBI NO: 34328469 NR Description: RIKEN cDNA 4933439F18 [Mus musculus]
  misc_feature (64)..(242): Homolog of NCBI NO: 34870809 NR Description: similar to RIKEN cDNA 4933439F18 [Rattus
  misc_feature (64)..(242): Homolog of NCBI NO: 18676842 NR Description: unnamed protein product [Homo sapiens]
MYATRRSMIHLEDEELDDELDHLMLLMMGEYRKRKHKQRKKHRGSVFGHKVYNQNRDEHGQEANTGHPSPPSCSLLSAGRSFAGTQNVSSLQKDEAWKVNVRIHGCDLEQGYLCGTMEALNVPLADTPVVTFWEGEIVDAKNYTFFTGKWEASPDDDIRHWSKFPSFTPLLGQIETDGGKSLDFSNYPYIFMRWKEQYFVNVGVDCGLTIAGFYYVCFSCSDGSINGFYYDPNSSPFQKLELKCTNEKKSGFTFSSYELQ

SEQ ID NO: 12842 - protein, 253 aa, Zea mays subsp. mays
  peptide (1)..(253): Ceres Seq. ID no. 12358127
  misc_feature (53)..(253): Homolog of NCBI NO: 29150393 NR Description: unknown protein [Oryza sativa (japonica
  misc_feature (73)..(163): Homolog of NCBI NO: 15224341 NR Description: hypothetical protein; protein id: At2g37680.1
  misc_feature (177)..(228): Homolog of NCBI NO: 15224341 NR Description: hypothetical protein; protein id: At2g37680.1
  misc_feature (161)..(253): Homolog of NCBI NO: 34895748 NR Description: P0024G09.20 [Oryza sativa (japonica
  misc_feature (67)..(236): Homolog of NCBI NO: 40747141 NR Description: hypothetical protein AN1179.2 [Aspergillus
  misc_feature (57)..(235): Homolog of NCBI NO: 23111007 NR Description: hypothetical protein MGC3048 [Homo sapiens]
  misc_feature (57)..(235): Homolog of NCBI NO: 12848536 NR Description: unnamed protein product [Mus musculus] unnamed protein product [Mus musculus] unnamed protein product [Mus musculus]
  misc_feature (57)..(235): Homolog of NCBI NO: 34328469 NR Description: RIKEN cDNA 4933439F18 [Mus musculus]
  misc_feature (57)..(235): Homolog of NCBI NO: 34870809 NR Description: similar to RIKEN cDNA 4933439F18 [Rattus
  misc_feature (57)..(235): Homolog of NCBI NO: 18676842 NR Description: unnamed protein product [Homo sapiens]
MIHLEDEELDDELDHLMLLMMGEYRKRKHKQRKKHRGSVFGHKVYNQNRDEHGQEANTGHPSPPSCSLLSAGRSFAGTQNVSSLQKDEAWKVNVRIHGCDLEQGYLCGTMEALNVPLADTPVVTFWEGEIVDAKNYTFFTGKWEASPDDDIRHWSKFPSFTPLLGQIETDGGKSLDFSNYPYIFMRWKEQYFVNVGVDCGLTIAGFYYVCFSCSDGSINGFYYDPNSSPFQKLELKCTNEKKSGFTFSSYELQ

SEQ ID NO: 12843 - protein, 237 aa, Zea mays subsp. mays
  peptide (1)..(237): Ceres Seq. ID no. 12358128
  misc_feature (37)..(237): Homolog of NCBI NO: 29150393 NR Description: unknown protein [Oryza sativa (japonica
  misc_feature (57)..(147): Homolog of NCBI NO: 15224341 NR Description: hypothetical protein; protein id: At2g37680.1
  misc_feature (161)..(212): Homolog of NCBI NO: 15224341 NR Description: hypothetical protein; protein id: At2g37680.1
  misc_feature (145)..(237): Homolog of NCBI NO: 34895748 NR Description: P0024G09.20 [Oryza sativa (japonica
  misc_feature (51)..(220): Homolog of NCBI NO: 40747141 NR Description: hypothetical protein AN1179.2 [Aspergillus
  misc_feature (41)..(219): Homolog of NCBI NO: 23111007 NR Description: hypothetical protein MGC3048 [Homo sapiens]
  misc_feature (41)..(219): Homolog of NCBI NO: 12848536 NR Description: unnamed protein product [Mus musculus] unnamed protein product [Mus musculus] unnamed protein product [Mus musculus]
  misc_feature (41)..(219): Homolog of NCBI NO: 34328469 NR Description: RIKEN cDNA 4933439F18 [Mus musculus]
  misc_feature (41)..(219): Homolog of NCBI NO: 34870809 NR Description: similar to RIKEN cDNA 4933439F18 [Rattus
  misc_feature (41)..(219): Homolog of NCBI NO: 18676842 NR Description: unnamed protein product [Homo sapiens]
MLLMMGEYRKRKHKQRKKHRGSVFGHKVYNQNRDEHGQEANTGHPSPPSCSLLSAGRSFAGTQNVSSLQKDEAWKVNVRIHGCDLEQGYLCGTMEALNVPLADTPVVTFWEGEIVDAKNYTFFTGKWEASPDDDIRHWSKFPSFTPLLGQIETDGGKSLDFSNYPYIFMRWKEQYFVNVGVDCGLTIAGFYYVCFSCSDGSINGFYYDPNSSPFQKLELKCTNEKKSGFTFSSYELQ

SEQ ID NO: 12844 - DNA, 864 bp, Zea mays subsp. mays
  misc_feature (1)..(864): Ceres Seq. ID no. 12367137
  misc_feature: MA Experiment ID: 108543 Result: Up-regulated in Transcription
gcacgagaccattacctagaacatcctaatcaaaaaacccctcaacgaagcctctggtgcctcggccaccgcagcagcctggccctgccccggcccccgggcgtggtgtcaggtctcaggtgtggtggcgctttctcctctccggcacggtggccgcgtcatcccagctctcccgcgcggcggcggcggccgtttcctctcctgcgctcctcctgccgcacacagccagaaaattgcagctgaagtttgtttgaggataagcgacagctttgcgagtccttcgtgttgaaggagaaattgtagctgaagtgaaaaaacagcagggaacaatggcactatcacgaagtatgagagcatgtttgcacagtggaagacttgcacttcttgccatattggtctctggtggaattgtattgcaaatcttggcttgtgctctctataacaactggtggccaatgctaacagttctcatgtatcttatcctaccaatgcccctcatatttttcctgggttctgatacttcctccatgatgtccaatgggggagacggctgggtgaacttcacgaaattcttgacgggcgcatcaatagtagggagcatcgccattccgtcgatcctgaagcatgcgggcgtcattggatggggagccctgacgatggagctgtcatcctttgtggtctttggcgtggcaatcctgtggttcctccagatgaacggtgaagacgagtacagcggagtgttctaatccaaacctgctggttctcttgccagcgtggcactctgtgctgtgcatggtagttgtgaactgggctgtactgctacaacaggggaagcattgccctgggacctgatttactgacacc

SEQ ID NO: 12845 - protein, 138 aa, Zea mays subsp. mays
  peptide (1)..(138): Ceres Seq. ID no. 12367138
  misc_feature (7)..(134): Homolog of NCBI NO: 18398420 NR Description: Expressed protein; protein id: At1g32410.1, by cDNA: 252174., supported by cDNA: gi_13605733, supported by gi_17978900 [Arabidopsis thaliana]
  misc_feature (7)..(135): Homolog of NCBI NO: 21554354 NR Description: unknown [Arabidopsis thaliana]
  misc_feature (7)..(126): Homolog of NCBI NO: 25518386 NR Description: hypothetical protein F5D14.18 - Arabidopsis >gi|8920616|gb|AAF81338.1|AC007767_18 Contains similarity to a protein F19I3.26 gi|7485810 from Arabidopsis thaliana ESTs
  misc_feature (16)..(134): Homolog of NCBI NO: 12322900 NR Description: unknown protein; 72859-71336 [Arabidopsis
  misc_feature (16)..(134): Homolog of NCBI NO: 16648828 NR Description: AT3g11530/F24K9_21 [Arabidopsis thaliana] AT3g11530/F24K9_21 [Arabidopsis thaliana]
  misc_feature (22)..(134): Homolog of NCBI NO: 18399269 NR Description: expressed protein; protein id: At3g11530.1,
  misc_feature (54)..(134): Homolog of NCBI NO: 34905898 NR Description: P0458E05.25 [Oryza sativa (japonica
  misc_feature (19)..(134): Homolog of NCBI NO: 38103616 NR Description: hypothetical protein MG04054.4 [Magnaporthe
  misc_feature (26)..(133): Homolog of NCBI NO: 6322504 NR Description: Vacuolar Protein Sorting; Vps55p [Saccharomyces
  misc_feature (12)..(138): Homolog of NCBI NO: 24762759 NR Description: CG30423-PB [Drosophila melanogaster]
MALSRSMRACLHSGRLALLAILVSGGIVLQILACALYNNWWPMLTVLMYLILPMPLIFFLGSDTSSMMSNGGDGWVNFTKFLTGASIVGSIAIPSILKHAGVIGWGALTMELSSFVVFGVAILWFLQMNGEDEYSGVF

SEQ ID NO: 12846 - protein, 132 aa, Zea mays subsp. mays
  peptide (1)..(132): Ceres Seq. ID no. 12367139
  misc_feature (1)..(128): Homolog of NCBI NO: 18398420 NR Description: Expressed protein; protein id: At1g32410.1, by cDNA: 252174., supported by cDNA: gi_13605733, supported by gi_17978900 [Arabidopsis thaliana]
  misc_feature (1)..(129): Homolog of NCBI NO: 21554354 NR Description: unknown [Arabidopsis thaliana]
  misc_feature (1)..(120): Homolog of NCBI NO: 25518386 NR Description: hypothetical protein F5D14.18 - Arabidopsis >gi|8920616|gb|AAF81338.1|AC007767_18 Contains similarity to a protein F19I3.26 gi|7485810 from Arabidopsis thaliana ESTs
  misc_feature (10)..(128): Homolog of NCBI NO: 12322900 NR Description: unknown protein; 72859-71336 [Arabidopsis
  misc_feature (10)..(128): Homolog of NCBI NO: 16648828 NR Description: AT3g11530/F24K9_21 [Arabidopsis thaliana] AT3g11530/F24K9_21 [Arabidopsis thaliana]
  misc_feature (16)..(128): Homolog of NCBI NO: 18399269 NR Description: expressed protein; protein id: At3g11530.1,
  misc_feature (48)..(128): Homolog of NCBI NO: 34905898 NR Description: P0458E05.25 [Oryza sativa (japonica
  misc_feature (13)..(128): Homolog of NCBI NO: 38103616 NR Description: hypothetical protein MG04054.4 [Magnaporthe
  misc_feature (20)..(127): Homolog of NCBI NO: 6322504 NR Description: Vacuolar Protein Sorting; Vps55p [Saccharomyces
  misc_feature (6)..(132): Homolog of NCBI NO: 24762759 NR Description: CG30423-PB [Drosophila melanogaster]
MRACLHSGRLALLAILVSGGIVLQILACALYNNWWPMLTVLMYLILPMPLIFFLGSDTSSMMSNGGDGWVNFTKFLTGASIVGSIAIPSILKHAGVIGWGALTMELSSFVVFGVAILWFLQMNGEDEYSGVF

SEQ ID NO: 12847 - protein, 96 aa, Zea mays subsp. mays
  peptide (1)..(96): Ceres Seq. ID no. 12367140
  misc_feature (1)..(92): Homolog of NCBI NO: 18398420 NR Description: Expressed protein; protein id: At1g32410.1, by cDNA: 252174., supported by cDNA: gi_13605733, supported by gi_17978900 [Arabidopsis thaliana]
  misc_feature (1)..(93): Homolog of NCBI NO: 21554354 NR Description: unknown [Arabidopsis thaliana]
  misc_feature (1)..(84): Homolog of NCBI NO: 25518386 NR Description: hypothetical protein F5D14.18 - Arabidopsis >gi|8920616|gb|AAF81338.1|AC007767_18 Contains similarity to a protein F19I3.26 gi|7485810 from Arabidopsis thaliana ESTs
  misc_feature (1)..(92): Homolog of NCBI NO: 12322900 NR Description: unknown protein; 72859-71336 [Arabidopsis
  misc_feature (1)..(92): Homolog of NCBI NO: 16648828 NR Description: AT3g11530/F24K9_21 [Arabidopsis thaliana] AT3g11530/F24K9_21 [Arabidopsis thaliana]
  misc_feature (1)..(92): Homolog of NCBI NO: 18399269 NR Description: expressed protein; protein id: At3g11530.1,
  misc_feature (12)..(92): Homolog of NCBI NO: 34905898 NR Description: P0458E05.25 [Oryza sativa (japonica
  misc_feature (1)..(92): Homolog of NCBI NO: 38103616 NR Description: hypothetical protein MG04054.4 [Magnaporthe
  misc_feature (1)..(91): Homolog of NCBI NO: 6322504 NR Description: Vacuolar Protein Sorting; Vps55p [Saccharomyces
  misc_feature (1)..(96): Homolog of NCBI NO: 24762759 NR Description: CG30423-PB [Drosophila melanogaster]
MLTVLMYLILPMPLIFFLGSDTSSMMSNGGDGWVNFTKFLTGASIVGSIAIPSILKHAGVIGWGALTMELSSFVVFGVAILWFLQMNGEDEYSGVF

SEQ ID NO: 12848 - DNA, 618 bp, Zea mays subsp. mays
  misc_feature (1)..(618): Ceres Seq. ID no. 12414840
  misc_feature: MA Experiment ID: 108527 Result: Up-regulated in Transcription
  misc_feature: MA Experiment 108527 PARAMETER Experiment Name: Zm_5mM_NO_P Parameter: Age (day) Value: 8
  misc_feature: MA Experiment 108527 PARAMETER Experiment Name: Zm_5mM_NO_P Parameter: Organism Value: Zea mays
  misc_feature: MA Experiment 108527 PARAMETER Experiment Name: Zm_5mM_NO_P Parameter: Plant Line Value: 35A19
  misc_feature: MA Experiment 108527 PARAMETER Experiment Name: Zm_5mM_NO_P Parameter: Timepoint (hr) Value: 6
  misc_feature: MA Experiment 108527 PARAMETER Experiment Name: Zm_5mM_NO_P Parameter: Tissue Value: Aerial
  misc_feature: MA Experiment 108527 PARAMETER Experiment Name: Zm_5mM_NO_P Parameter: Treatment Value: 5mM NO vs. No Treatment
  misc_feature: MA Experiment ID: 108559 Result: Up-regulated in Transcription
  misc_feature: MA Experiment 108559 PARAMETER Experiment Name: Zm_5mM_NO_P Parameter: Age (day) Value: 8
  misc_feature: MA Experiment 108559 PARAMETER Experiment Name: Zm_5mM_NO_P Parameter: Organism Value: Zea mays
  misc_feature: MA Experiment 108559 PARAMETER Experiment Name: Zm_5mM_NO_P Parameter: Plant Line Value: 35A19
  misc_feature: MA Experiment 108559 PARAMETER Experiment Name: Zm_5mM_NO_P Parameter: Timepoint (hr) Value: 12
  misc_feature: MA Experiment 108559 PARAMETER Experiment Name: Zm_5mM_NO_P Parameter: Tissue Value: Aerial
  misc_feature: MA Experiment 108559 PARAMETER Experiment Name: Zm_5mM_NO_P Parameter: Treatment Value: 5mM NO vs. No Treatment
  misc_feature: MA Experiment ID: 20000478 Result: Up-regulated in Transcription
  misc_feature: MA Experiment 20000478 PARAMETER Experiment Name: Zm_5mM_SA_P Parameter: Age (day) Value: 11
  misc_feature: MA Experiment 20000478 PARAMETER Experiment Name: Zm_5mM_SA_P Parameter: Organism Value: Zea mays
  misc_feature: MA Experiment 20000478 PARAMETER Experiment Name: Zm_5mM_SA_P Parameter: Plant Line Value: 35A19
  misc_feature: MA Experiment 20000478 PARAMETER Experiment Name: Zm_5mM_SA_P Parameter: Timepoint (hr) Value: 72
  misc_feature: MA Experiment 20000478 PARAMETER Experiment Name: Zm_5mM_SA_P Parameter: Tissue Value: Aerial
  misc_feature: MA Experiment 20000478 PARAMETER Experiment Name: Zm_5mM_SA_P Parameter: Treatment Value: 5mM SA vs. No Treatment
cttcttattgtttgggagttatctccgttttgtctaccggtggggaagtatcagtgcaaaccatgtgggatttagcaattctgactcatcggagaatcatatgggtccaggccatcagcgaaatatgtctgactgcgacatggatgcaacattttactggatagggatggcatctatagctactattactgtactgttaccgactatcttgggcataactgcattgttcacaaagctaggattaatggtcgctggtggtattgtgctggcatcttttatgacatacgcagcggagcatcttgcaatctcagtcttcaacaagggtcaaaaatacaggaatgcgtcaagaactcgaagcttttgtttttaacgtttaagtaaaaaatccttgttgcattgtaggtagttttgtacacaaaaagaatgatgattcatttttaacacgtggccttcctgcccatggcccctttttttgtagcgctgatgtcacgccaacttgtggtaaataggtttccgacattgtttctgtagcacagttggcatgaagattacagacatgttttgggatcgtgacccgcttttactcgcttatattgatgtttatggtgagattgtcgt

SEQ ID NO: 12849 - protein, 122 aa, Zea mays subsp. mays
  peptide (1)..(122): Ceres Seq. ID no. 12414841
  misc_feature (1)..(122): Homolog of NCBI NO: 18087513 NR Description: AT5g18480/F20L16_200 [Arabidopsis thaliana]
  misc_feature (1)..(122): Homolog of NCBI NO: 22326882 NR Description: putative protein; protein id: At5g18480.1, by cDNA: gi_18087512 [Arabidopsis thaliana]
  misc_feature (84)..(110): Homolog of NCBI NO: 38568059 NR Description: OSJNBa0073E02.8 [Oryza sativa (japonica
  misc_feature (1)..(23): Homolog of NCBI NO: 38568059 NR Description: OSJNBa0073E02.8 [Oryza sativa (japonica
FLLFGSYLRFVYRWGSISANHVGFSNSDSSENHMGPGHQRNMSDCDMDATFYWIGMASIATITVLLPTILGITALFTKLGLMVAGGIVLASFMTYAAEHLAISVFNKGQKYRNASRTRSFCF

SEQ ID NO: 12850 - protein, 89 aa, Zea mays subsp. mays
  peptide (1)..(89): Ceres Seq. ID no. 12414842
  misc_feature (1)..(89): Homolog of NCBI NO: 18087513 NR Description: AT5g18480/F20L16_200 [Arabidopsis thaliana]
  misc_feature (1)..(89): Homolog of NCBI NO: 22326882 NR Description: putative protein; protein id: At5g18480.1, by cDNA: gi_18087512 [Arabidopsis thaliana]
  misc_feature (51)..(77): Homolog of NCBI NO: 38568059 NR Description: OSJNBa0073E02.8 [Oryza sativa (japonica
MGPGHQRNMSDCDMDATFYWIGMASIATITVLLPTILGITALFTKLGLMVAGGIVLASFMTYAAEHLAISVFNKGQKYRNASRTRSFCF

SEQ ID NO: 12851 - protein, 81 aa, Zea mays subsp. mays
  peptide (1)..(81): Ceres Seq. ID no. 12414843
  misc_feature (1)..(81): Homolog of NCBI NO: 18087513 NR Description: AT5g18480/F20L16_200 [Arabidopsis thaliana]
  misc_feature (1)..(81): Homolog of NCBI NO: 22326882 NR Description: putative protein; protein id: At5g18480.1, by cDNA: gi_18087512 [Arabidopsis thaliana]
  misc_feature (43)..(69): Homolog of NCBI NO: 38568059 NR Description: OSJNBa0073E02.8 [Oryza sativa (japonica
MSDCDMDATFYWIGMASIATITVLLPTILGITALFTKLGLMVAGGIVLASFMTYAAEHLAISVFNKGQKYRNASRTRSFCF

SEQ ID NO: 12852 - DNA, 1992 bp, Zea mays subsp. mays
  misc_feature (1)..(1992): Ceres Seq. ID no. 12347466
  misc_feature: MA Experiment ID: 108504 Result: Up-regulated in Transcription
  misc_feature: MA Experiment 108504 PARAMETER Experiment Name: Zm_Drought_P Parameter: Age (day) Value: 8
  misc_feature: MA Experiment 108504 PARAMETER Experiment Name: Zm_Drought_P Parameter: Organism Value: Zea mays
  misc_feature: MA Experiment 108504 PARAMETER Experiment Name: Zm_Drought_P Parameter: Plant Line Value: 35A19
  misc_feature: MA Experiment 108504 PARAMETER Experiment Name: Zm_Drought_P Parameter: Timepoint (hr) Value: 12
  misc_feature: MA Experiment 108504 PARAMETER Experiment Name: Zm_Drought_P Parameter: Tissue Value: Aerial
  misc_feature: MA Experiment 108504 PARAMETER Experiment Name: Zm_Drought_P Parameter: Treatment Value: Drought vs. No Drought
  misc_feature: MA Experiment ID: 108523 Result: Up-regulated in Transcription
  misc_feature: MA Experiment 108523 PARAMETER Experiment Name: Zm_42deg_Heat_P Parameter: Age (day) Value: 8
  misc_feature: MA Experiment 108523 PARAMETER Experiment Name: Zm_42deg_Heat_P Parameter: Organism Value: Zea mays
  misc_feature: MA Experiment 108523 PARAMETER Experiment Name: Zm_42deg_Heat_P Parameter: Plant Line Value: 35A19
  misc_feature: MA Experiment 108523 PARAMETER Experiment Name: Zm_42deg_Heat_P Parameter: Temperature (deg C) Value: 42 vs. 22
  misc_feature: MA Experiment 108523 PARAMETER Experiment Name: Zm_42deg_Heat_P Parameter: Timepoint (hr) Value: 6
  misc_feature: MA Experiment 108523 PARAMETER Experiment Name: Zm_42deg_Heat_P Parameter: Tissue Value: Aerial
  misc_feature: MA Experiment ID: 108556 Result: Up-regulated in Transcription
  misc_feature: MA Experiment 108556 PARAMETER Experiment Name: Zm_Drought_P Parameter: Age (day) Value: 9
  misc_feature: MA Experiment 108556 PARAMETER Experiment Name: Zm_Drought_P Parameter: Organism Value: Zea mays
  misc_feature: MA Experiment 108556 PARAMETER Experiment Name: Zm_Drought_P Parameter: Plant Line Value: 35A19
  misc_feature: MA Experiment 108556 PARAMETER Experiment Name: Zm_Drought_P Parameter: Timepoint (hr) Value: 24
  misc_feature: MA Experiment 108556 PARAMETER Experiment Name: Zm_Drought_P Parameter: Tissue Value: Aerial
  misc_feature: MA Experiment 108556 PARAMETER Experiment Name: Zm_Drought_P Parameter: Treatment Value: Drought vs. No Drought
  misc_feature: MA Experiment ID: 108689 Result: Up-regulated in Transcription
  misc_feature: MA Experiment 108689 PARAMETER Experiment Name: Zm_Drought_Roots_P Parameter: Age (day) Value: 9
  misc_feature: MA Experiment 108689 PARAMETER Experiment Name: Zm_Drought_Roots_P Parameter: Organism Value: Zea mays
  misc_feature: MA Experiment 108689 PARAMETER Experiment Name: Zm_Drought_Roots_P Parameter: Plant Line Value: 35A19
  misc_feature: MA Experiment 108689 PARAMETER Experiment Name: Zm_Drought_Roots_P Parameter: Timepoint (hr) Value: 24
  misc_feature: MA Experiment 108689 PARAMETER Experiment Name: Zm_Drought_Roots_P Parameter: Tissue Value: Roots
  misc_feature: MA Experiment 108689 PARAMETER Experiment Name: Zm_Drought_Roots_P Parameter: Treatment Value: Drought vs. No Drought
  misc_feature: MA Experiment ID: 20000479 Result: Up-regulated in Transcription
  misc_feature: MA Experiment 20000479 PARAMETER Experiment Name: Zm_Drought_P Parameter: Age (day) Value: 10
  misc_feature: MA Experiment 20000479 PARAMETER Experiment Name: Zm_Drought_P Parameter: Organism Value: Zea mays
  misc_feature: MA Experiment 20000479 PARAMETER Experiment Name: Zm_Drought_P Parameter: Plant Line Value: 35A19
  misc_feature: MA Experiment 20000479 PARAMETER Experiment Name: Zm_Drought_P Parameter: Timepoint (hr) Value: 48
  misc_feature: MA Experiment 20000479 PARAMETER Experiment Name: Zm_Drought_P Parameter: Tissue Value: Aerial
  misc_feature: MA Experiment 20000479 PARAMETER Experiment Name: Zm_Drought_P Parameter: Treatment Value: Drought vs. No Drought
  misc_feature: MA Experiment ID: 20000480 Result: Up-regulated in Transcription
  misc_feature: MA Experiment 20000480 PARAMETER Experiment Name: Zm_Drought_P Parameter: Age (day) Value: 11
  misc_feature: MA Experiment 20000480 PARAMETER Experiment Name: Zm_Drought_P Parameter: Organism Value: Zea mays
  misc_feature: MA Experiment 20000480 PARAMETER Experiment Name: Zm_Drought_P Parameter: Plant Line Value: 35A19
  misc_feature: MA Experiment 20000480 PARAMETER Experiment Name: Zm_Drought_P Parameter: Timepoint (hr) Value: 72
  misc_feature: MA Experiment 20000480 PARAMETER Experiment Name: Zm_Drought_P Parameter: Tissue Value: Aerial
  misc_feature: MA Experiment 20000480 PARAMETER Experiment Name: Zm_Drought_P Parameter: Treatment Value: Drought vs. No Drought
  misc_feature: MA Experiment ID: 20000534 Result: Up-regulated in Transcription
  misc_feature: MA Experiment 20000534 PARAMETER Experiment Name: Zm_Hybrid_Pollen_P Parameter: Age (day) Value: 8
  misc_feature: MA Experiment 20000534 PARAMETER Experiment Name: Zm_Hybrid_Pollen_P Parameter: Organism Value: Zea mays
  misc_feature: MA Experiment 20000534 PARAMETER Experiment Name: Zm_Hybrid_Pollen_P Parameter: Plant Line Value: 35A19
  misc_feature: MA Experiment 20000534 PARAMETER Experiment Name: Zm_Hybrid_Pollen_P Parameter: Tissue Value: Pollen vs. Aerial
accacgtccaaaacgtttggagcccttttcctaatcttgctgctaccgctcgctccctctccccggccatttctctcatttcgccctccctccgccggctagggttactgccaccgccttccacccctccccgactgcccgtgggtggaggaggctggttggcgtgcagggtacctcggcggcggagatggagccggacttctcgaccgtgggcgggcccagctttgagttcgctttcaacgaggccaacttctccgaccgggaattgcggatcgaggtcgtcgcgggggattacgaccgccggggtccactggcggcggttccggaggaggtggcctcgccgactgggcgcgccatcggaagcgccgacgcgaggagctcttcaaggagaaagaatctacaacctacatgtcagaccaaactaattttaatgaagtcgaagcagaagagtgtgatgcatatgaagaaaatcaagaggaacctgtagcaatgatggaaggatctccacctgatgttgatcaagatggtgatgatgagcaaggtattgatccatcttgggctgctgtggttacgccggttttacgagtcaagacaatttatatcagttcggcgattcttgctgcgaagagtcctttctttttcaagcttttctcaaacggcatgaaagaatcggaccagagacatgcaacccttagaattactgactcagaggaaattgccctcatggagcttttaagctttatgtatagtggaaagttgacaactactgagcccactcttcttctggatatcttgatggctgccgacaaatttgaggttgtttcatgcatgaggtactgcagccagttgctcacaagcttgcagatgaccacagaatctgcacttctctacctagatctcccttgctcagtttcaatggcagctgcagttcaacctctgacagatgcagctaaggattttctcgctgtaaagtacaaggatttgattaagttccaagatgaagtgatgaacatccctcgtgctggaatcgaagccatcttgtcaagtaatgacctccaggtggcatctgaagataccatctatgacttcttactcagatgggcccgtgcacaatacccgaaatcagaagagagacgtgaggtccttagttctcggctgctccctcttgtgcgattcagtcatatgacgtgtaggaagctgcggaaggtcctagcctgcacagatatagaccacgagcaagcaaccaagtgtgtcaccgaggctcttctgttcaaagctgatgcaccacaccggcaacgagctcttgcagcggacgcaataacctgccggaaattcgccgagcgggcttacaagtacagaccactcaaagttgttgagtttgatcggccctacccacagtgcatagcatacttggatctcaagcgcgacgagtgctctcgactctttcctgcagggcggatatactcgcaagcgttccaccttgcagggcagggtttcttcctctcggctcactgtaacatggagcagcaaagcgcgttctactgcttcgggctcttcctggggatgcaagagaagggctccacgagtgtgacagtggactacgagttcgctgcaaggacgagaccatccggcgagtttgtgagcaagtacaagggtaactacacattcaccggtggaaaggctgttggatacaggaatctctttgcaatcccatggcagaagttcttggccgatgacagcctcttcttcgtggatgggatgctgcatctgagagccgagcttacgataaagcaaccctagagcaatggtctctgtatagtggtagttgttacgacagatgaaaaagatatcggatgggaaacctcacgagttccagttcgctgcaagtttccagatttgccggtatctcactgccaatgagcttgtttgcctccgtaacggcgcagggtgtataatggcttatttattcctagtatatacaaatacaagttg

SEQ ID NO: 12853 - protein, 463 aa, Zea mays subsp. mays
  peptide (1)..(463): Ceres Seq. ID no. 12347467
  misc_feature (47)..(151): Pfam Name: BTB/POZ domain Pfam Description: BTB/POZ domain
  misc_feature (190)..(432): Homolog of NCBI NO: 27948452 NR Description: GAMYB-binding protein [Hordeum vulgare subsp.
  misc_feature (19)..(255): Homolog of NCBI NO: 26984582 NR Description: SI:dZ198M22.2 (novel protein similar to human
  misc_feature (1)..(462): Homolog of NCBI NO: 30695452 NR Description: POZ domain protein family [Arabidopsis thaliana]
  misc_feature (1)..(462): Homolog of NCBI NO: 18407023 NR Description: expressed protein; protein id: At2g46260.1, by cDNA: 111153., supported by cDNA: gi_15028122, supported by gi_19310796 [Arabidopsis thaliana] >gi|15028123|gb|AAK76685.1|
  misc_feature (1)..(462): Homolog of NCBI NO: 21536778 NR Description: unknown [Arabidopsis thaliana]
  misc_feature (1)..(461): Homolog of NCBI NO: 15234082 NR Description: hypothetical protein; protein id: At4g01160.1
  misc_feature (1)..(462): Homolog of NCBI NO: 25352317 NR Description: hypothetical protein At2g46260 [imported] -
  misc_feature (1)..(462): Homolog of NCBI NO: 11282344 NR Description: hypothetical protein F2A19.200 - Arabidopsis >gi|6850851|emb|CAB71090.1| putative protein [Arabidopsis
  misc_feature (1)..(462): Homolog of NCBI NO: 18412063 NR Description: putative protein; protein id: At3g61600.1, by cDNA: gi_12006854 [Arabidopsis thaliana]
  misc_feature (57)..(255): Homolog of NCBI NO: 38194229 NR Description: actinfilin [Homo sapiens]
MSDQTNFNEVEAEECDAYEENQEEPVAMMEGSPPDVDQDGDDEQGIDPSWAAVVTPVLRVKTIYISSAILAAKSPFFFKLFSNGMKESDQRHATLRITDSEEIALMELLSFMYSGKLTTTEPTLLLDILMAADKFEVVSCMRYCSQLLTSLQMTTESALLYLDLPCSVSMAAAVQPLTDAAKDFLAVKYKDLIKFQDEVMNIPRAGIEAILSSNDLQVASEDTIYDFLLRWARAQYPKSEERREVLSSRLLPLVRFSHMTCRKLRKVLACTDIDHEQATKCVTEALLFKADAPHRQRALAADAITCRKFAERAYKYRPLKVVEFDRPYPQCIAYLDLKRDECSRLFPAGRIYSQAFHLAGQGFFLSAHCNMEQQSAFYCFGLFLGMQEKGSTSVTVDYEFAARTRPSGEFVSKYKGNYTFTGGKAVGYRNLFAIPWQKFLADDSLFFVDGMLHLRAELTIKQP

SEQ ID NO: 12854 - protein, 436 aa, Zea mays subsp. mays
  peptide (1)..(436): Ceres Seq. ID no. 12347468
  misc_feature (20)..(124): Pfam Name: BTB/POZ domain Pfam Description: BTB/POZ domain
  misc_feature (1)..(435): Homolog of NCBI NO: 18412063 NR Description: putative protein; protein id: At3g61600.1, by cDNA: gi_12006854 [Arabidopsis thaliana]
  misc_feature (1)..(435): Homolog of NCBI NO: 30695452 NR Description: POZ domain protein family [Arabidopsis thaliana]
  misc_feature (1)..(435): Homolog of NCBI NO: 11282344 NR Description: hypothetical protein F2A19.200 - Arabidopsis >gi|6850851|emb|CAB71090.1| putative protein [Arabidopsis
  misc_feature (1)..(435): Homolog of NCBI NO: 18407023 NR Description: expressed protein; protein id: At2g46260.1, by cDNA: 111153., supported by cDNA: gi_15028122, supported by gi_19310796 [Arabidopsis thaliana] >gi|15028123|gb|AAK76685.1|
  misc_feature (1)..(435): Homolog of NCBI NO: 25352317 NR Description: hypothetical protein At2g46260 [imported] -
  misc_feature (1)..(435): Homolog of NCBI NO: 21536778 NR Description: unknown [Arabidopsis thaliana]
  misc_feature (1)..(434): Homolog of NCBI NO: 15234082 NR Description: hypothetical protein; protein id: At4g01160.1
  misc_feature (163)..(405): Homolog of NCBI NO: 27948452 NR Description: GAMYB-binding protein [Hordeum vulgare subsp.
  misc_feature (1)..(228): Homolog of NCBI NO: 26984582 NR Description: SI:dZ198M22.2 (novel protein similar to human
  misc_feature (30)..(228): Homolog of NCBI NO: 38194229 NR Description: actinfilin [Homo sapiens]
MMEGSPPDVDQDGDDEQGIDPSWAAVVTPVLRVKTIYISSAILAAKSPFFFKLFSNGMKESDQRHATLRITDSEEIALMELLSFMYSGKLTTTEPTLLLDILMAADKFEVVSCMRYCSQLLTSLQMTTESALLYLDLPCSVSMAAAVQPLTDAAKDFLAVKYKDLIKFQDEVMNIPRAGIEAILSSNDLQVASEDTIYDFLLRWARAQYPKSEERREVLSSRLLPLVRFSHMTCRKLRKVLACTDIDHEQATKCVTEALLFKADAPHRQRALAADAITCRKFAERAYKYRPLKVVEFDRPYPQCIAYLDLKRDECSRLFPAGRIYSQAFHLAGQGFFLSAHCNMEQQSAFYCFGLFLGMQEKGSTSVTVDYEFAARTRPSGEFVSKYKGNYTFTGGKAVGYRNLFAIPWQKFLADDSLFFVDGMLHLRAELTIKQP

SEQ ID NO: 12855 - protein, 435 aa, Zea mays subsp. mays
  peptide (1)..(435): Ceres Seq. ID no. 12347469
  misc_feature (19)..(123): Pfam Name: BTB/POZ domain Pfam Description: BTB/POZ domain
  misc_feature (1)..(434): Homolog of NCBI NO: 18412063 NR Description: putative protein; protein id: At3g61600.1, by cDNA: gi_12006854 [Arabidopsis thaliana]
  misc_feature (1)..(434): Homolog of NCBI NO: 30695452 NR Description: POZ domain protein family [Arabidopsis thaliana]
  misc_feature (1)..(434): Homolog of NCBI NO: 11282344 NR Description: hypothetical protein F2A19.200 - Arabidopsis >gi|6850851|emb|CAB71090.1| putative protein [Arabidopsis
  misc_feature (1)..(434): Homolog of NCBI NO: 18407023 NR Description: expressed protein; protein id: At2g46260.1, by cDNA: 111153., supported by cDNA: gi_15028122, supported by gi_19310796 [Arabidopsis thaliana] >gi|15028123|gb|AAK76685.1|
  misc_feature (1)..(434): Homolog of NCBI NO: 25352317 NR Description: hypothetical protein At2g46260 [imported] -
  misc_feature (1)..(434): Homolog of NCBI NO: 21536778 NR Description: unknown [Arabidopsis thaliana]
  misc_feature (1)..(433): Homolog of NCBI NO: 15234082 NR Description: hypothetical protein; protein id: At4g01160.1
  misc_feature (162)..(404): Homolog of NCBI NO: 27948452 NR Description: GAMYB-binding protein [Hordeum vulgare subsp.
  misc_feature (1)..(227): Homolog of NCBI NO: 26984582 NR Description: SI:dZ198M22.2 (novel protein similar to human
  misc_feature (29)..(227): Homolog of NCBI NO: 38194229 NR Description: actinfilin [Homo sapiens]
MEGSPPDVDQDGDDEQGIDPSWAAVVTPVLRVKTIYISSAILAAKSPFFFKLFSNGMKESDQRHATLRITDSEEIALMELLSFMYSGKLTTTEPTLLLDILMAADKFEVVSCMRYCSQLLTSLQMTTESALLYLDLPCSVSMAAAVQPLTDAAKDFLAVKYKDLIKFQDEVMNIPRAGIEAILSSNDLQVASEDTIYDFLLRWARAQYPKSEERREVLSSRLLPLVRFSHMTCRKLRKVLACTDIDHEQATKCVTEALLFKADAPHRQRALAADAITCRKFAERAYKYRPLKVVEFDRPYPQCIAYLDLKRDECSRLFPAGRIYSQAFHLAGQGFFLSAHCNMEQQSAFYCFGLFLGMQEKGSTSVTVDYEFAARTRPSGEFVSKYKGNYTFTGGKAVGYRNLFAIPWQKFLADDSLFFVDGMLHLRAELTIKQP

SEQ ID NO: 12856 - DNA, 1115 bp, Zea mays subsp. mays
  misc_feature (1)..(1115): Ceres Seq. ID no. 12414625
  misc_feature: MA Experiment ID: 108535 Result: Down-regulated in Transcription
  misc_feature: MA Experiment 108535 PARAMETER Experiment Name: Zm_Meristem_P Parameter: Age (day) Value: 8
  misc_feature: MA Experiment 108535 PARAMETER Experiment Name: Zm_Meristem_P Parameter: Organism Value: Zea mays
  misc_feature: MA Experiment 108535 PARAMETER Experiment Name: Zm_Meristem_P Parameter: Plant Line Value: 35A19
  misc_feature: MA Experiment 108535 PARAMETER Experiment Name: Zm_Meristem_P Parameter: Tissue Value: Root Meristem vs. Above Root Meristem
  misc_feature: MA Experiment ID: 108547 Result: Up-regulated in Transcription
  misc_feature: MA Experiment 108547 PARAMETER Experiment Name: Zm_Imbibed_Seeds_P Parameter: Age (day) Value: 4 vs. 2
  misc_feature: MA Experiment 108547 PARAMETER Experiment Name: Zm_Imbibed_Seeds_P Parameter: Organism Value: Zea mays
  misc_feature: MA Experiment 108547 PARAMETER Experiment Name: Zm_Imbibed_Seeds_P Parameter: Plant Line Value: 35A19
  misc_feature: MA Experiment 108547 PARAMETER Experiment Name: Zm_Imbibed_Seeds_P Parameter: Tissue Value: Aerial vs. Embryo
aaatccttatcggcgactcggcgtcggaggctcggagcccacgaccacgaccgcttccacgccctcgaccccgaacccccaatcccggacgcgaccgctgaaccctagcatactccggccatctgccgccggccccggcgatcccccgccatggcctcccccgagggcacaacgtgggtcttcgactgtccccttatggacgacctcgcggtcgccgccgacttcgcggcagcccccgcgggaggatttttctgggcagcgccgccgtcgctgcagccgcaggcgccagtgcagtctgtcgttgccgcgtcggctcccaacccatgtatggaaatcagtagctctgtggactgtggtcaggaaaaagaacagccaacaaataaacgtccaaggtcagaaagtactacagaatcaagcacaaaagcatccagggagaaaattagaagggacaagctgaacgagagattcttggaattgggtgccattttggagccagggaaaactcctaaaatggacaaaacagctatattgagtgatgctattcgtgtagtaggtgaattgcgtagtgaagcaaaaagctcaaggattcaaatgagaatctccaagagaagattaaagagctgaaggccgagaagaatgagctgcgagacgagaagcaaaggctgaaggccgagaaggagagcctggagcagcagatcaagttcctgaatgcccggccaagcctcgtaccacaccacccagtgatcccagcctctgcgttccctgctccccaggggccagcagccgccgccaggcacaagctgatgatgcctgtgattggctaccctggattcccgatgtggcagttcatgccgccttcagatgttgacacctctgatgaccctaggtcttgtcctcctgtggcgtagaagccgtgcgaaatcctgttggaaagaggcgatgctgccttccattgattcaaatcttgatcggtccgcagtgttgctggtgtagttgattccagaactgaaggggatgttacatgtgtcggacggtgacatggggtgatctgatgacccctttgtatattatatatggtatggtataaataaattccgtgaccagaagctaatgtc

SEQ ID NO: 12857 - protein, 157 aa, Zea mays subsp. mays
  peptide (1)..(157): Ceres Seq. ID no. 12414626
  misc_feature (90)..(138): Pfam Name: Helix-loop-helix DNA-binding domain Pfam Description: Helix-loop-helix DNA-binding domain
  misc_feature (18)..(142): Homolog of NCBI NO: 38636768 NR Description: helix-loop-helix-like protein [Oryza sativa
  misc_feature (54)..(142): Homolog of NCBI NO: 29367409 NR Description: helix-loop-helix-like protein [Oryza sativa
  misc_feature (1)..(157): Homolog of NCBI NO: 15239706 NR Description: bHLH protein; protein id: At5g54680.1, supported cDNA: 22343., supported by cDNA: gi_15451009, supported by cDNA: [Arabidopsis thaliana] >gi|10176795|dbj|BAB09934.1| thaliana]
  misc_feature (1)..(157): Homolog of NCBI NO: 21592325 NR Description: bHLH transcription factor, putative [Arabidopsis
  misc_feature (72)..(142): Homolog of NCBI NO: 15223710 NR Description: bHLH protein; protein id: At1g51070.1, supported cDNA: 16284., supported by cDNA: gi_20127114 [Arabidopsis
  misc_feature (60)..(141): Homolog of NCBI NO: 20127030 NR Description: putative bHLH transcription factor [Arabidopsis
  misc_feature (60)..(141): Homolog of NCBI NO: 22331274 NR Description: bHLH protein; protein id: At3g23210.1, supported cDNA: gi_20466415 [Arabidopsis thaliana] emb|CAB10220.1~gene_id:K14B15.12~similar to unknown protein
  misc_feature (60)..(141): Homolog of NCBI NO: 30682847 NR Description: bHLH protein [Arabidopsis thaliana]
  misc_feature (60)..(141): Homolog of NCBI NO: 18414212 NR Description: bHLH protein; protein id: At4g14410.1, supported cDNA: 40736., supported by cDNA: gi_20856628 [Arabidopsis >gi|20856629|gb|AAM26676.1| AT4g14410/dl3245w [Arabidopsis
  misc_feature (56)..(140): Homolog of NCBI NO: 7487183 NR Description: hypothetical protein T19K4.190 - Arabidopsis
MASPEGTTWVFDCPLMDDLAVAADFAAAPAGGFFWAAPPSLQPQAPVQSVVAASAPNPCMEISSSVDCGQEKEQPTNKRPRSESTTESSTKASREKIRRDKLNERFLELGAILEPGKTPKMDKTAILSDAIRVVGELRSEAKSSRIQMRISKRRLKS

SEQ ID NO: 12858 - protein, 151 aa, Zea mays subsp. mays
  peptide (1)..(151): Ceres Seq. ID no. 12414627
NPYRRLGVGGSEPTTTTASTPSTPNPQSRTRPLNPSILRPSAAGPGDPPPWPPPRAQRGSSTVPLWTTSRSPPTSRQPPREDFSGQRRRRCSRRRQCSLSLPRRLPTHVWKSVALWTVVRKKNSQQINVQGQKVLQNQAQKHPGRKLEGTS

SEQ ID NO: 12859 - protein, 142 aa, Zea mays subsp. mays
  peptide (1)..(142): Ceres Seq. ID no. 12414628
  misc_feature (75)..(123): Pfam Name: Helix-loop-helix DNA-binding domain Pfam Description: Helix-loop-helix DNA-binding domain
  misc_feature (3)..(127): Homolog of NCBI NO: 38636768 NR Description: helix-loop-helix-like protein [Oryza sativa
  misc_feature (39)..(127): Homolog of NCBI NO: 29367409 NR Description: helix-loop-helix-like protein [Oryza sativa
  misc_feature (1)..(142): Homolog of NCBI NO: 15239706 NR Description: bHLH protein; protein id: At5g54680.1, supported cDNA: 22343., supported by cDNA: gi_15451009, supported by cDNA: [Arabidopsis thaliana] >gi|10176795|dbj|BAB09934.1| thaliana]
  misc_feature (1)..(142): Homolog of NCBI NO: 21592325 NR Description: bHLH transcription factor, putative [Arabidopsis
  misc_feature (57)..(127): Homolog of NCBI NO: 15223710 NR Description: bHLH protein; protein id: At1g51070.1, supported cDNA: 16284., supported by cDNA: gi_20127114 [Arabidopsis
  misc_feature (45)..(126): Homolog of NCBI NO: 20127030 NR Description: putative bHLH transcription factor [Arabidopsis
  misc_feature (45)..(126): Homolog of NCBI NO: 22331274 NR Description: bHLH protein; protein id: At3g23210.1, supported cDNA: gi_20466415 [Arabidopsis thaliana] emb|CAB10220.1~gene_id:K14B15.12~similar to unknown protein
  misc_feature (45)..(126): Homolog of NCBI NO: 30682847 NR Description: bHLH protein [Arabidopsis thaliana]
  misc_feature (45)..(126): Homolog of NCBI NO: 18414212 NR Description: bHLH protein; protein id: At4g14410.1, supported cDNA: 40736., supported by cDNA: gi_20856628 [Arabidopsis >gi|20856629|gb|AAM26676.1| AT4g14410/dl3245w [Arabidopsis
  misc_feature (41)..(125): Homolog of NCBI NO: 7487183 NR Description: hypothetical protein T19K4.190 - Arabidopsis
MDDLAVAADFAAAPAGGFFWAAPPSLQPQAPVQSVVAASAPNPCMEISSSVDCGQEKEQPTNKRPRSESTTESSTKASREKIRRDKLNERFLELGAILEPGKTPKMDKTAILSDAIRVVGELRSEAKSSRIQMRISKRRLKS

SEQ ID NO: 12860 - DNA, 1056 bp, Zea mays subsp. mays
  misc_feature (1)..(1056): Ceres Seq. ID no. 12347077
  misc_feature: MA Experiment ID: 108522 Result: Up-regulated in Transcription
  misc_feature: MA Experiment 108522 PARAMETER Experiment Name: Zm_42deg_Heat_P Parameter: Age (day) Value: 8
  misc_feature: MA Experiment 108522 PARAMETER Experiment Name: Zm_42deg_Heat_P Parameter: Organism Value: Zea mays
  misc_feature: MA Experiment 108522 PARAMETER Experiment Name: Zm_42deg_Heat_P Parameter: Plant Line Value: 35A19
  misc_feature: MA Experiment 108522 PARAMETER Experiment Name: Zm_42deg_Heat_P Parameter: Temperature (deg C) Value: 42 vs. 22
  misc_feature: MA Experiment 108522 PARAMETER Experiment Name: Zm_42deg_Heat_P Parameter: Timepoint (hr) Value: 1
  misc_feature: MA Experiment 108522 PARAMETER Experiment Name: Zm_42deg_Heat_P Parameter: Tissue Value: Aerial
  misc_feature: MA Experiment ID: 108527 Result: Up-regulated in Transcription
  misc_feature: MA Experiment 108527 PARAMETER Experiment Name: Zm_5mM_NO_P Parameter: Age (day) Value: 8
  misc_feature: MA Experiment 108527 PARAMETER Experiment Name: Zm_5mM_NO_P Parameter: Organism Value: Zea mays
  misc_feature: MA Experiment 108527 PARAMETER Experiment Name: Zm_5mM_NO_P Parameter: Plant Line Value: 35A19
  misc_feature: MA Experiment 108527 PARAMETER Experiment Name: Zm_5mM_NO_P Parameter: Timepoint (hr) Value: 6
  misc_feature: MA Experiment 108527 PARAMETER Experiment Name: Zm_5mM_NO_P Parameter: Tissue Value: Aerial
  misc_feature: MA Experiment 108527 PARAMETER Experiment Name: Zm_5mM_NO_P Parameter: Treatment Value: 5mM NO vs. No Treatment
aaccatacctccgaggctccgaccaaaacaccagggtcccagtgctcttggctctaagatggcggcgccggaaccggaggccaagctggaagccgtaaccccatctcggtcccacgagctgccaccggagtccgaatccgacgcccctgcctccaccggcacccaggagctaaagccgtgggagcagcacgccgcggtgatcaacctcccgcgctacgactaccgcgcatcagggtccctcctcctccgttcgcattccggcttcctcatcacgtgccccatcaagcgtgaaaaaagtgcaaccaaggaagccattcccatccttgaagagtaccatgcaaattgctgtgtttctgaacatgcagaaccatgtgatgtgaaaaatgcaattaagaaaagaaaactgtgctcggaggcatcaggaagtttagaagaggcagtaacgaatgggaatagtagcagtgtttcagaatcaattggaagcaccggaaacacaagctcaccccagtccaaggtgaatgacaatgttgacagggcttcaaatctctcactggttaagctatcaagaagtggcttgctcttctttaaatttcctagtggaggcgttcatgtagttgagatgcttactgaaatacttcattcactcagatccgggaaactcaaatctccacaatggtgccaccgcatattcccaattcaagaaacttgcattctatcagaagaagacctgcatgccactgtgtcaaagttattccttgacttctcgaggagcaagacaaacgaagacaagcctataaagtttgcggttgcctataatagaaggggcattgatgagacagagaagaacagtaatgaaggttcaaaccagcagactttgatggatagggagcaatgtttcaaagtggtagctgctgctgtcaaatccgttgctgagaactcagtggttgatcttagatcgcctgaggtaaccttacccgacaattgtcaacagcttgcatagttactcgctactggttggatgacaaacaacatcgtacttgttaagatccaaattgg

SEQ ID NO: 12861 - protein, 332 aa, Zea mays subsp. mays
  peptide (1)..(332): Ceres Seq. ID no. 12347078
  misc_feature (55)..(322): Homolog of NCBI NO: 14334964 NR Description: unknown protein [Arabidopsis thaliana]
  misc_feature (55)..(322): Homolog of NCBI NO: 24030215 NR Description: unknown protein [Arabidopsis thaliana]
  misc_feature (55)..(276): Homolog of NCBI NO: 15220918 NR Description: hypothetical protein; protein id: At1g09290.1
  misc_feature (55)..(276): Homolog of NCBI NO: 25372975 NR Description: hypothetical protein [imported] - Arabidopsis >gi|4337179|gb|AAD18100.1| This gene is continued on the 5' end
TIPPRLRPKHQGPSALGSKMAAPEPEAKLEAVTPSRSHELPPESESDAPASTGTQELKPWEQHAAVINLPRYDYRASGSLLLRSHSGFLITCPIKREKSATKEAIPILEEYHANCCVSEHAEPCDVKNAIKKRKLCSEASGSLEEAVTNGNSSSVSESIGSTGNTSSPQSKVNDNVDRASNLSLVKLSRSGLLFFKFPSGGVHVVEMLTEILHSLRSGKLKSPQWCHRIFPIQETCILSEEDLHATVSKLFLDFSRSKTNEDKPIKFAVAYNRRGIDETEKNSNEGSNQQTLMDREQCFKVVAAAVKSVAENSVVDLRSPEVTLPDNCQQLA

SEQ ID NO: 12862 - protein, 313 aa, Zea mays subsp. mays
  peptide (1)..(313): Ceres Seq. ID no. 12347079
  misc_feature (36)..(303): Homolog of NCBI NO: 14334964 NR Description: unknown protein [Arabidopsis thaliana]
  misc_feature (36)..(303): Homolog of NCBI NO: 24030215 NR Description: unknown protein [Arabidopsis thaliana]
  misc_feature (36)..(257): Homolog of NCBI NO: 15220918 NR Description: hypothetical protein; protein id: At1g09290.1
  misc_feature (36)..(257): Homolog of NCBI NO: 25372975 NR Description: hypothetical protein [imported] - Arabidopsis >gi|4337179|gb|AAD18100.1| This gene is continued on the 5' end
MAAPEPEAKLEAVTPSRSHELPPESESDAPASTGTQELKPWEQHAAVINLPRYDYRASGSLLLRSHSGFLITCPIKREKSATKEAIPILEEYHANCCVSEHAEPCDVKNAIKKRKLCSEASGSLEEAVTNGNSSSVSESIGSTGNTSSPQSKVNDNVDRASNLSLVKLSRSGLLFFKFPSGGVHVVEMLTEILHSLRSGKLKSPQWCHRIFPIQETCILSEEDLHATVSKLFLDFSRSKTNEDKPIKFAVAYNRRGIDETEKNSNEGSNQQTLMDREQCFKVVAAAVKSVAENSVVDLRSPEVTLPDNCQQLA

SEQ ID NO: 12863 - DNA, 1437 bp, Zea mays subsp. mays
  misc_feature (1)..(1437): Ceres Seq. ID no. 12347187
  misc_feature: MA Experiment ID: 20000477 Result: Up-regulated in Transcription
  misc_feature: MA Experiment 20000477 PARAMETER Experiment Name: Zm_5mM_SA_P Parameter: Age (day) Value: 10
  misc_feature: MA Experiment 20000477 PARAMETER Experiment Name: Zm_5mM_SA_P Parameter: Organism Value: Zea mays
  misc_feature: MA Experiment 20000477 PARAMETER Experiment Name: Zm_5mM_SA_P Parameter: Plant Line Value: 35A19
  misc_feature: MA Experiment 20000477 PARAMETER Experiment Name: Zm_5mM_SA_P Parameter: Timepoint (hr) Value: 48
  misc_feature: MA Experiment 20000477 PARAMETER Experiment Name: Zm_5mM_SA_P Parameter: Tissue Value: Aerial
  misc_feature: MA Experiment 20000477 PARAMETER Experiment Name: Zm_5mM_SA_P Parameter: Treatment Value: 5mM SA vs. No Treatment
  misc_feature: MA Experiment ID: 20000478 Result: Up-regulated in Transcription
  misc_feature: MA Experiment 20000478 PARAMETER Experiment Name: Zm_5mM_SA_P Parameter: Age (day) Value: 11
  misc_feature: MA Experiment 20000478 PARAMETER Experiment Name: Zm_5mM_SA_P Parameter: Organism Value: Zea mays
  misc_feature: MA Experiment 20000478 PARAMETER Experiment Name: Zm_5mM_SA_P Parameter: Plant Line Value: 35A19
  misc_feature: MA Experiment 20000478 PARAMETER Experiment Name: Zm_5mM_SA_P Parameter: Timepoint (hr) Value: 72
  misc_feature: MA Experiment 20000478 PARAMETER Experiment Name: Zm_5mM_SA_P Parameter: Tissue Value: Aerial
  misc_feature: MA Experiment 20000478 PARAMETER Experiment Name: Zm_5mM_SA_P Parameter: Treatment Value: 5mM SA vs. No Treatment
  misc_feature: MA Experiment ID: 20000535 Result: Up-regulated in Transcription
  misc_feature: MA Experiment 20000535 PARAMETER Experiment Name: Zm_Hybrid_Seed_Dev_P Parameter: DAP Value: 30 vs. 12
  misc_feature: MA Experiment 20000535 PARAMETER Experiment Name: Zm_Hybrid_Seed_Dev_P Parameter: Organism Value: Zea mays
  misc_feature: MA Experiment 20000535 PARAMETER Experiment Name: Zm_Hybrid_Seed_Dev_P Parameter: Plant Line Value: 35A19
  misc_feature: MA Experiment 20000535 PARAMETER Experiment Name: Zm_Hybrid_Seed_Dev_P Parameter: Tissue Value: Embryo vs. Unfert Floret
aatctgccatcttcgtctatccctttcgtctcagttttgcagtttctactgctgtctttgctctgaaatccaaccgaaatctcagaggaaagtaggaaacctcgttcgggaacctgctttagtgagactccaatccttgggcgccattgccgcctgttttttgtgctaggaaaggcgctgtctgattcctgtatatttattttggcattgctttcagctgcaacaaaactaaccatggatggcactagctttgatctgacagagcacgaaggttcaaatctgtctccgtttctactcaaactttttaatgagtgggatgatcgcaagacaaggggcttgtttcaccatgacatcagttcctgtgaaacaaaggtgctacctggagtacataattttgtggcaacattaattgaaggacgtgaccaaaagaagcggccaactgagttcacaatgaaccaagttctccagccatttgttagtgagaagttcaatttcacaaaagtcagcccgttggaggtgatctttagattcaatgacactgagaaagaccctgcacaatattttgatggtgttcctgatactgtttcagcttcttctagtgccatcttgattaatgtgagcccaattggctactgccatgtgctattgactcccaagatccaggactgtttgccgcaaaggattgatcaagagagcttcttaatagccatgtatgttgcaagagaagcaaggactcccttcttcagagttggttataacagcctgggcggctttgcaactatcaaccaccttcacttccaggcatactacctgaaagtacagtatccagttgaaaaggcaatcacggagaagctcaagaccctagggaatagcgtgagcatttttcacctggtggattacccagtcaatggctttgtgttcgaaggtggtgcgagcctggaagatttgtcagatgtggtctccaaagtctgcatcttcctgcaagagaacaacagacctttcaatgtcctcatctctgaatctggcaagagaattttccttctaccacagtgctatgcggagaagcagcttctcggaaaggcgagccaagagttcctcgacatgagaatcaatccagcaatctgggagctcagtggtcatctggtactgaagcggaggaaggactacgaggaggcctctgaagcaaacatacgcaggtttttggttgaagcagctctttctgaaacagaatttcaggagctgaaccgatgcgtgctcgacttcctgaccagctctcttggttgaaactcggatgtaggttcctatagacagtaacagttctgaggttccagttaaaacagttgtgctggtactgttaccttatgatggtatatcatgtagtagtatttctgatttgactcgtcagctctgcgatgaaataatgtcttctccggcttc

SEQ ID NO: 12864 - protein, 349 aa, Zea mays subsp. mays
  peptide (1)..(349): Ceres Seq. ID no. 12347188
  misc_feature (46)..(347): Homolog of NCBI NO: 34907712 NR Description: P0035F12.16 [Oryza sativa (japonica
  misc_feature (4)..(342): Homolog of NCBI NO: 15240467 NR Description: putative protein; protein id: At5g55120.1, by cDNA: gi_17380815, supported by cDNA: gi_20259016 [Arabidopsis
  misc_feature (1)..(347): Homolog of NCBI NO: 15810139 NR Description: unknown protein [Arabidopsis thaliana]
  misc_feature (1)..(347): Homolog of NCBI NO: 18416877 NR Description: putative protein; protein id: At4g26850.1, by cDNA: gi_15810138, supported by cDNA: gi_20260477 [Arabidopsis >gi|20260478|gb|AAM13137.1| putative protein [Arabidopsis
  misc_feature (1)..(347): Homolog of NCBI NO: 7452423 NR Description: hypothetical protein F10M23.190 - Arabidopsis >gi|4455208|emb|CAB36531.1| putative protein [Arabidopsis >gi|7269537|emb|CAB79540.1| putative protein [Arabidopsis
  misc_feature (1)..(347): Homolog of NCBI NO: 21070346 NR Description: VTC2 [Arabidopsis thaliana]
  misc_feature (17)..(345): Homolog of NCBI NO: 34527348 NR Description: unnamed protein product [Homo sapiens]
  misc_feature (17)..(345): Homolog of NCBI NO: 24059751 NR Description: hypothetical protein [Macaca fascicularis]
  misc_feature (16)..(341): Homolog of NCBI NO: 27677438 NR Description: similar to CG3552-PC [Drosophila melanogaster]
  misc_feature (16)..(341): Homolog of NCBI NO: 26351153 NR Description: unnamed protein product [Mus musculus]
MDGTSFDLTEHEGSNLSPFLLKLFNEWDDRKTRGLFHHDISSCETKVLPGVHNFVATLIEGRDQKKRPTEFTMNQVLQPFVSEKFNFTKVSPLEVIFRFNDTEKDPAQYFDGVPDTVSASSSAILINVSPIGYCHVLLTPKIQDCLPQRIDQESFLIAMYVAREARTPFFRVGYNSLGGFATINHLHFQAYYLKVQYPVEKAITEKLKTLGNSVSIFHLVDYPVNGFVFEGGASLEDLSDVVSKVCIFLQENNRPFNVLISESGKRIFLLPQCYAEKQLLGKASQEFLDMRINPAIWELSGHLVLKRRKDYEEASEANIRRFLVEAALSETEFQELNRCVLDFLTSSLG

SEQ ID NO: 12865 - protein, 277 aa, Zea mays subsp. mays
  peptide (1)..(277): Ceres Seq. ID no. 12347189
  misc_feature (1)..(275): Homolog of NCBI NO: 34907712 NR Description: P0035F12.16 [Oryza sativa (japonica
  misc_feature (1)..(270): Homolog of NCBI NO: 15240467 NR Description: putative protein; protein id: At5g55120.1, by cDNA: gi_17380815, supported by cDNA: gi_20259016 [Arabidopsis
  misc_feature (1)..(275): Homolog of NCBI NO: 15810139 NR Description: unknown protein [Arabidopsis thaliana]
  misc_feature (1)..(275): Homolog of NCBI NO: 18416877 NR Description: putative protein; protein id: At4g26850.1, by cDNA: gi_15810138, supported by cDNA: gi_20260477 [Arabidopsis >gi|20260478|gb|AAM13137.1| putative protein [Arabidopsis
  misc_feature (1)..(275): Homolog of NCBI NO: 7452423 NR Description: hypothetical protein F10M23.190 - Arabidopsis >gi|4455208|emb|CAB36531.1| putative protein [Arabidopsis >gi|7269537|emb|CAB79540.1| putative protein [Arabidopsis
  misc_feature (1)..(275): Homolog of NCBI NO: 21070346 NR Description: VTC2 [Arabidopsis thaliana]
  misc_feature (1)..(273): Homolog of NCBI NO: 34527348 NR Description: unnamed protein product [Homo sapiens]
  misc_feature (1)..(273): Homolog of NCBI NO: 24059751 NR Description: hypothetical protein [Macaca fascicularis]
  misc_feature (1)..(269): Homolog of NCBI NO: 27677438 NR Description: similar to CG3552-PC [Drosophila melanogaster]
  misc_feature (1)..(269): Homolog of NCBI NO: 26351153 NR Description: unnamed protein product [Mus musculus]
MNQVLQPFVSEKFNFTKVSPLEVIFRFNDTEKDPAQYFDGVPDTVSASSSAILINVSPIGYCHVLLTPKIQDCLPQRIDQESFLIAMYVAREARTPFFRVGYNSLGGFATINHLHFQAYYLKVQYPVEKAITEKLKTLGNSVSIFHLVDYPVNGFVFEGGASLEDLSDVVSKVCIFLQENNRPFNVLISESGKRIFLLPQCYAEKQLLGKASQEFLDMRINPAIWELSGHLVLKRRKDYEEASEANIRRFLVEAALSETEFQELNRCVLDFLTSSLG

SEQ ID NO: 12866 - protein, 191 aa, Zea mays subsp. mays
  peptide (1)..(191): Ceres Seq. ID no. 12347190
  misc_feature (1)..(189): Homolog of NCBI NO: 34907712 NR Description: P0035F12.16 [Oryza sativa (japonica
  misc_feature (1)..(184): Homolog of NCBI NO: 15240467 NR Description: putative protein; protein id: At5g55120.1, by cDNA: gi_17380815, supported by cDNA: gi_20259016 [Arabidopsis
  misc_feature (1)..(189): Homolog of NCBI NO: 15810139 NR Description: unknown protein [Arabidopsis thaliana]
  misc_feature (1)..(189): Homolog of NCBI NO: 18416877 NR Description: putative protein; protein id: At4g26850.1, by cDNA: gi_15810138, supported by cDNA: gi_20260477 [Arabidopsis >gi|20260478|gb|AAM13137.1| putative protein [Arabidopsis
  misc_feature (1)..(189): Homolog of NCBI NO: 7452423 NR Description: hypothetical protein F10M23.190 - Arabidopsis >gi|4455208|emb|CAB36531.1| putative protein [Arabidopsis >gi|7269537|emb|CAB79540.1| putative protein [Arabidopsis
  misc_feature (1)..(189): Homolog of NCBI NO: 21070346 NR Description: VTC2 [Arabidopsis thaliana]
  misc_feature (1)..(187): Homolog of NCBI NO: 34527348 NR Description: unnamed protein product [Homo sapiens]
  misc_feature (1)..(187): Homolog of NCBI NO: 24059751 NR Description: hypothetical protein [Macaca fascicularis]
  misc_feature (1)..(183): Homolog of NCBI NO: 27677438 NR Description: similar to CG3552-PC [Drosophila melanogaster]
  misc_feature (1)..(183): Homolog of NCBI NO: 26351153 NR Description: unnamed protein product [Mus musculus]
MYVAREARTPFFRVGYNSLGGFATINHLHFQAYYLKVQYPVEKAITEKLKTLGNSVSIFHLVDYPVNGFVFEGGASLEDLSDVVSKVCIFLQENNRPFNVLISESGKRIFLLPQCYAEKQLLGKASQEFLDMRINPAIWELSGHLVLKRRKDYEEASEANIRRFLVEAALSETEFQELNRCVLDFLTSSLG

SEQ ID NO: 12867 - DNA, 1318 bp, Zea mays subsp. mays
  misc_feature (1)..(1318): Ceres Seq. ID no. 12374566
  misc_feature: MA Experiment ID: 108528 Result: Up-regulated in Transcription
  misc_feature: MA Experiment 108528 PARAMETER Experiment Name: Zm_Imbibed_Seeds_P Parameter: Age (day) Value: 5 vs. 2
  misc_feature: MA Experiment 108528 PARAMETER Experiment Name: Zm_Imbibed_Seeds_P Parameter: Organism Value: Zea mays
  misc_feature: MA Experiment 108528 PARAMETER Experiment Name: Zm_Imbibed_Seeds_P Parameter: Plant Line Value: 35A19
  misc_feature: MA Experiment 108528 PARAMETER Experiment Name: Zm_Imbibed_Seeds_P Parameter: Tissue Value: Aerial vs. Embryo
  misc_feature: MA Experiment ID: 108530 Result: Up-regulated in Transcription
  misc_feature: MA Experiment 108530 PARAMETER Experiment Name: Zm_Imbibed_Seeds_P Parameter: Age (day) Value: 6 vs. 2
  misc_feature: MA Experiment 108530 PARAMETER Experiment Name: Zm_Imbibed_Seeds_P Parameter: Organism Value: Zea mays
  misc_feature: MA Experiment 108530 PARAMETER Experiment Name: Zm_Imbibed_Seeds_P Parameter: Plant Line Value: 35A19
  misc_feature: MA Experiment 108530 PARAMETER Experiment Name: Zm_Imbibed_Seeds_P Parameter: Tissue Value: Aerial vs. Embryo
  misc_feature: MA Experiment ID: 108543 Result: Down-regulated in Transcription
  misc_feature: MA Experiment ID: 108547 Result: Up-regulated in Transcription
  misc_feature: MA Experiment 108547 PARAMETER Experiment Name: Zm_Imbibed_Seeds_P Parameter: Age (day) Value: 4 vs. 2
  misc_feature: MA Experiment 108547 PARAMETER Experiment Name: Zm_Imbibed_Seeds_P Parameter: Organism Value: Zea mays
  misc_feature: MA Experiment 108547 PARAMETER Experiment Name: Zm_Imbibed_Seeds_P Parameter: Plant Line Value: 35A19
  misc_feature: MA Experiment 108547 PARAMETER Experiment Name: Zm_Imbibed_Seeds_P Parameter: Tissue Value: Aerial vs. Embryo
  misc_feature: MA Experiment ID: 108689 Result: Up-regulated in Transcription
  misc_feature: MA Experiment 108689 PARAMETER Experiment Name: Zm_Drought_Roots_P Parameter: Age (day) Value: 9
  misc_feature: MA Experiment 108689 PARAMETER Experiment Name: Zm_Drought_Roots_P Parameter: Organism Value: Zea mays
  misc_feature: MA Experiment 108689 PARAMETER Experiment Name: Zm_Drought_Roots_P Parameter: Plant Line Value: 35A19
  misc_feature: MA Experiment 108689 PARAMETER Experiment Name: Zm_Drought_Roots_P Parameter: Timepoint (hr) Value: 24
  misc_feature: MA Experiment 108689 PARAMETER Experiment Name: Zm_Drought_Roots_P Parameter: Tissue Value: Roots
  misc_feature: MA Experiment 108689 PARAMETER Experiment Name: Zm_Drought_Roots_P Parameter: Treatment Value: Drought vs. No Drought
  misc_feature: MA Experiment ID: 20000478 Result: Up-regulated in Transcription
  misc_feature: MA Experiment 20000478 PARAMETER Experiment Name: Zm_5mM_SA_P Parameter: Age (day) Value: 11
  misc_feature: MA Experiment 20000478 PARAMETER Experiment Name: Zm_5mM_SA_P Parameter: Organism Value: Zea mays
  misc_feature: MA Experiment 20000478 PARAMETER Experiment Name: Zm_5mM_SA_P Parameter: Plant Line Value: 35A19
  misc_feature: MA Experiment 20000478 PARAMETER Experiment Name: Zm_5mM_SA_P Parameter: Timepoint (hr) Value: 72
  misc_feature: MA Experiment 20000478 PARAMETER Experiment Name: Zm_5mM_SA_P Parameter: Tissue Value: Aerial
  misc_feature: MA Experiment 20000478 PARAMETER Experiment Name: Zm_5mM_SA_P Parameter: Treatment Value: 5mM SA vs. No Treatment
  misc_feature: MA Experiment ID: 20000535 Result: Down-regulated in Transcription
  misc_feature: MA Experiment 20000535 PARAMETER Experiment Name: Zm_Hybrid_Seed_Dev_P Parameter: DAP Value: 30 vs. 12
  misc_feature: MA Experiment 20000535 PARAMETER Experiment Name: Zm_Hybrid_Seed_Dev_P Parameter: Organism Value: Zea mays
  misc_feature: MA Experiment 20000535 PARAMETER Experiment Name: Zm_Hybrid_Seed_Dev_P Parameter: Plant Line Value: 35A19
  misc_feature: MA Experiment 20000535 PARAMETER Experiment Name: Zm_Hybrid_Seed_Dev_P Parameter: Tissue Value: Embryo vs. Unfert Floret
acacacacgaacccacgaacgcaggctcccgagaacgcagcccccattggatttggaagcttctccatgggacaccgagcctcgtagacgaagcagaggggaccagagaaaccgaggagcaagaagcagggagccatggcgttcctcctgcccaagctcacaacgccgtcctgcaagttgcccccgagccccctcctcaagccccagctcgtcccgccgggccacggcggcggcaagatccaaggctcctccgtctccggctctggcgcggcgcaggtcgcggccccgggccacctcagcctcctgctcctgctcagcgcctcgcagcaggcggccggccccgcggccaagtcgacggcgaccaagaaccggggcaagggcggcggggatccgcaaaggtcggatttttacctcaacctcggcaccgcggtgcgcacgctgcgggacgacctgcccgacgtcttcgtccgggaatccaactacgatatctaccgtgaagacatcacatttgtcgacccactaaacactttccacggcattgacaactacaagaccatcttctgggcactcagatttcacgggcgcctgctgttcagagaaatcgggctcgatgtatcacgcatctggcagctgacagagaactcgatcgttgtccggtgggagctgtggggcactccccgtgtcccatgggagtcatacggctgcttcagcgggacgtcgaggtacaaggtcgacaggaacgggaaaatctacgagcacagagtcgacaacttggcgctggacttcccacgatcagtagccagagtgggcagcatcgctgacatggtagtcgccacgccgagccccaatttgacgttttggaatgcggttgtgacaggcgatggttgctcgtggacaaagctttatgaagccgtggtggaagctgtggaacgggaagagcatagttccactggcattggccctgttggctgcagcttcggttgcggctgtggctgcagtttttgaaatgcaaactgctgtagcttgagctgcttgttcataggatggaacgagctccagggctagttgtttggttgttcctaggggaaatgtatagatcaatatatatgggcacacaaatcacggtatactgatatctctttgtatactgtagctataggacagcaaatttagataaaacacgtactagatggctatatttgattacccttgtgaccttgtgttatacagggccacaggggtagtgctttcactgctttctttcatatgcgatacacagatcttttgggtgtggtttgcccaatattagacacagttt

SEQ ID NO: 12868 - protein, 289 aa, Zea mays subsp. mays
  peptide (1)..(289): Ceres Seq. ID no. 12374567
  misc_feature (1)..(280): Homolog of NCBI NO: 38347356 NR Description: OSJNBa0070C17.17 [Oryza sativa (japonica
  misc_feature (1)..(280): Homolog of NCBI NO: 15219209 NR Description: unknown protein; protein id: At1g16320.1,
  misc_feature (1)..(268): Homolog of NCBI NO: 18412399 NR Description: expressed protein; protein id: At1g79510.1, by cDNA: 21947., supported by cDNA: gi_13194785, supported by gi_13878082, supported by cDNA: gi_17104752 [Arabidopsis
  misc_feature (25)..(210): Homolog of NCBI NO: 34904098 NR Description: unnamed protein product [Oryza sativa (japonica group)] >gi|7573630|dbj|BAA94539.1| unnamed protein product
  misc_feature (85)..(238): Homolog of NCBI NO: 18407008 NR Description: Expressed protein; protein id: At2g46220.1, by cDNA: gi_13605751, supported by cDNA: gi_15215834, supported cDNA: gi_16226513, supported by cDNA: gi_20147418 [Arabidopsis
  misc_feature (85)..(224): Homolog of NCBI NO: 25408977 NR Description: hypothetical protein At2g46220 [imported] -
  misc_feature (93)..(208): Homolog of NCBI NO: 17228448 NR Description: hypothetical protein [Nostoc sp. PCC 7120]
  misc_feature (88)..(208): Homolog of NCBI NO: 23126421 NR Description: hypothetical protein [Nostoc punctiforme]
  misc_feature (99)..(208): Homolog of NCBI NO: 23040676 NR Description: hypothetical protein [Trichodesmium erythraeum
  misc_feature (99)..(208): Homolog of NCBI NO: 17230193 NR Description: hypothetical protein [Nostoc sp. PCC 7120]
MAFLLPKLTTPSCKLPPSPLLKPQLVPPGHGGGKIQGSSVSGSGAAQVAAPGHLSLLLLLSASQQAAGPAAKSTATKNRGKGGGDPQRSDFYLNLGTAVRTLRDDLPDVFVRESNYDIYREDITFVDPLNTFHGIDNYKTIFWALRFHGRLLFREIGLDVSRIWQLTENSIVVRWELWGTPRVPWESYGCFSGTSRYKVDRNGKIYEHRVDNLALDFPRSVARVGSIADMVVATPSPNLTFWNAVVTGDGCSWTKLYEAVVEAVEREEHSSTGIGPVGCSFGCGCGCSF

SEQ ID NO: 12869 - protein, 173 aa, Zea mays subsp. mays
  peptide (1)..(173): Ceres Seq. ID no. 12374568
  misc_feature (27)..(173): Homolog of NCBI NO: 32699068 NR Description: hypothetical protein FLJ35107 [Homo sapiens]
  misc_feature (48)..(173): Homolog of NCBI NO: 11359723 NR Description: proteophosphoglycan, membrane-associated - Leishmania major (fragment) >gi|5420389|emb|CAB46680.1|
  misc_feature (48)..(173): Homolog of NCBI NO: 13592175 NR Description: ppg3 [Leishmania major]
HTRTHERRLPRTQPPLDLEASPWDTEPRRRSRGDQRNRGARSREPWRSSCPSSQRRPASCPRAPSSSPSSSRRATAAARSKAPPSPALARRRSRPRATSASCSCSAPRSRRPAPRPSRRRPRTGARAAGIRKGRIFTSTSAPRCARCGTTCPTSSSGNPTTISTVKTSHLSTH

SEQ ID NO: 12870 - protein, 164 aa, Zea mays subsp. mays
  peptide (1)..(164): Ceres Seq. ID no. 12374569
THEPTNAGSRERSPHWIWKLLHGTPSLVDEAEGTRETEEQEAGSHGVPPAQAHNAVLQVAPEPPPQAPARPAGPRRRQDPRLLRLRLWRGAGRGPGPPQPPAPAQRLAAGGRPRGQVDGDQEPGQGRRGSAKVGFLPQPRHRGAHAAGRPARRLRPGIQLRYLP

SEQ ID NO: 12871 - DNA, 1081 bp, Zea mays subsp. mays
  misc_feature (1)..(1081): Ceres Seq. ID no. 12341888
  misc_feature: MA Experiment ID: 108522 Result: Up-regulated in Transcription
  misc_feature: MA Experiment 108522 PARAMETER Experiment Name: Zm_42deg_Heat_P Parameter: Age (day) Value: 8
  misc_feature: MA Experiment 108522 PARAMETER Experiment Name: Zm_42deg_Heat_P Parameter: Organism Value: Zea mays
  misc_feature: MA Experiment 108522 PARAMETER Experiment Name: Zm_42deg_Heat_P Parameter: Plant Line Value: 35A19
  misc_feature: MA Experiment 108522 PARAMETER Experiment Name: Zm_42deg_Heat_P Parameter: Temperature (deg C) Value: 42 vs. 22
  misc_feature: MA Experiment 108522 PARAMETER Experiment Name: Zm_42deg_Heat_P Parameter: Timepoint (hr) Value: 1
  misc_feature: MA Experiment 108522 PARAMETER Experiment Name: Zm_42deg_Heat_P Parameter: Tissue Value: Aerial
  misc_feature: MA Experiment ID: 108526 Result: Up-regulated in Transcription
  misc_feature: MA Experiment 108526 PARAMETER Experiment Name: Zm_5mM_NO_P Parameter: Age (day) Value: 8
  misc_feature: MA Experiment 108526 PARAMETER Experiment Name: Zm_5mM_NO_P Parameter: Organism Value: Zea mays
  misc_feature: MA Experiment 108526 PARAMETER Experiment Name: Zm_5mM_NO_P Parameter: Plant Line Value: 35A19
  misc_feature: MA Experiment 108526 PARAMETER Experiment Name: Zm_5mM_NO_P Parameter: Timepoint (hr) Value: 1
  misc_feature: MA Experiment 108526 PARAMETER Experiment Name: Zm_5mM_NO_P Parameter: Tissue Value: Aerial
  misc_feature: MA Experiment 108526 PARAMETER Experiment Name: Zm_5mM_NO_P Parameter: Treatment Value: 5mM NO vs. No Treatment
  misc_feature: MA Experiment ID: 108527 Result: Up-regulated in Transcription
  misc_feature: MA Experiment 108527 PARAMETER Experiment Name: Zm_5mM_NO_P Parameter: Age (day) Value: 8
  misc_feature: MA Experiment 108527 PARAMETER Experiment Name: Zm_5mM_NO_P Parameter: Organism Value: Zea mays
  misc_feature: MA Experiment 108527 PARAMETER Experiment Name: Zm_5mM_NO_P Parameter: Plant Line Value: 35A19
  misc_feature: MA Experiment 108527 PARAMETER Experiment Name: Zm_5mM_NO_P Parameter: Timepoint (hr) Value: 6
  misc_feature: MA Experiment 108527 PARAMETER Experiment Name: Zm_5mM_NO_P Parameter: Tissue Value: Aerial
  misc_feature: MA Experiment 108527 PARAMETER Experiment Name: Zm_5mM_NO_P Parameter: Treatment Value: 5mM NO vs. No Treatment
  misc_feature: MA Experiment ID: 108542 Result: Up-regulated in Transcription
  misc_feature: MA Experiment 108542 PARAMETER Experiment Name: Zm_150mM_NaCl_P Parameter: Age (day) Value: 8
  misc_feature: MA Experiment 108542 PARAMETER Experiment Name: Zm_150mM_NaCl_P Parameter: Organism Value: Zea mays
  misc_feature: MA Experiment 108542 PARAMETER Experiment Name: Zm_150mM_NaCl_P Parameter: Plant Line Value: 35A19
  misc_feature: MA Experiment 108542 PARAMETER Experiment Name: Zm_150mM_NaCl_P Parameter: Timepoint (hr) Value: 6
  misc_feature: MA Experiment 108542 PARAMETER Experiment Name: Zm_150mM_NaCl_P Parameter: Tissue Value: Aerial
  misc_feature: MA Experiment 108542 PARAMETER Experiment Name: Zm_150mM_NaCl_P Parameter: Treatment Value: 150mM NaCl vs. No Treatment
  misc_feature: MA Experiment ID: 108559 Result: Up-regulated in Transcription
  misc_feature: MA Experiment 108559 PARAMETER Experiment Name: Zm_5mM_NO_P Parameter: Age (day) Value: 8
  misc_feature: MA Experiment 108559 PARAMETER Experiment Name: Zm_5mM_NO_P Parameter: Organism Value: Zea mays
  misc_feature: MA Experiment 108559 PARAMETER Experiment Name: Zm_5mM_NO_P Parameter: Plant Line Value: 35A19
  misc_feature: MA Experiment 108559 PARAMETER Experiment Name: Zm_5mM_NO_P Parameter: Timepoint (hr) Value: 12
  misc_feature: MA Experiment 108559 PARAMETER Experiment Name: Zm_5mM_NO_P Parameter: Tissue Value: Aerial
  misc_feature: MA Experiment 108559 PARAMETER Experiment Name: Zm_5mM_NO_P Parameter: Treatment Value: 5mM NO vs. No Treatment
  misc_feature: MA Experiment ID: 20000477 Result: Up-regulated in Transcription
  misc_feature: MA Experiment 20000477 PARAMETER Experiment Name: Zm_5mM_SA_P Parameter: Age (day) Value: 10
  misc_feature: MA Experiment 20000477 PARAMETER Experiment Name: Zm_5mM_SA_P Parameter: Organism Value: Zea mays
  misc_feature: MA Experiment 20000477 PARAMETER Experiment Name: Zm_5mM_SA_P Parameter: Plant Line Value: 35A19
  misc_feature: MA Experiment 20000477 PARAMETER Experiment Name: Zm_5mM_SA_P Parameter: Timepoint (hr) Value: 48
  misc_feature: MA Experiment 20000477 PARAMETER Experiment Name: Zm_5mM_SA_P Parameter: Tissue Value: Aerial
  misc_feature: MA Experiment 20000477 PARAMETER Experiment Name: Zm_5mM_SA_P Parameter: Treatment Value: 5mM SA vs. No Treatment
  misc_feature: MA Experiment ID: 20000478 Result: Up-regulated in Transcription
  misc_feature: MA Experiment 20000478 PARAMETER Experiment Name: Zm_5mM_SA_P Parameter: Age (day) Value: 11
  misc_feature: MA Experiment 20000478 PARAMETER Experiment Name: Zm_5mM_SA_P Parameter: Organism Value: Zea mays
  misc_feature: MA Experiment 20000478 PARAMETER Experiment Name: Zm_5mM_SA_P Parameter: Plant Line Value: 35A19
  misc_feature: MA Experiment 20000478 PARAMETER Experiment Name: Zm_5mM_SA_P Parameter: Timepoint (hr) Value: 72
  misc_feature: MA Experiment 20000478 PARAMETER Experiment Name: Zm_5mM_SA_P Parameter: Tissue Value: Aerial
  misc_feature: MA Experiment 20000478 PARAMETER Experiment Name: Zm_5mM_SA_P Parameter: Treatment Value: 5mM SA vs. No Treatment
  misc_feature: MA Experiment ID: 20000480 Result: Up-regulated in Transcription
  misc_feature: MA Experiment 20000480 PARAMETER Experiment Name: Zm_Drought_P Parameter: Age (day) Value: 11
  misc_feature: MA Experiment 20000480 PARAMETER Experiment Name: Zm_Drought_P Parameter: Organism Value: Zea mays
  misc_feature: MA Experiment 20000480 PARAMETER Experiment Name: Zm_Drought_P Parameter: Plant Line Value: 35A19
  misc_feature: MA Experiment 20000480 PARAMETER Experiment Name: Zm_Drought_P Parameter: Timepoint (hr) Value: 72
  misc_feature: MA Experiment 20000480 PARAMETER Experiment Name: Zm_Drought_P Parameter: Tissue Value: Aerial
  misc_feature: MA Experiment 20000480 PARAMETER Experiment Name: Zm_Drought_P Parameter: Treatment Value: Drought vs. No Drought
  misc_feature: MA Experiment ID: 20000488 Result: Up-regulated in Transcription
  misc_feature: MA Experiment 20000488 PARAMETER Experiment Name: Zm_50mM_NH4NO3_L_to_H_P Parameter: Organism Value: Zea mays
  misc_feature: MA Experiment 20000488 PARAMETER Experiment Name: Zm_50mM_NH4NO3_L_to_H_P Parameter: Timepoint (hr) Value: 8
  misc_feature: MA Experiment 20000488 PARAMETER Experiment Name: Zm_50mM_NH4NO3_L_to_H_P Parameter: Tissue Value: Leaves
  misc_feature: MA Experiment 20000488 PARAMETER Experiment Name: Zm_50mM_NH4NO3_L_to_H_P Parameter: Treatment Value: 50mM NH4NO3 vs. 100mM Mannitol
  misc_feature: MA Experiment ID: 20000492 Result: Down-regulated in Transcription
  misc_feature: MA Experiment 20000492 PARAMETER Experiment Name: Zm_Hybrid_Seed_Dev_P Parameter: DAP Value: 12
  misc_feature: MA Experiment 20000492 PARAMETER Experiment Name: Zm_Hybrid_Seed_Dev_P Parameter: Organism Value: Zea mays
  misc_feature: MA Experiment 20000492 PARAMETER Experiment Name: Zm_Hybrid_Seed_Dev_P Parameter: Plant Line Value: 35A19
  misc_feature: MA Experiment 20000492 PARAMETER Experiment Name: Zm_Hybrid_Seed_Dev_P Parameter: Tissue Value: Fert Kernel vs. Unfert Floret
  misc_feature: MA Experiment ID: 20000534 Result: Up-regulated in Transcription
  misc_feature: MA Experiment 20000534 PARAMETER Experiment Name: Zm_Hybrid_Pollen_P Parameter: Age (day) Value: 8
  misc_feature: MA Experiment 20000534 PARAMETER Experiment Name: Zm_Hybrid_Pollen_P Parameter: Organism Value: Zea mays
  misc_feature: MA Experiment 20000534 PARAMETER Experiment Name: Zm_Hybrid_Pollen_P Parameter: Plant Line Value: 35A19
  misc_feature: MA Experiment 20000534 PARAMETER Experiment Name: Zm_Hybrid_Pollen_P Parameter: Tissue Value: Pollen vs. Aerial
  misc_feature: MA Experiment ID: 20000535 Result: Down-regulated in Transcription
  misc_feature: MA Experiment 20000535 PARAMETER Experiment Name: Zm_Hybrid_Seed_Dev_P Parameter: DAP Value: 30 vs. 12
  misc_feature: MA Experiment 20000535 PARAMETER Experiment Name: Zm_Hybrid_Seed_Dev_P Parameter: Organism Value: Zea mays
  misc_feature: MA Experiment 20000535 PARAMETER Experiment Name: Zm_Hybrid_Seed_Dev_P Parameter: Plant Line Value: 35A19
  misc_feature: MA Experiment 20000535 PARAMETER Experiment Name: Zm_Hybrid_Seed_Dev_P Parameter: Tissue Value: Embryo vs. Unfert Floret
gcatgcatatgatgatgacaaatggtcaagtctgtatgaagattttgacgacggtgtcggcgaagaatcaattcttcctctggaatctgattcaactggtgattttgtggacattgactctgcatcacctacctttcctagtgacgatgcaatggaatcatcaattaccaattcatttgctcggaattgttcaattaatggcactccaagtttagtttctgccatgaaaggaacacgtgtgaagaagggaatcacgacaaagttgagcgtttcttgggcccctgatgtatacgaccctcctattacttctgactcgcacacggtgaaagggcaccatacgagttcaactaagagtaactacaaatacaagacctccaagagcagcaatatcactagaaggaaaaaggacaagaagcattctaggcacagtagtagcaatgggggtggcagcaaaagagacaagaagcattcttaccgcaggtagtgccagcagcagcagcagagctattaccagtggttctctatattgtgacgcgtacagtggtggtggcatcagcagcagaactgttcctgaatctgccaagatatctccattggtggtagctgaaaatgtcacaccgcaagagatggttcctatactgaagacactggaaccaatcaaatgtactaccagctgcggcaaagagaagccatttgccttgctgtcgcgccagttttcccctgcaaggtacaaggggatgttcaccttttggaaccaaaaccaactgacttcttgacaatttgctatgcggaagctcacctgaaagttcccttgccaagggctgttcggatcccctccaaactttagagcttcaaaaaatttagagcattttagctcacttttgagctctaatctaaggttgaccaaagtttagatctaactgagctttacctctaaagtttagagaaggaaatctaaacatgccctaatttgattttatcaaagattgttgctattgttctcttcgttaccatgtttgtttcgcctgtctgaaacttcagagatcatgttttggaaaattgcttggcaaagtgcttgtgt

SEQ ID NO: 12872 - protein, 160 aa, Zea mays subsp. mays
  peptide (1)..(160): Ceres Seq. ID no. 12341889
  misc_feature (13)..(160): Homolog of NCBI NO: 30687157 NR Description: expressed protein [Arabidopsis thaliana]
HAYDDDKWSSLYEDFDDGVGEESILPLESDSTGDFVDIDSASPTFPSDDAMESSITNSFARNCSINGTPSLVSAMKGTRVKKGITTKLSVSWAPDVYDPPITSDSHTVKGHHTSSTKSNYKYKTSKSSNITRRKKDKKHSRHSSSNGGGSKRDKKHSYRR

SEQ ID NO: 12873 - protein, 112 aa, Zea mays subsp. mays
  peptide (1)..(112): Ceres Seq. ID no. 12341890
MGVAAKETRSILTAGSASSSSRAITSGSLYCDAYSGGGISSRTVPESAKISPLVVAENVTPQEMVPILKTLEPIKCTTSCGKEKPFALLSRQFSPARYKGMFTFWNQNQLTS

SEQ ID NO: 12874 - protein, 110 aa, Zea mays subsp. mays
  peptide (1)..(110): Ceres Seq. ID no. 12341891
  misc_feature (1)..(110): Homolog of NCBI NO: 30687157 NR Description: expressed protein [Arabidopsis thaliana]
MESSITNSFARNCSINGTPSLVSAMKGTRVKKGITTKLSVSWAPDVYDPPITSDSHTVKGHHTSSTKSNYKYKTSKSSNITRRKKDKKHSRHSSSNGGGSKRDKKHSYRR

SEQ ID NO: 12875 - DNA, 1016 bp, Zea mays subsp. mays
  misc_feature (1)..(1016): Ceres Seq. ID no. 12367141
  misc_feature: MA Experiment ID: 108534 Result: Down-regulated in Transcription
  misc_feature: MA Experiment 108534 PARAMETER Experiment Name: Zm_4deg_Cold_P Parameter: Age (hr) Value: 8
  misc_feature: MA Experiment 108534 PARAMETER Experiment Name: Zm_4deg_Cold_P Parameter: Organism Value: Zea mays
  misc_feature: MA Experiment 108534 PARAMETER Experiment Name: Zm_4deg_Cold_P Parameter: Plant Line Value: 35A19
  misc_feature: MA Experiment 108534 PARAMETER Experiment Name: Zm_4deg_Cold_P Parameter: Temperature (deg C) Value: 4 vs. 22
  misc_feature: MA Experiment 108534 PARAMETER Experiment Name: Zm_4deg_Cold_P Parameter: Timepoint (hr) Value: 6
  misc_feature: MA Experiment 108534 PARAMETER Experiment Name: Zm_4deg_Cold_P Parameter: Tissue Value: Aerial
aaccttttgccgtcttgcggcggccttctgctccgccgctcgttctcatctcttgcagcggcctggggaaaaagaggaggagagatcggagatgaaggcgtgtgcgaaggctgcgggggagaggctgccgctggtctgtgctccgtcaactaggcagcctctagctcggagctttgttaaggtaagaagattaccctctcaacatgagacgaagtcacaagtatcctgctcagttagggtgtcagaaaacacagctcacagaatagatgccacagcagaaaacattttcccagcaatgaaagatcatgtcttgaaagcaactgatgcaatcaacagaggagaagtgattgcggtgcctactgataccatatacgggtttgcatgtgatgcatgctctgcaggagcagttaatcgtatttatgagatcaaaggacgcatacaaacacggcctctggcaatttgtgttggtgatgtctcagacatatcacggtttgctttagtggaccacttgccacatggcttgcttgatagtctacttcctgggcctgtcactattgttctaaaacgaggtgaaaacagcatattagagagatcacttaatcctggcttggatagcattggagttcgtgtgccggatctggatttcatacgttccattgttcgtggtactggaagtgcacttgcacttaccagcgccaacttaagcggacagcctagtagtgtctgtgtcaaagatttcgagggtttatggccacattgttcatatgtctttgatggtggagtacttccttctgggcgtgctggttcaacaatcgttgatctaataacaccaggagtttacaagatattgagggacggaagctcaaggaaggaaacagcagcagtgctcggcaagttcggctttgttgaagcgttgtaactactcggcactttaagaaagttagcacgatcaaagagtggctgtcttatccacagtatatcttgtttaattagtgatacattagagcttttgttgc

SEQ ID NO: 12876 - protein, 305 aa, Zea mays subsp. mays
  peptide (1)..(305): Ceres Seq. ID no. 12367142
  misc_feature (108)..(286): Pfam Name: yrdC domain Pfam Description: yrdC domain
  misc_feature (95)..(299): Homolog of NCBI NO: 9759323 NR Description: gene_id:MUP24.1~pir||T31603~similar to unknown
  misc_feature (104)..(302): Homolog of NCBI NO: 23956354 NR Description: hypothetical protein MGC38336 [Mus musculus]
  misc_feature (104)..(302): Homolog of NCBI NO: 30908964 NR Description: ischemia/reperfusion inducible protein [Mus
  misc_feature (104)..(302): Homolog of NCBI NO: 30691316 NR Description: YRDC protein [Homo sapiens]
  misc_feature (104)..(302): Homolog of NCBI NO: 31088868 NR Description: ischemia/reperfusion inducible protein [Homo >gi|30909242|gb|AAP37053.1| ischemia/reperfusion inducible transcript variant 1 [Homo sapiens] >gi|30909244|gb|AAP37054.1|
  misc_feature (113)..(303): Homolog of NCBI NO: 28573691 NR Description: CG33005-PB [Drosophila melanogaster]
  misc_feature (121)..(302): Homolog of NCBI NO: 28278078 NR Description: Similar to hypothetical protein MGC38336 [Xenopus
  misc_feature (95)..(189): Homolog of NCBI NO: 18424373 NR Description: putative protein; protein id: At5g60590.1, by cDNA: gi_14190378, supported by cDNA: gi_15215870 [Arabidopsis >gi|14190379|gb|AAK55670.1|AF378867_1 AT5g60590/muf9_240
  misc_feature (99)..(303): Homolog of NCBI NO: 39591298 NR Description: Hypothetical protein CBG20783 [Caenorhabditis
  misc_feature (100)..(286): Homolog of NCBI NO: 15888068 NR Description: AGR_C_1315p [Agrobacterium tumefaciens]
TFCRLAAAFCSAARSHLLQRPGEKEEERSEMKACAKAAGERLPLVCAPSTRQPLARSFVKVRRLPSQHETKSQVSCSVRVSENTAHRIDATAENIFPAMKDHVLKATDAINRGEVIAVPTDTIYGFACDACSAGAVNRIYEIKGRIQTRPLAICVGDVSDISRFALVDHLPHGLLDSLLPGPVTIVLKRGENSILERSLNPGLDSIGVRVPDLDFIRSIVRGTGSALALTSANLSGQPSSVCVKDFEGLWPHCSYVFDGGVLPSGRAGSTIVDLITPGVYKILRDGSSRKETAAVLGKFGFVEAL

SEQ ID NO: 12877 - protein, 275 aa, Zea mays subsp. mays
  peptide (1)..(275): Ceres Seq. ID no. 12367143
  misc_feature (78)..(256): Pfam Name: yrdC domain Pfam Description: yrdC domain
  misc_feature (74)..(272): Homolog of NCBI NO: 23956354 NR Description: hypothetical protein MGC38336 [Mus musculus]
  misc_feature (74)..(272): Homolog of NCBI NO: 30908964 NR Description: ischemia/reperfusion inducible protein [Mus
  misc_feature (74)..(272): Homolog of NCBI NO: 30691316 NR Description: YRDC protein [Homo sapiens]
  misc_feature (74)..(272): Homolog of NCBI NO: 31088868 NR Description: ischemia/reperfusion inducible protein [Homo >gi|30909242|gb|AAP37053.1| ischemia/reperfusion inducible transcript variant 1 [Homo sapiens] >gi|30909244|gb|AAP37054.1|
  misc_feature (83)..(273): Homolog of NCBI NO: 28573691 NR Description: CG33005-PB [Drosophila melanogaster]
  misc_feature (65)..(269): Homolog of NCBI NO: 9759323 NR Description: gene_id:MUP24.1~pir||T31603~similar to unknown
  misc_feature (91)..(272): Homolog of NCBI NO: 28278078 NR Description: Similar to hypothetical protein MGC38336 [Xenopus
  misc_feature (65)..(159): Homolog of NCBI NO: 18424373 NR Description: putative protein; protein id: At5g60590.1, by cDNA: gi_14190378, supported by cDNA: gi_15215870 [Arabidopsis >gi|14190379|gb|AAK55670.1|AF378867_1 AT5g60590/muf9_240
  misc_feature (69)..(273): Homolog of NCBI NO: 39591298 NR Description: Hypothetical protein CBG20783 [Caenorhabditis
  misc_feature (70)..(256): Homolog of NCBI NO: 15888068 NR Description: AGR_C_1315p [Agrobacterium tumefaciens]
MKACAKAAGERLPLVCAPSTRQPLARSFVKVRRLPSQHETKSQVSCSVRVSENTAHRIDATAENIFPAMKDHVLKATDAINRGEVIAVPTDTIYGFACDACSAGAVNRIYEIKGRIQTRPLAICVGDVSDISRFALVDHLPHGLLDSLLPGPVTIVLKRGENSILERSLNPGLDSIGVRVPDLDFIRSIVRGTGSALALTSANLSGQPSSVCVKDFEGLWPHCSYVFDGGVLPSGRAGSTIVDLITPGVYKILRDGSSRKETAAVLGKFGFVEAL

SEQ ID NO: 12878 - protein, 207 aa, Zea mays subsp. mays
  peptide (1)..(207): Ceres Seq. ID no. 12367144
  misc_feature (10)..(188): Pfam Name: yrdC domain Pfam Description: yrdC domain
  misc_feature (1)..(201): Homolog of NCBI NO: 9759323 NR Description: gene_id:MUP24.1~pir||T31603~similar to unknown
  misc_feature (6)..(204): Homolog of NCBI NO: 23956354 NR Description: hypothetical protein MGC38336 [Mus musculus]
  misc_feature (6)..(204): Homolog of NCBI NO: 30908964 NR Description: ischemia/reperfusion inducible protein [Mus
  misc_feature (6)..(204): Homolog of NCBI NO: 30691316 NR Description: YRDC protein [Homo sapiens]
  misc_feature (6)..(204): Homolog of NCBI NO: 31088868 NR Description: ischemia/reperfusion inducible protein [Homo >gi|30909242|gb|AAP37053.1| ischemia/reperfusion inducible transcript variant 1 [Homo sapiens] >gi|30909244|gb|AAP37054.1|
  misc_feature (15)..(205): Homolog of NCBI NO: 28573691 NR Description: CG33005-PB [Drosophila melanogaster]
  misc_feature (23)..(204): Homolog of NCBI NO: 28278078 NR Description: Similar to hypothetical protein MGC38336 [Xenopus
  misc_feature (1)..(91): Homolog of NCBI NO: 18424373 NR Description: putative protein; protein id: At5g60590.1, by cDNA: gi_14190378, supported by cDNA: gi_15215870 [Arabidopsis >gi|14190379|gb|AAK55670.1|AF378867_1 AT5g60590/muf9_240
  misc_feature (1)..(205): Homolog of NCBI NO: 39591298 NR Description: Hypothetical protein CBG20783 [Caenorhabditis
  misc_feature (2)..(188): Homolog of NCBI NO: 15888068 NR Description: AGR_C_1315p [Agrobacterium tumefaciens]
MKDHVLKATDAINRGEVIAVPTDTIYGFACDACSAGAVNRIYEIKGRIQTRPLAICVGDVSDISRFALVDHLPHGLLDSLLPGPVTIVLKRGENSILERSLNPGLDSIGVRVPDLDFIRSIVRGTGSALALTSANLSGQPSSVCVKDFEGLWPHCSYVFDGGVLPSGRAGSTIVDLITPGVYKILRDGSSRKETAAVLGKFGFVEAL

SEQ ID NO: 12879 - DNA, 594 bp, Zea mays subsp. mays
  misc_feature (1)..(594): Ceres Seq. ID no. 13564163
  misc_feature: MA Experiment ID: 108527 Result: Up-regulated in Transcription
  misc_feature: MA Experiment 108527 PARAMETER Experiment Name: Zm_5mM_NO_P Parameter: Age (day) Value: 8
  misc_feature: MA Experiment 108527 PARAMETER Experiment Name: Zm_5mM_NO_P Parameter: Organism Value: Zea mays
  misc_feature: MA Experiment 108527 PARAMETER Experiment Name: Zm_5mM_NO_P Parameter: Plant Line Value: 35A19
  misc_feature: MA Experiment 108527 PARAMETER Experiment Name: Zm_5mM_NO_P Parameter: Timepoint (hr) Value: 6
  misc_feature: MA Experiment 108527 PARAMETER Experiment Name: Zm_5mM_NO_P Parameter: Tissue Value: Aerial
  misc_feature: MA Experiment 108527 PARAMETER Experiment Name: Zm_5mM_NO_P Parameter: Treatment Value: 5mM NO vs. No Treatment
  misc_feature: MA Experiment ID: 108559 Result: Up-regulated in Transcription
  misc_feature: MA Experiment 108559 PARAMETER Experiment Name: Zm_5mM_NO_P Parameter: Age (day) Value: 8
  misc_feature: MA Experiment 108559 PARAMETER Experiment Name: Zm_5mM_NO_P Parameter: Organism Value: Zea mays
  misc_feature: MA Experiment 108559 PARAMETER Experiment Name: Zm_5mM_NO_P Parameter: Plant Line Value: 35A19
  misc_feature: MA Experiment 108559 PARAMETER Experiment Name: Zm_5mM_NO_P Parameter: Timepoint (hr) Value: 12
  misc_feature: MA Experiment 108559 PARAMETER Experiment Name: Zm_5mM_NO_P Parameter: Tissue Value: Aerial
  misc_feature: MA Experiment 108559 PARAMETER Experiment Name: Zm_5mM_NO_P Parameter: Treatment Value: 5mM NO vs. No Treatment
cagaccactcaaggtcgttgagtttgatcggccctatccacagtgcatagcatacttggatctcaagcgcgaggagtgctctcgactctttcctgcaggccggatatactcgcaagcgttccacctcgcagggcagggcttcttcctctcagctcactgtaacatggaacagcaaagcaccttctactgctttggcctgttcctggggatgcaagagaagggctcaacgagcgtgaccgtggactatgagtttgctgcaagaacgagaccatccggcgagtttgtgagcaagtataagggtaactacacatttaccggtgggaaggcagttgggtacaggaatctctttggaatcccgtggcaggcgttcatggccgatgacagcctcttcttcatcgacgggatgctgcatctgagagctgagcttacgataaagcaacctacgtagatgtgctgccgtcggattaagtgtgtccagtcatgggtgatgtggaaaatgctgtgtgctgcagatatcctttttvtttttwwccttttgttcacgcaccttaatccttacattaatagacagtttggtgatgacaaaatataaag

SEQ ID NO: 12880 - protein, 148 aa, Zea mays subsp. mays
  peptide (1)..(148): Ceres Seq. ID no. 13564164
  misc_feature (1)..(148): Homolog of NCBI NO: 11282344 NR Description: hypothetical protein F2A19.200 - Arabidopsis >gi|6850851|emb|CAB71090.1| putative protein [Arabidopsis
  misc_feature (1)..(148): Homolog of NCBI NO: 30695452 NR Description: POZ domain protein family [Arabidopsis thaliana]
  misc_feature (1)..(146): Homolog of NCBI NO: 18412063 NR Description: POZ domain protein family [Arabidopsis thaliana]
  misc_feature (1)..(146): Homolog of NCBI NO: 18407023 NR Description: POZ domain protein family [Arabidopsis thaliana] unknown protein [Arabidopsis thaliana] unknown protein [Arabidopsis thaliana]
  misc_feature (1)..(146): Homolog of NCBI NO: 25352317 NR Description: hypothetical protein At2g46260 [imported] -
  misc_feature (1)..(146): Homolog of NCBI NO: 21536778 NR Description: unknown [Arabidopsis thaliana]
  misc_feature (1)..(116): Homolog of NCBI NO: 27948452 NR Description: GAMYB-binding protein [Hordeum vulgare subsp.
  misc_feature (1)..(145): Homolog of NCBI NO: 15234082 NR Description: POZ domain protein family [Arabidopsis thaliana]
RPLKVVEFDRPYPQCIAYLDLKREECSRLFPAGRIYSQAFHLAGQGFFLSAHCNMEQQSTFYCFGLFLGMQEKGSTSVTVDYEFAARTRPSGEFVSKYKGNYTFTGGKAVGYRNLFGIPWQAFMADDSLFFIDGMLHLRAELTIKQPT

SEQ ID NO: 12881 - protein, 94 aa, Zea mays subsp. mays
  peptide (1)..(94): Ceres Seq. ID no. 13564165
  misc_feature (1)..(94): Homolog of NCBI NO: 11282344 NR Description: hypothetical protein F2A19.200 - Arabidopsis >gi|6850851|emb|CAB71090.1| putative protein [Arabidopsis
  misc_feature (1)..(94): Homolog of NCBI NO: 30695452 NR Description: POZ domain protein family [Arabidopsis thaliana]
  misc_feature (1)..(92): Homolog of NCBI NO: 18412063 NR Description: POZ domain protein family [Arabidopsis thaliana]
  misc_feature (1)..(92): Homolog of NCBI NO: 18407023 NR Description: POZ domain protein family [Arabidopsis thaliana] unknown protein [Arabidopsis thaliana] unknown protein [Arabidopsis thaliana]
  misc_feature (1)..(92): Homolog of NCBI NO: 21536778 NR Description: unknown [Arabidopsis thaliana]
  misc_feature (1)..(92): Homolog of NCBI NO: 25352317 NR Description: hypothetical protein At2g46260 [imported] -
  misc_feature (1)..(62): Homolog of NCBI NO: 27948452 NR Description: GAMYB-binding protein [Hordeum vulgare subsp.
  misc_feature (1)..(91): Homolog of NCBI NO: 15234082 NR Description: POZ domain protein family [Arabidopsis thaliana]
MEQQSTFYCFGLFLGMQEKGSTSVTVDYEFAARTRPSGEFVSKYKGNYTFTGGKAVGYRNLFGIPWQAFMADDSLFFIDGMLHLRAELTIKQPT

SEQ ID NO: 12882 - protein, 79 aa, Zea mays subsp. mays
  peptide (1)..(79): Ceres Seq. ID no. 13564166
  misc_feature (1)..(79): Homolog of NCBI NO: 11282344 NR Description: hypothetical protein F2A19.200 - Arabidopsis >gi|6850851|emb|CAB71090.1| putative protein [Arabidopsis
  misc_feature (1)..(79): Homolog of NCBI NO: 30695452 NR Description: POZ domain protein family [Arabidopsis thaliana]
  misc_feature (1)..(77): Homolog of NCBI NO: 18412063 NR Description: POZ domain protein family [Arabidopsis thaliana]
  misc_feature (1)..(77): Homolog of NCBI NO: 18407023 NR Description: POZ domain protein family [Arabidopsis thaliana] unknown protein [Arabidopsis thaliana] unknown protein [Arabidopsis thaliana]
  misc_feature (1)..(77): Homolog of NCBI NO: 21536778 NR Description: unknown [Arabidopsis thaliana]
  misc_feature (1)..(77): Homolog of NCBI NO: 25352317 NR Description: hypothetical protein At2g46260 [imported] -
  misc_feature (1)..(47): Homolog of NCBI NO: 27948452 NR Description: GAMYB-binding protein [Hordeum vulgare subsp.
  misc_feature (1)..(76): Homolog of NCBI NO: 15234082 NR Description: POZ domain protein family [Arabidopsis thaliana]
MQEKGSTSVTVDYEFAARTRPSGEFVSKYKGNYTFTGGKAVGYRNLFGIPWQAFMADDSLFFIDGMLHLRAELTIKQPT

SEQ ID NO: 12883 - DNA, 1144 bp, Zea mays subsp. mays
  misc_feature (1)..(1144): Ceres Seq. ID no. 12340675
  misc_feature: MA Experiment ID: 108522 Result: Up-regulated in Transcription
  misc_feature: MA Experiment 108522 PARAMETER Experiment Name: Zm_42deg_Heat_P Parameter: Age (day) Value: 8
  misc_feature: MA Experiment 108522 PARAMETER Experiment Name: Zm_42deg_Heat_P Parameter: Organism Value: Zea mays
  misc_feature: MA Experiment 108522 PARAMETER Experiment Name: Zm_42deg_Heat_P Parameter: Plant Line Value: 35A19
  misc_feature: MA Experiment 108522 PARAMETER Experiment Name: Zm_42deg_Heat_P Parameter: Temperature (deg C) Value: 42 vs. 22
  misc_feature: MA Experiment 108522 PARAMETER Experiment Name: Zm_42deg_Heat_P Parameter: Timepoint (hr) Value: 1
  misc_feature: MA Experiment 108522 PARAMETER Experiment Name: Zm_42deg_Heat_P Parameter: Tissue Value: Aerial
  misc_feature: MA Experiment ID: 108523 Result: Up-regulated in Transcription
  misc_feature: MA Experiment 108523 PARAMETER Experiment Name: Zm_42deg_Heat_P Parameter: Age (day) Value: 8
  misc_feature: MA Experiment 108523 PARAMETER Experiment Name: Zm_42deg_Heat_P Parameter: Organism Value: Zea mays
  misc_feature: MA Experiment 108523 PARAMETER Experiment Name: Zm_42deg_Heat_P Parameter: Plant Line Value: 35A19
  misc_feature: MA Experiment 108523 PARAMETER Experiment Name: Zm_42deg_Heat_P Parameter: Temperature (deg C) Value: 42 vs. 22
  misc_feature: MA Experiment 108523 PARAMETER Experiment Name: Zm_42deg_Heat_P Parameter: Timepoint (hr) Value: 6
  misc_feature: MA Experiment 108523 PARAMETER Experiment Name: Zm_42deg_Heat_P Parameter: Tissue Value: Aerial
  misc_feature: MA Experiment ID: 108528 Result: Up-regulated in Transcription
  misc_feature: MA Experiment 108528 PARAMETER Experiment Name: Zm_Imbibed_Seeds_P Parameter: Age (day) Value: 5 vs. 2
  misc_feature: MA Experiment 108528 PARAMETER Experiment Name: Zm_Imbibed_Seeds_P Parameter: Organism Value: Zea mays
  misc_feature: MA Experiment 108528 PARAMETER Experiment Name: Zm_Imbibed_Seeds_P Parameter: Plant Line Value: 35A19
  misc_feature: MA Experiment 108528 PARAMETER Experiment Name: Zm_Imbibed_Seeds_P Parameter: Tissue Value: Aerial vs. Embryo
  misc_feature: MA Experiment ID: 108536 Result: Down-regulated in Transcription
  misc_feature: MA Experiment 108536 PARAMETER Experiment Name: Zm_Meristem_P Parameter: Age (day) Value: 8
  misc_feature: MA Experiment 108536 PARAMETER Experiment Name: Zm_Meristem_P Parameter: Organism Value: Zea mays
  misc_feature: MA Experiment 108536 PARAMETER Experiment Name: Zm_Meristem_P Parameter: Plant Line Value: 35A19
  misc_feature: MA Experiment 108536 PARAMETER Experiment Name: Zm_Meristem_P Parameter: Tissue Value: Shoot Meristem vs. Above Shoot Meristem
  misc_feature: MA Experiment ID: 108544 Result: Down-regulated in Transcription
  misc_feature: MA Experiment ID: 108545 Result: Up-regulated in Transcription
  misc_feature: MA Experiment 108545 PARAMETER Experiment Name: Zm_Imbibed_Seeds_P Parameter: Age (day) Value: 3 vs. 2
  misc_feature: MA Experiment 108545 PARAMETER Experiment Name: Zm_Imbibed_Seeds_P Parameter: Organism Value: Zea mays
  misc_feature: MA Experiment 108545 PARAMETER Experiment Name: Zm_Imbibed_Seeds_P Parameter: Plant Line Value: 35A19
  misc_feature: MA Experiment 108545 PARAMETER Experiment Name: Zm_Imbibed_Seeds_P Parameter: Tissue Value: Aerial vs. Embryo
  misc_feature: MA Experiment ID: 108547 Result: Up-regulated in Transcription
  misc_feature: MA Experiment 108547 PARAMETER Experiment Name: Zm_Imbibed_Seeds_P Parameter: Age (day) Value: 4 vs. 2
  misc_feature: MA Experiment 108547 PARAMETER Experiment Name: Zm_Imbibed_Seeds_P Parameter: Organism Value: Zea mays
  misc_feature: MA Experiment 108547 PARAMETER Experiment Name: Zm_Imbibed_Seeds_P Parameter: Plant Line Value: 35A19
  misc_feature: MA Experiment 108547 PARAMETER Experiment Name: Zm_Imbibed_Seeds_P Parameter: Tissue Value: Aerial vs. Embryo
  misc_feature: MA Experiment ID: 108688 Result: Down-regulated in Transcription
  misc_feature: MA Experiment 108688 PARAMETER Experiment Name: Zm_Embryos-Flowers__P Parameter: Tissue Value: Immature Flowers vs. Aerial+
  misc_feature: MA Experiment ID: 20000492 Result: Up-regulated in Transcription
  misc_feature: MA Experiment 20000492 PARAMETER Experiment Name: Zm_Hybrid_Seed_Dev_P Parameter: DAP Value: 12
  misc_feature: MA Experiment 20000492 PARAMETER Experiment Name: Zm_Hybrid_Seed_Dev_P Parameter: Organism Value: Zea mays
  misc_feature: MA Experiment 20000492 PARAMETER Experiment Name: Zm_Hybrid_Seed_Dev_P Parameter: Plant Line Value: 35A19
  misc_feature: MA Experiment 20000492 PARAMETER Experiment Name: Zm_Hybrid_Seed_Dev_P Parameter: Tissue Value: Fert Kernel vs. Unfert Floret
acgaccttctagttctagatgattctcaaacccacttccgggctgccgccgaggttatctacaacaccgagcagcgagaaggggttggtgtccagcacgaattgaatcgtcgccagaagtcatggcggattcggccacttcccgtccaaccgttctcgtcaccggcgccggcggccgcacaggccaaattgtctacaacaaactgaaagagaggtctgagcagttcgtggcaagagggctagtcaggacagaggagagcaagcagaagattggggcagccggtgatgtttacgttgctgacataagagacgcggatcgtctagcacctgctgtacaaggtgtggatgcgctcataatcctcaccagtgctgccccgaaaatgaaaccgggtttcgaccctagcaaaggtggacggcccgagttctactacgaagacggaatgtaccctgaacaggtggattggcttggccaaaagaatcagatcgatgctgctaaagctgctggagtgaagcatattgtgctggtgggatctatgggaggaacaaatcctaaccatccgctgaacagcatgggtaatggcaatatactggtatggaagcgcaaagcagaacagtatttggcagacagtggaatcccttatacaatcataaggccaggaggtctacaagacaaggacggaggagtgagagagctacttgtggggaaagacgatgaacttctccagactgacacaaagtcgattcctagagccgatgtggctgaggtttgtgtccaggctctgcagtacgaagaggccaagttcaaggcatttgatttggcctcaaagcctgaaggtgtgggcacgccaacaaaggactttagggcactgttctcccagatcactgctcggttttgagcgagctgctgggaagcctactcgagttctagattttatggtgtcacaatccattttatcgtgggcttgtcctggagatacaaccaggtagcttgttggagctgcggtttggtgcaattgcaaccaggtagcttgtatcaatccattttatggtgcattgtttgcttgtacactgctgaatgtcgtctggttgccaattgtgtgaactgttgacagccattaaaacaagttatttggaaccctgtttgc

SEQ ID NO: 12884 - protein, 257 aa, Zea mays subsp. mays
  peptide (1)..(257): Ceres Seq. ID no. 12340676
  misc_feature (1)..(257): Homolog of NCBI NO: 34897418 NR Description: unknown protein [Oryza sativa (japonica
  misc_feature (4)..(257): Homolog of NCBI NO: 18404496 NR Description: expressed protein; protein id: At2g37660.1, by cDNA: 13797., supported by cDNA: gi_14596078, supported by gi_20148254 [Arabidopsis thaliana]
  misc_feature (1)..(257): Homolog of NCBI NO: 14719331 NR Description: putative 3-beta hydroxysteroid
  misc_feature (9)..(257): Homolog of NCBI NO: 18413869 NR Description: putative protein; protein id: At5g02240.1, by cDNA: gi_15294289 [Arabidopsis thaliana] AT5g02240/T7H20_290 [Arabidopsis thaliana]
  misc_feature (4)..(257): Homolog of NCBI NO: 7485430 NR Description: hypothetical protein At2g37660 [imported] -
  misc_feature (9)..(252): Homolog of NCBI NO: 11358410 NR Description: hypothetical protein T7H20.290 - Arabidopsis >gi|7340698|emb|CAB82997.1| putative protein [Arabidopsis
  misc_feature (96)..(253): Homolog of NCBI NO: 16330694 NR Description: hypothetical protein [Synechocystis sp. PCC 6803]
  misc_feature (96)..(253): Homolog of NCBI NO: 23130188 NR Description: hypothetical protein [Nostoc punctiforme]
  misc_feature (1)..(250): Homolog of NCBI NO: 30689062 NR Description: expressed protein [Arabidopsis thaliana] unknown protein [Arabidopsis thaliana]
  misc_feature (96)..(252): Homolog of NCBI NO: 17230243 NR Description: hypothetical protein [Nostoc sp. PCC 7120]
  misc_feature (1)..(257): Homolog of NCBI NO: 34897418 NR Description: unknown protein [Oryza sativa (japonica
  misc_feature (4)..(257): Homolog of NCBI NO: 18404496 NR Description: expressed protein; protein id: At2g37660.1, by cDNA: 13797., supported by cDNA: gi_14596078, supported by gi_20148254 [Arabidopsis thaliana]
  misc_feature (1)..(257): Homolog of NCBI NO: 14719331 NR Description: putative 3-beta hydroxysteroid
  misc_feature (9)..(257): Homolog of NCBI NO: 18413869 NR Description: putative protein; protein id: At5g02240.1, by cDNA: gi_15294289 [Arabidopsis thaliana] AT5g02240/T7H20_290 [Arabidopsis thaliana]
  misc_feature (4)..(257): Homolog of NCBI NO: 7485430 NR Description: hypothetical protein At2g37660 [imported] -
  misc_feature (9)..(252): Homolog of NCBI NO: 11358410 NR Description: hypothetical protein T7H20.290 - Arabidopsis >gi|7340698|emb|CAB82997.1| putative protein [Arabidopsis
  misc_feature (96)..(253): Homolog of NCBI NO: 16330694 NR Description: hypothetical protein [Synechocystis sp. PCC 6803]
  misc_feature (96)..(253): Homolog of NCBI NO: 23130188 NR Description: hypothetical protein [Nostoc punctiforme]
  misc_feature (1)..(250): Homolog of NCBI NO: 30689062 NR Description: expressed protein [Arabidopsis thaliana] unknown protein [Arabidopsis thaliana]
  misc_feature (96)..(252): Homolog of NCBI NO: 17230243 NR Description: hypothetical protein [Nostoc sp. PCC 7120]
MADSATSRPTVLVTGAGGRTGQIVYNKLKERSEQFVARGLVRTEESKQKIGAAGDVYVADIRDADRLAPAVQGVDALIILTSAAPKMKPGFDPSKGGRPEFYYEDGMYPEQVDWLGQKNQIDAAKAAGVKHIVLVGSMGGTNPNHPLNSMGNGNILVWKRKAEQYLADSGIPYTIIRPGGLQDKDGGVRELLVGKDDELLQTDTKSIPRADVAEVCVQALQYEEAKFKAFDLASKPEGVGTPTKDFRALFSQITARF

SEQ ID NO: 12885 - protein, 171 aa, Zea mays subsp. mays
  peptide (1)..(171): Ceres Seq. ID no. 12340677
  misc_feature (1)..(171): Homolog of NCBI NO: 34897418 NR Description: unknown protein [Oryza sativa (japonica
  misc_feature (1)..(171): Homolog of NCBI NO: 18404496 NR Description: expressed protein; protein id: At2g37660.1, by cDNA: 13797., supported by cDNA: gi_14596078, supported by gi_20148254 [Arabidopsis thaliana]
  misc_feature (1)..(171): Homolog of NCBI NO: 14719331 NR Description: putative 3-beta hydroxysteroid
  misc_feature (1)..(171): Homolog of NCBI NO: 18413869 NR Description: putative protein; protein id: At5g02240.1, by cDNA: gi_15294289 [Arabidopsis thaliana] AT5g02240/T7H20_290 [Arabidopsis thaliana]
  misc_feature (1)..(171): Homolog of NCBI NO: 7485430 NR Description: hypothetical protein At2g37660 [imported] -
  misc_feature (1)..(166): Homolog of NCBI NO: 11358410 NR Description: hypothetical protein T7H20.290 - Arabidopsis >gi|7340698|emb|CAB82997.1| putative protein [Arabidopsis
  misc_feature (10)..(167): Homolog of NCBI NO: 16330694 NR Description: hypothetical protein [Synechocystis sp. PCC 6803]
  misc_feature (10)..(167): Homolog of NCBI NO: 23130188 NR Description: hypothetical protein [Nostoc punctiforme]
  misc_feature (1)..(164): Homolog of NCBI NO: 30689062 NR Description: expressed protein [Arabidopsis thaliana] unknown protein [Arabidopsis thaliana]
  misc_feature (10)..(166): Homolog of NCBI NO: 17230243 NR Description: hypothetical protein [Nostoc sp. PCC 7120]
  misc_feature (1)..(171): Homolog of NCBI NO: 34897418 NR Description: unknown protein [Oryza sativa (japonica
  misc_feature (1)..(171): Homolog of NCBI NO: 18404496 NR Description: expressed protein; protein id: At2g37660.1, by cDNA: 13797., supported by cDNA: gi_14596078, supported by gi_20148254 [Arabidopsis thaliana]
  misc_feature (1)..(171): Homolog of NCBI NO: 14719331 NR Description: putative 3-beta hydroxysteroid
  misc_feature (1)..(171): Homolog of NCBI NO: 18413869 NR Description: putative protein; protein id: At5g02240.1, by cDNA: gi_15294289 [Arabidopsis thaliana] AT5g02240/T7H20_290 [Arabidopsis thaliana]
  misc_feature (1)..(171): Homolog of NCBI NO: 7485430 NR Description: hypothetical protein At2g37660 [imported] -
  misc_feature (1)..(166): Homolog of NCBI NO: 11358410 NR Description: hypothetical protein T7H20.290 - Arabidopsis >gi|7340698|emb|CAB82997.1| putative protein [Arabidopsis
  misc_feature (10)..(167): Homolog of NCBI NO: 16330694 NR Description: hypothetical protein [Synechocystis sp. PCC 6803]
  misc_feature (10)..(167): Homolog of NCBI NO: 23130188 NR Description: hypothetical protein [Nostoc punctiforme]
  misc_feature (1)..(164): Homolog of NCBI NO: 30689062 NR Description: expressed protein [Arabidopsis thaliana] unknown protein [Arabidopsis thaliana]
  misc_feature (10)..(166): Homolog of NCBI NO: 17230243 NR Description: hypothetical protein [Nostoc sp. PCC 7120]
MKPGFDPSKGGRPEFYYEDGMYPEQVDWLGQKNQIDAAKAAGVKHIVLVGSMGGTNPNHPLNSMGNGNILVWKRKAEQYLADSGIPYTIIRPGGLQDKDGGVRELLVGKDDELLQTDTKSIPRADVAEVCVQALQYEEAKFKAFDLASKPEGVGTPTKDFRALFSQITARF

SEQ ID NO: 12886 - protein, 151 aa, Zea mays subsp. mays
  peptide (1)..(151): Ceres Seq. ID no. 12340678
  misc_feature (1)..(151): Homolog of NCBI NO: 34897418 NR Description: unknown protein [Oryza sativa (japonica
  misc_feature (1)..(151): Homolog of NCBI NO: 18404496 NR Description: expressed protein; protein id: At2g37660.1, by cDNA: 13797., supported by cDNA: gi_14596078, supported by gi_20148254 [Arabidopsis thaliana]
  misc_feature (1)..(151): Homolog of NCBI NO: 14719331 NR Description: putative 3-beta hydroxysteroid
  misc_feature (1)..(151): Homolog of NCBI NO: 18413869 NR Description: putative protein; protein id: At5g02240.1, by cDNA: gi_15294289 [Arabidopsis thaliana] AT5g02240/T7H20_290 [Arabidopsis thaliana]
  misc_feature (1)..(151): Homolog of NCBI NO: 7485430 NR Description: hypothetical protein At2g37660 [imported] -
  misc_feature (1)..(146): Homolog of NCBI NO: 11358410 NR Description: hypothetical protein T7H20.290 - Arabidopsis >gi|7340698|emb|CAB82997.1| putative protein [Arabidopsis
  misc_feature (1)..(147): Homolog of NCBI NO: 16330694 NR Description: hypothetical protein [Synechocystis sp. PCC 6803]
  misc_feature (1)..(147): Homolog of NCBI NO: 23130188 NR Description: hypothetical protein [Nostoc punctiforme]
  misc_feature (1)..(144): Homolog of NCBI NO: 30689062 NR Description: expressed protein [Arabidopsis thaliana] unknown protein [Arabidopsis thaliana]
  misc_feature (1)..(146): Homolog of NCBI NO: 17230243 NR Description: hypothetical protein [Nostoc sp. PCC 7120]
  misc_feature (1)..(151): Homolog of NCBI NO: 34897418 NR Description: unknown protein [Oryza sativa (japonica
  misc_feature (1)..(151): Homolog of NCBI NO: 18404496 NR Description: expressed protein; protein id: At2g37660.1, by cDNA: 13797., supported by cDNA: gi_14596078, supported by gi_20148254 [Arabidopsis thaliana]
  misc_feature (1)..(151): Homolog of NCBI NO: 14719331 NR Description: putative 3-beta hydroxysteroid
  misc_feature (1)..(151): Homolog of NCBI NO: 18413869 NR Description: putative protein; protein id: At5g02240.1, by cDNA: gi_15294289 [Arabidopsis thaliana] AT5g02240/T7H20_290 [Arabidopsis thaliana]
  misc_feature (1)..(151): Homolog of NCBI NO: 7485430 NR Description: hypothetical protein At2g37660 [imported] -
  misc_feature (1)..(146): Homolog of NCBI NO: 11358410 NR Description: hypothetical protein T7H20.290 - Arabidopsis >gi|7340698|emb|CAB82997.1| putative protein [Arabidopsis
  misc_feature (1)..(147): Homolog of NCBI NO: 16330694 NR Description: hypothetical protein [Synechocystis sp. PCC 6803]
  misc_feature (1)..(147): Homolog of NCBI NO: 23130188 NR Description: hypothetical protein [Nostoc punctiforme]
  misc_feature (1)..(144): Homolog of NCBI NO: 30689062 NR Description: expressed protein [Arabidopsis thaliana] unknown protein [Arabidopsis thaliana]
  misc_feature (1)..(146): Homolog of NCBI NO: 17230243 NR Description: hypothetical protein [Nostoc sp. PCC 7120]
MYPEQVDWLGQKNQIDAAKAAGVKHIVLVGSMGGTNPNHPLNSMGNGNILVWKRKAEQYLADSGIPYTIIRPGGLQDKDGGVRELLVGKDDELLQTDTKSIPRADVAEVCVQALQYEEAKFKAFDLASKPEGVGTPTKDFRALFSQITARF

SEQ ID NO: 12887 - DNA, 1683 bp, Zea mays subsp. mays
  misc_feature (1)..(1683): Ceres Seq. ID no. 12435135
  misc_feature: MA Experiment ID: 108523 Result: Down-regulated in Transcription
  misc_feature: MA Experiment 108523 PARAMETER Experiment Name: Zm_42deg_Heat_P Parameter: Age (day) Value: 8
  misc_feature: MA Experiment 108523 PARAMETER Experiment Name: Zm_42deg_Heat_P Parameter: Organism Value: Zea mays
  misc_feature: MA Experiment 108523 PARAMETER Experiment Name: Zm_42deg_Heat_P Parameter: Plant Line Value: 35A19
  misc_feature: MA Experiment 108523 PARAMETER Experiment Name: Zm_42deg_Heat_P Parameter: Temperature (deg C) Value: 42 vs. 22
  misc_feature: MA Experiment 108523 PARAMETER Experiment Name: Zm_42deg_Heat_P Parameter: Timepoint (hr) Value: 6
  misc_feature: MA Experiment 108523 PARAMETER Experiment Name: Zm_42deg_Heat_P Parameter: Tissue Value: Aerial
  misc_feature: MA Experiment ID: 108687 Result: Down-regulated in Transcription
  misc_feature: MA Experiment 108687 PARAMETER Experiment Name: Zm_Embryos-Flowers__P Parameter: Tissue Value: Embryo vs. Aerial+
aagttccagagccctccagagcaaaaaaaatatattatcgaatactaaagcattttcctcatcgatagaatatagaattttaaaaagggagcgaaataggtttttcctttttgcagctccgtcgtccaccaacctcctccgatccggccgccgcagcgtagccgaattgtcccctcgctagcttctccggccggctagaggctgtttcaggcggcctcgatctcctccgcgcggctgaggaaggagatcacgcggttgctcaggggctggggcgtgcatgatgggattttggttgattccgatggagactccgggcgaggcttctgtggaagcacgagcttcttccgccacaagatcgccgccatgctcgcctcctcctcctgcttcttatagatcccaccccctcgccgtcgtcgtcggcacggcagctagctcgctagcttctgtacataggtcgacgcgccatatagatactagtctcggattaagcgataattaaggcaaagaatctccaagtttgcttcgttcttgcattgaaccatggagtctggacggctcatcttcaacgcgccgggctctggcgccgggcagatgctcttcctcgactgcggcgcaggcggcggtcccggcggcggcttgttccatcgaggcgggagaccgatgcttggccttgaagaagggcgcggcgtaaaacggcccttcttcacctcgcccgacgagctcctcgaggaagagtactacgacgagcagctgccggagaagaagcgccgcctcaccccagagcaggtgcttctgctggagaggagcttcgaggaggagaacaagctggagccggagcgcaagacggagctggcgcgcaagctgggcctgcagcctcgccaggtggccgtctggttccagaaccgccgcgcccggtggaagaccaagcagctcgagcgcgacttcgaccgcctcaaggcctccttcgacgctctccgagcggaccagcgacgccctcctccaggacaacaaccgcctccgctcacaggttgtgtcgttgaccgagaagctgcaagagaaggaggatgcgacggagggcggcgccaccgctgacaccgccgcgccggcggtggacgtcgaggcttccctggccgacgacgtcgaggagccagcagagcctgcggcgacgttcgaggtgctgcaggaggtgaagtccgaggacaggctgagcaccggcagcggcgggagcgcggtggtggacgcggacgcgctgctgtacggcaggtttgccgcggcagttgatagcagcgtggagtcgtacttccccggcggcgaggaccactaccacgactgcgggacgatgggccccgtgaaccatggcgccggaggaggcatccagtcggacgacgacggcgccggcagcgacgaggggtgcagctactacgccgacgaagccgccgccgccgccgccgccgcgttcttcgccggacacgccacccaccaccacgcggacgaggacgaggacgccggccagatcagctggtggatgtggaactagacgttcgatcttcccacgccgatcgatcgaccgtcttcgaatcctgtgtcaacaagaagaaaaaagaatcgtgccgtgatttttctttgcgcaacgctgctgtaagcctgtaatggtgaatttctagctatggttatgccgttatg

SEQ ID NO: 12888 - protein, 183 aa, Zea mays subsp. mays
  peptide (1)..(183): Ceres Seq. ID no. 12435136
  misc_feature (74)..(128): Pfam Name: Homeobox domain Pfam Description: Homeobox domain
  misc_feature (1)..(148): Homolog of NCBI NO: 37573050 NR Description: homeodomain leucine zipper protein [Oryza sativa
  misc_feature (1)..(148): Homolog of NCBI NO: 5006855 NR Description: homeodomain leucine zipper protein [Oryza sativa]
  misc_feature (1)..(145): Homolog of NCBI NO: 18034441 NR Description: homeodomain leucine zipper protein CPHB-5
  misc_feature (1)..(145): Homolog of NCBI NO: 15232122 NR Description: homeobox-leucine zipper protein HAT5 (HD-ZIP
  misc_feature (69)..(145): Homolog of NCBI NO: 15148920 NR Description: homeodomain leucine zipper protein HDZ3
  misc_feature (70)..(145): Homolog of NCBI NO: 166754 NR Description: homeobox protein
  misc_feature (36)..(148): Homolog of NCBI NO: 15148918 NR Description: homeodomain leucine zipper protein HDZ2
  misc_feature (49)..(148): Homolog of NCBI NO: 21623495 NR Description: homeobox protein PpHB7 [Physcomitrella patens]
  misc_feature (49)..(148): Homolog of NCBI NO: 27531102 NR Description: homeobox protein Pphb7 long form [Physcomitrella
  misc_feature (54)..(148): Homolog of NCBI NO: 7446244 NR Description: homeotic protein - carrot
MESGRLIFNAPGSGAGQMLFLDCGAGGGPGGGLFHRGGRPMLGLEEGRGVKRPFFTSPDELLEEEYYDEQLPEKKRRLTPEQVLLLERSFEEENKLEPERKTELARKLGLQPRQVAVWFQNRRARWKTKQLERDFDRLKASFDALRADQRRPPPGQQPPPLTGCVVDREAAREGGCDGGRRHR

SEQ ID NO: 12889 - protein, 166 aa, Zea mays subsp. mays
  peptide (1)..(166): Ceres Seq. ID no. 12435137
  misc_feature (57)..(111): Pfam Name: Homeobox domain Pfam Description: Homeobox domain
  misc_feature (1)..(131): Homolog of NCBI NO: 37573050 NR Description: homeodomain leucine zipper protein [Oryza sativa
  misc_feature (1)..(131): Homolog of NCBI NO: 5006855 NR Description: homeodomain leucine zipper protein [Oryza sativa]
  misc_feature (1)..(128): Homolog of NCBI NO: 18034441 NR Description: homeodomain leucine zipper protein CPHB-5
  misc_feature (1)..(128): Homolog of NCBI NO: 15232122 NR Description: homeobox-leucine zipper protein HAT5 (HD-ZIP
  misc_feature (52)..(128): Homolog of NCBI NO: 15148920 NR Description: homeodomain leucine zipper protein HDZ3
  misc_feature (53)..(128): Homolog of NCBI NO: 166754 NR Description: homeobox protein
  misc_feature (19)..(131): Homolog of NCBI NO: 15148918 NR Description: homeodomain leucine zipper protein HDZ2
  misc_feature (32)..(131): Homolog of NCBI NO: 21623495 NR Description: homeobox protein PpHB7 [Physcomitrella patens]
  misc_feature (32)..(131): Homolog of NCBI NO: 27531102 NR Description: homeobox protein Pphb7 long form [Physcomitrella
  misc_feature (37)..(131): Homolog of NCBI NO: 7446244 NR Description: homeotic protein - carrot
MLFLDCGAGGGPGGGLFHRGGRPMLGLEEGRGVKRPFFTSPDELLEEEYYDEQLPEKKRRLTPEQVLLLERSFEEENKLEPERKTELARKLGLQPRQVAVWFQNRRARWKTKQLERDFDRLKASFDALRADQRRPPPGQQPPPLTGCVVDREAAREGGCDGGRRHR

SEQ ID NO: 12890 - protein, 143 aa, Zea mays subsp. mays
  peptide (1)..(143): Ceres Seq. ID no. 12435138
  misc_feature (34)..(88): Pfam Name: Homeobox domain Pfam Description: Homeobox domain
  misc_feature (1)..(108): Homolog of NCBI NO: 37573050 NR Description: homeodomain leucine zipper protein [Oryza sativa
  misc_feature (1)..(108): Homolog of NCBI NO: 5006855 NR Description: homeodomain leucine zipper protein [Oryza sativa]
  misc_feature (1)..(105): Homolog of NCBI NO: 18034441 NR Description: homeodomain leucine zipper protein CPHB-5
  misc_feature (1)..(105): Homolog of NCBI NO: 15232122 NR Description: homeobox-leucine zipper protein HAT5 (HD-ZIP
  misc_feature (29)..(105): Homolog of NCBI NO: 15148920 NR Description: homeodomain leucine zipper protein HDZ3
  misc_feature (30)..(105): Homolog of NCBI NO: 166754 NR Description: homeobox protein
  misc_feature (1)..(108): Homolog of NCBI NO: 15148918 NR Description: homeodomain leucine zipper protein HDZ2
  misc_feature (9)..(108): Homolog of NCBI NO: 21623495 NR Description: homeobox protein PpHB7 [Physcomitrella patens]
  misc_feature (9)..(108): Homolog of NCBI NO: 27531102 NR Description: homeobox protein Pphb7 long form [Physcomitrella
  misc_feature (14)..(108): Homolog of NCBI NO: 7446244 NR Description: homeotic protein - carrot
MLGLEEGRGVKRPFFTSPDELLEEEYYDEQLPEKKRRLTPEQVLLLERSFEEENKLEPERKTELARKLGLQPRQVAVWFQNRRARWKTKQLERDFDRLKASFDALRADQRRPPPGQQPPPLTGCVVDREAAREGGCDGGRRHR

SEQ ID NO: 12891 - DNA, 1961 bp, Zea mays subsp. mays
  misc_feature (1)..(1961): Ceres Seq. ID no. 12367287
  misc_feature: MA Experiment ID: 108535 Result: Up-regulated in Transcription
  misc_feature: MA Experiment 108535 PARAMETER Experiment Name: Zm_Meristem_P Parameter: Age (day) Value: 8
  misc_feature: MA Experiment 108535 PARAMETER Experiment Name: Zm_Meristem_P Parameter: Organism Value: Zea mays
  misc_feature: MA Experiment 108535 PARAMETER Experiment Name: Zm_Meristem_P Parameter: Plant Line Value: 35A19
  misc_feature: MA Experiment 108535 PARAMETER Experiment Name: Zm_Meristem_P Parameter: Tissue Value: Root Meristem vs. Above Root Meristem
  misc_feature: MA Experiment ID: 108544 Result: Down-regulated in Transcription
gcatccgcatctctctctctcgcgcgcgccgcccttcccagcgccgtcggctgccgctcctcccctccaccgccgcctctgctccgcccgtcctcgcgccgtcgcgaccgctgcggcttcgtctctccccattgtctgtcccctctcaacgcactctacgacggaccgatgacttgacggatctgggggtttgtctagggtgggtgaacggaaggggatggagttcacggagtcgttcaagcagacgggcccgtgctccttctcccccgactcgcgcttccttgctattgccgtagactaccgtctcgtcgtccgcgacgtactctcactgaaggtggtacaattattttcatgcgtggacaagataagctctgtagaatgggcaccagattcagaatacattttatgtggactttacaagcgacccatggtgcaagcttggtcactgagtcaacctgattggacctgcaagattgatgaaggtccagcagggattgcatatgctcgctggagtcctgacagtcgtcatatattaactacatctgagtttcagctccgtctcactgtgtggtctctcgtaaatacagcatgcgtacatgtccagtggccaaaacatggttctaaaggtgtttctttcaccaaagacgggaaatttgctgcaatctgtaccagacgtgattgcaaggattacattaatttactatcatgtcactcttgggaaataatgactgtctttgctattgacacggtagacttagctggtgttgaatggtcaccatatgatagtgctattgttgtttgggattcacttcttgaatataaggttctgatatattcgccagacggaaggtgcttgttcaagtatctagcttatgaaagtgggttgggtgtgaaaactgttgcttggtcaccatgtggacagtttttagcagtgggcagctatgatcaagcagtacggactttgaatcacttgacgtggaaaacttttgcggagttctcacatgcagggtatattcgtagtccttgcaatgctgctatatataaggaagtggatgacccatggcaacttgatatgtcagaattatgtctaagtgaaggcctctctcgaaacatgccagacaatggtgcagaaaatggcaccgagggaggaggctctagagttaaatatgctgtgatggatgttcccatcaccttaccttcgttgaaaccagcttttgacaagcctaaccccaaacaaggcattggtatgctgtcatggagcagcgacagccactatttcttcaccaggaatgacaacatgccaactgttctctggatatgggatatatgccgccttgagcttgccgctgtgctcgtgcagaaagatccaattcgtgctgcagcatgggaccctacctgcacacgccttgttttatgcacagagagccctcacttgtacatgtggacgccatccggtgcctgctgtgtcaacatcccctttctgaacttccgaatcgttgatttgaagtggagctcgaatgggagctgtctcctcctgaaggagcgcgaatctttctgctgtgccacaatcatatctgccctgcctgaggaagaacctgatcattctgatgatacttctgaagatgaatgagtggcctcatggtatgtctagcagcttatgcgaatggaactgggaactaacagtacaaatgatcttgtgatggtgaatgagtgacactgactgactacttagctacttgtagaatccagagtggattgcgataccatgaatcgataaggtcatttcgctgcttagatggcaaatgctctatcaccaggcactacagaatggacagagaactgtgtggttctatttgttgtattcttgctcttgtttgtctgttgtagtttctccaaggttgtactgcttgaccttacttgttggatcttaatcttacatatccagtcaccagggtattttc

SEQ ID NO: 12892 - protein, 470 aa, Zea mays subsp. mays
  peptide (1)..(470): Ceres Seq. ID no. 12367288
  misc_feature (374)..(410): Pfam Name: WD domain, G-beta repeat Pfam Description: WD domain, G-beta repeat
  misc_feature (1)..(470): Homolog of NCBI NO: 37536890 NR Description: putative WD-40 protein [Oryza sativa (japonica group)] >gi|12597885|gb|AAG60193.1| putative WD40 protein [Oryza
  misc_feature (1)..(293): Homolog of NCBI NO: 15240819 NR Description: WD-repeat protein-like; protein id: At5g07590.1
  misc_feature (1)..(447): Homolog of NCBI NO: 16445434 NR Description: WD repeat domain 8 protein; WD repeat-containing
  misc_feature (1)..(447): Homolog of NCBI NO: 17380347 NR Description: WD-repeat protein 8 >gi|7209723|dbj|BAA92312.1|
  misc_feature (1)..(447): Homolog of NCBI NO: 7020525 NR Description: unnamed protein product [Homo sapiens]
  misc_feature (1)..(447): Homolog of NCBI NO: 10946908 NR Description: WD repeat domain 8; DD57 [Mus musculus]
  misc_feature (1)..(447): Homolog of NCBI NO: 26342120 NR Description: unnamed protein product [Mus musculus]
  misc_feature (1)..(450): Homolog of NCBI NO: 29791584 NR Description: Similar to WD repeat domain 8 [Danio rerio]
  misc_feature (1)..(420): Homolog of NCBI NO: 12803559 NR Description: Similar to hypothetical protein FLJ20430 [Homo
  misc_feature (1)..(366): Homolog of NCBI NO: 38174120 NR Description: Unknown (protein for MGC:75994) [Silurana
MEFTESFKQTGPCSFSPDSRFLAIAVDYRLVVRDVLSLKVVQLFSCVDKISSVEWAPDSEYILCGLYKRPMVQAWSLSQPDWTCKIDEGPAGIAYARWSPDSRHILTTSEFQLRLTVWSLVNTACVHVQWPKHGSKGVSFTKDGKFAAICTRRDCKDYINLLSCHSWEIMTVFAIDTVDLAGVEWSPYDSAIVVWDSLLEYKVLIYSPDGRCLFKYLAYESGLGVKTVAWSPCGQFLAVGSYDQAVRTLNHLTWKTFAEFSHAGYIRSPCNAAIYKEVDDPWQLDMSELCLSEGLSRNMPDNGAENGTEGGGSRVKYAVMDVPITLPSLKPAFDKPNPKQGIGMLSWSSDSHYFFTRNDNMPTVLWIWDICRLELAAVLVQKDPIRAAAWDPTCTRLVLCTESPHLYMWTPSGACCVNIPFLNFRIVDLKWSSNGSCLLLKERESFCCATIISALPEEEPDHSDDTSEDE

SEQ ID NO: 12893 - protein, 400 aa, Zea mays subsp. mays
  peptide (1)..(400): Ceres Seq. ID no. 12367289
  misc_feature (304)..(340): Pfam Name: WD domain, G-beta repeat Pfam Description: WD domain, G-beta repeat
  misc_feature (1)..(377): Homolog of NCBI NO: 16445434 NR Description: WD repeat domain 8 protein; WD repeat-containing
  misc_feature (1)..(377): Homolog of NCBI NO: 17380347 NR Description: WD-repeat protein 8 >gi|7209723|dbj|BAA92312.1|
  misc_feature (1)..(377): Homolog of NCBI NO: 7020525 NR Description: unnamed protein product [Homo sapiens]
  misc_feature (1)..(377): Homolog of NCBI NO: 10946908 NR Description: WD repeat domain 8; DD57 [Mus musculus]
  misc_feature (1)..(400): Homolog of NCBI NO: 37536890 NR Description: putative WD-40 protein [Oryza sativa (japonica group)] >gi|12597885|gb|AAG60193.1| putative WD40 protein [Oryza
  misc_feature (1)..(223): Homolog of NCBI NO: 15240819 NR Description: WD-repeat protein-like; protein id: At5g07590.1
  misc_feature (1)..(377): Homolog of NCBI NO: 26342120 NR Description: unnamed protein product [Mus musculus]
  misc_feature (1)..(380): Homolog of NCBI NO: 29791584 NR Description: Similar to WD repeat domain 8 [Danio rerio]
  misc_feature (1)..(350): Homolog of NCBI NO: 12803559 NR Description: Similar to hypothetical protein FLJ20430 [Homo
  misc_feature (1)..(296): Homolog of NCBI NO: 38174120 NR Description: Unknown (protein for MGC:75994) [Silurana
MVQAWSLSQPDWTCKIDEGPAGIAYARWSPDSRHILTTSEFQLRLTVWSLVNTACVHVQWPKHGSKGVSFTKDGKFAAICTRRDCKDYINLLSCHSWEIMTVFAIDTVDLAGVEWSPYDSAIVVWDSLLEYKVLIYSPDGRCLFKYLAYESGLGVKTVAWSPCGQFLAVGSYDQAVRTLNHLTWKTFAEFSHAGYIRSPCNAAIYKEVDDPWQLDMSELCLSEGLSRNMPDNGAENGTEGGGSRVKYAVMDVPITLPSLKPAFDKPNPKQGIGMLSWSSDSHYFFTRNDNMPTVLWIWDICRLELAAVLVQKDPIRAAAWDPTCTRLVLCTESPHLYMWTPSGACCVNIPFLNFRIVDLKWSSNGSCLLLKERESFCCATIISALPEEEPDHSDDTSEDE

SEQ ID NO: 12894 - protein, 301 aa, Zea mays subsp. mays
  peptide (1)..(301): Ceres Seq. ID no. 12367290
  misc_feature (205)..(241): Pfam Name: WD domain, G-beta repeat Pfam Description: WD domain, G-beta repeat
  misc_feature (1)..(301): Homolog of NCBI NO: 37536890 NR Description: putative WD-40 protein [Oryza sativa (japonica group)] >gi|12597885|gb|AAG60193.1| putative WD40 protein [Oryza
  misc_feature (1)..(124): Homolog of NCBI NO: 15240819 NR Description: WD-repeat protein-like; protein id: At5g07590.1
  misc_feature (1)..(278): Homolog of NCBI NO: 16445434 NR Description: WD repeat domain 8 protein; WD repeat-containing
  misc_feature (1)..(278): Homolog of NCBI NO: 17380347 NR Description: WD-repeat protein 8 >gi|7209723|dbj|BAA92312.1|
  misc_feature (1)..(278): Homolog of NCBI NO: 7020525 NR Description: unnamed protein product [Homo sapiens]
  misc_feature (1)..(278): Homolog of NCBI NO: 10946908 NR Description: WD repeat domain 8; DD57 [Mus musculus]
  misc_feature (1)..(278): Homolog of NCBI NO: 26342120 NR Description: unnamed protein product [Mus musculus]
  misc_feature (1)..(281): Homolog of NCBI NO: 29791584 NR Description: Similar to WD repeat domain 8 [Danio rerio]
  misc_feature (1)..(251): Homolog of NCBI NO: 12803559 NR Description: Similar to hypothetical protein FLJ20430 [Homo
  misc_feature (1)..(197): Homolog of NCBI NO: 38174120 NR Description: Unknown (protein for MGC:75994) [Silurana
MTVFAIDTVDLAGVEWSPYDSAIVVWDSLLEYKVLIYSPDGRCLFKYLAYESGLGVKTVAWSPCGQFLAVGSYDQAVRTLNHLTWKTFAEFSHAGYIRSPCNAAIYKEVDDPWQLDMSELCLSEGLSRNMPDNGAENGTEGGGSRVKYAVMDVPITLPSLKPAFDKPNPKQGIGMLSWSSDSHYFFTRNDNMPTVLWIWDICRLELAAVLVQKDPIRAAAWDPTCTRLVLCTESPHLYMWTPSGACCVNIPFLNFRIVDLKWSSNGSCLLLKERESFCCATIISALPEEEPDHSDDTSEDE

SEQ ID NO: 12895 - DNA, 2560 bp, Zea mays subsp. mays
  misc_feature (1)..(2560): Ceres Seq. ID no. 12414504
  misc_feature: MA Experiment ID: 108527 Result: Down-regulated in Transcription
  misc_feature: MA Experiment 108527 PARAMETER Experiment Name: Zm_5mM_NO_P Parameter: Age (day) Value: 8
  misc_feature: MA Experiment 108527 PARAMETER Experiment Name: Zm_5mM_NO_P Parameter: Organism Value: Zea mays
  misc_feature: MA Experiment 108527 PARAMETER Experiment Name: Zm_5mM_NO_P Parameter: Plant Line Value: 35A19
  misc_feature: MA Experiment 108527 PARAMETER Experiment Name: Zm_5mM_NO_P Parameter: Timepoint (hr) Value: 6
  misc_feature: MA Experiment 108527 PARAMETER Experiment Name: Zm_5mM_NO_P Parameter: Tissue Value: Aerial
  misc_feature: MA Experiment 108527 PARAMETER Experiment Name: Zm_5mM_NO_P Parameter: Treatment Value: 5mM NO vs. No Treatment
  misc_feature: MA Experiment ID: 108544 Result: Down-regulated in Transcription
  misc_feature: MA Experiment ID: 108689 Result: Down-regulated in Transcription
  misc_feature: MA Experiment 108689 PARAMETER Experiment Name: Zm_Drought_Roots_P Parameter: Age (day) Value: 9
  misc_feature: MA Experiment 108689 PARAMETER Experiment Name: Zm_Drought_Roots_P Parameter: Organism Value: Zea mays
  misc_feature: MA Experiment 108689 PARAMETER Experiment Name: Zm_Drought_Roots_P Parameter: Plant Line Value: 35A19
  misc_feature: MA Experiment 108689 PARAMETER Experiment Name: Zm_Drought_Roots_P Parameter: Timepoint (hr) Value: 24
  misc_feature: MA Experiment 108689 PARAMETER Experiment Name: Zm_Drought_Roots_P Parameter: Tissue Value: Roots
  misc_feature: MA Experiment 108689 PARAMETER Experiment Name: Zm_Drought_Roots_P Parameter: Treatment Value: Drought vs. No Drought
  misc_feature: MA Experiment ID: 20000477 Result: Down-regulated in Transcription
  misc_feature: MA Experiment 20000477 PARAMETER Experiment Name: Zm_5mM_SA_P Parameter: Age (day) Value: 10
  misc_feature: MA Experiment 20000477 PARAMETER Experiment Name: Zm_5mM_SA_P Parameter: Organism Value: Zea mays
  misc_feature: MA Experiment 20000477 PARAMETER Experiment Name: Zm_5mM_SA_P Parameter: Plant Line Value: 35A19
  misc_feature: MA Experiment 20000477 PARAMETER Experiment Name: Zm_5mM_SA_P Parameter: Timepoint (hr) Value: 48
  misc_feature: MA Experiment 20000477 PARAMETER Experiment Name: Zm_5mM_SA_P Parameter: Tissue Value: Aerial
  misc_feature: MA Experiment 20000477 PARAMETER Experiment Name: Zm_5mM_SA_P Parameter: Treatment Value: 5mM SA vs. No Treatment
  misc_feature: MA Experiment ID: 20000478 Result: Down-regulated in Transcription
  misc_feature: MA Experiment 20000478 PARAMETER Experiment Name: Zm_5mM_SA_P Parameter: Age (day) Value: 11
  misc_feature: MA Experiment 20000478 PARAMETER Experiment Name: Zm_5mM_SA_P Parameter: Organism Value: Zea mays
  misc_feature: MA Experiment 20000478 PARAMETER Experiment Name: Zm_5mM_SA_P Parameter: Plant Line Value: 35A19
  misc_feature: MA Experiment 20000478 PARAMETER Experiment Name: Zm_5mM_SA_P Parameter: Timepoint (hr) Value: 72
  misc_feature: MA Experiment 20000478 PARAMETER Experiment Name: Zm_5mM_SA_P Parameter: Tissue Value: Aerial
  misc_feature: MA Experiment 20000478 PARAMETER Experiment Name: Zm_5mM_SA_P Parameter: Treatment Value: 5mM SA vs. No Treatment
  misc_feature: MA Experiment ID: 20000480 Result: Down-regulated in Transcription
  misc_feature: MA Experiment 20000480 PARAMETER Experiment Name: Zm_Drought_P Parameter: Age (day) Value: 11
  misc_feature: MA Experiment 20000480 PARAMETER Experiment Name: Zm_Drought_P Parameter: Organism Value: Zea mays
  misc_feature: MA Experiment 20000480 PARAMETER Experiment Name: Zm_Drought_P Parameter: Plant Line Value: 35A19
  misc_feature: MA Experiment 20000480 PARAMETER Experiment Name: Zm_Drought_P Parameter: Timepoint (hr) Value: 72
  misc_feature: MA Experiment 20000480 PARAMETER Experiment Name: Zm_Drought_P Parameter: Tissue Value: Aerial
  misc_feature: MA Experiment 20000480 PARAMETER Experiment Name: Zm_Drought_P Parameter: Treatment Value: Drought vs. No Drought
  misc_feature: MA Experiment ID: 20000535 Result: Up-regulated in Transcription
  misc_feature: MA Experiment 20000535 PARAMETER Experiment Name: Zm_Hybrid_Seed_Dev_P Parameter: DAP Value: 30 vs. 12
  misc_feature: MA Experiment 20000535 PARAMETER Experiment Name: Zm_Hybrid_Seed_Dev_P Parameter: Organism Value: Zea mays
  misc_feature: MA Experiment 20000535 PARAMETER Experiment Name: Zm_Hybrid_Seed_Dev_P Parameter: Plant Line Value: 35A19
  misc_feature: MA Experiment 20000535 PARAMETER Experiment Name: Zm_Hybrid_Seed_Dev_P Parameter: Tissue Value: Embryo vs. Unfert Floret
  misc_feature (2078)..(2078): n is a, c, t, g, unknown, or other
  misc_feature (2091)..(2091): n is a, c, t, g, unknown, or other
  misc_feature (2164)..(2164): n is a, c, t, g, unknown, or other
  misc_feature (2256)..(2256): n is a, c, t, g, unknown, or other
  misc_feature (2261)..(2261): n is a, c, t, g, unknown, or other
  misc_feature (2327)..(2327): n is a, c, t, g, unknown, or other
  misc_feature (2344)..(2344): n is a, c, t, g, unknown, or other
  misc_feature (2352)..(2352): n is a, c, t, g, unknown, or other
  misc_feature (2353)..(2353): n is a, c, t, g, unknown, or other
  misc_feature (2354)..(2354): n is a, c, t, g, unknown, or other
  misc_feature (2357)..(2357): n is a, c, t, g, unknown, or other
  misc_feature (2358)..(2358): n is a, c, t, g, unknown, or other
  misc_feature (2359)..(2359): n is a, c, t, g, unknown, or other
  misc_feature (2361)..(2361): n is a, c, t, g, unknown, or other
  misc_feature (2362)..(2362): n is a, c, t, g, unknown, or other
gttcggcattactccacttcactccctccctccctcacctctggctcatcagtgcctgcctcactaacctcaccattactgaaatgcagagctcgcataaataggcaggacccgtggtgctactctcctgtccccttccggccttttccccccttctggagcttggggggaggcactctgcaccttcgtcttcgtcttggcgtcctccagcgctctgccttcctgagctggcttcttgtccgcagatccatggcgaaggactacccagcttctccgaaagctcagcagctccaggaatccaagaagcagcgcctgacatacatcctcgtcgtaagcgcgctctgcatcgccttctacgtccttggcgcatggcagaacaccacgcttccaaagcccataggcaactcggcgatcacccgggttggctgcgatcccactgccgccacggcacagtcctctggctctgtgccgtcgtttgggccaggctccggcgaggtgcttgacttcgacgcacaccaccggctcaccatcaacaacacggacggcgatggggaactgcagcagttcccggcgtgccctctcaacttcagtgagtacacgccgtgtgaggaccgtaggcgcgggcgccggttcgaccgaaacatgctagtgtatcgggagcgccactgtcctggcaaggacgagcaggtccgatgcctcatcccagcaccgcctgggtacaggacccccttcaagtggcctcgtagcagggactacgcctatttcaacaacatcccccacaaggagctcagcattgagaaggcggtgcagaactggatccaggttgagggcgacaagttcaagttccccggtggtggcactatgttcccgcgtggtgctgatgcctacatagatgacatcaataagctcatctcgttatcagatgggaagatcaggacggctgttgacacaggttgcggggttgctagttggggagcttacttgctgaagagaaacatcatcgccatgtcatttgcgccgagagacacgcaccaagctcaggtgcaattcgcgctggaaagaggtgtccctgccatcattggcgtcatggcgaagcagcggttgccttacccatctagggcgttcgatatggcacattgctcgcgctgtctgattccttgggatgaacacgatggactgtaccttgctgaagtcgataggattctgaggccaggaggatactggatcctctcgggacctccgatcaattggaagacacaccacagggggtgggagaggacgaaggacgacctcaagcgggagcaggacaagatcgaggatgttgcgaggagcctttgctggaacaaggtggttgagaagggggatctgtccatctggcagaagcccaagaatcaccttgagtgtgccaacattaagaagacatataagacaccccatatctgcaagagtgacaatcctgatgctgcctggtacacacagatggaagcctgtgttactccactgcctgaagtgagcaaccagggagaagtggctgggggagcggtggagaaatggccagagagggcgttcttggttccccccaggatcaaaaggggcatgattccaggactggacgccaagaagtttgacgaggacaagaagctttgggagaagagggtggcctactacaagcgcaccataccaattgcagagaacaggtacagaaatgtgatggacatgaacgccaacatgggtgggttcgctgcttctctagtgaagtaccccgtgtgggtgatgaatgtcgtccctgttaactccgaccgggacaccctcggggcaatatacgagcgagggttcatcggcacgtaccaggactggtgcgaagctttctcgacgtatccaagaacatatgacctcctgcatgctgacaatctgtttagcatctaccaagacaggtgcgatataactggcatcctcttggagatggacagaatattaaggcccgagggcacagctatcatccgcgacacagtcgacgtgctcacgaaggtccaggcaataaccaagcggatgcggtgggagagccgcatcatggaccncgaggacggcccnttcaacccggagaaggtcctcatggcggtcaagacgtactggaccgccgaagccgaggaggagcactagcacncgagtgacaccgagctcacttgaaagcgtgaaccaagcctgttctacacttctactaccggtcgagagggatggcgtcagcgttttgcgtcncagtntagtatgtatgtcccttttcaccttttctctagttctttgtagctagctacaatcagatgggaagntaagggagagttttganacgggggnnnggnnngnntggttggtcctctagttgagatacaggaagcggttttgtagcaggggaaggtttcgctggtcttgcgtaggttcctggccctgtttcacgaggggttgaactaggttttagtttgtaatgcgatggcaccgggcaggcattgttaatcgtatattggggtgaccataatagtaacaggtatttatttagttttcatct

SEQ ID NO: 12896 - protein, 719 aa, Zea mays subsp. mays
  peptide (1)..(719): Ceres Seq. ID no. 12414505
  misc_feature (198)..(708): Pfam Name: Putative methyltransferase Pfam Description: Putative methyltransferase
  misc_feature (94)..(712): Homolog of NCBI NO: 18398763 NR Description: unknown protein; protein id: At1g33170.1
  misc_feature (67)..(718): Homolog of NCBI NO: 24413975 NR Description: hypothetical protein~similar to Oryza sativa
  misc_feature (99)..(719): Homolog of NCBI NO: 15235080 NR Description: putative protein; protein id: At4g10440.1
  misc_feature (387)..(712): Homolog of NCBI NO: 9665165 NR Description: Unknown Protein [Arabidopsis thaliana]
  misc_feature (94)..(387): Homolog of NCBI NO: 9665165 NR Description: Unknown Protein [Arabidopsis thaliana]
  misc_feature (100)..(718): Homolog of NCBI NO: 15225560 NR Description: hypothetical protein; protein id: At2g45750.1
  misc_feature (87)..(718): Homolog of NCBI NO: 15236921 NR Description: hypothetical protein; protein id: At4g00750.1
  misc_feature (97)..(713): Homolog of NCBI NO: 34898042 NR Description: OSJNBa0038F22.19 [Oryza sativa (japonica >gi|5734619|dbj|BAA83350.1| Similar to Arabidopsis thaliana BAC
  misc_feature (99)..(719): Homolog of NCBI NO: 18396075 NR Description: expressed protein; protein id: At1g26850.1, by cDNA: gi_14335101 [Arabidopsis thaliana] At1g26850/T2P11_4 [Arabidopsis thaliana]
  misc_feature (94)..(716): Homolog of NCBI NO: 18071395 NR Description: hypothetical protein [Oryza sativa]
  misc_feature (693)..(693): Xaa is any aa, unknown or other
  misc_feature (697)..(697): Xaa is any aa, unknown or other
VRHYSTSLPPSLTSGSSVPASLTSPLLKCRARINRQDPWCYSPVPFRPFPPFWSLGGGTLHLRLRLGVLQRSAFLSWLLVRRSMAKDYPASPKAQQLQESKKQRLTYILVVSALCIAFYVLGAWQNTTLPKPIGNSAITRVGCDPTAATAQSSGSVPSFGPGSGEVLDFDAHHRLTINNTDGDGELQQFPACPLNFSEYTPCEDRRRGRRFDRNMLVYRERHCPGKDEQVRCLIPAPPGYRTPFKWPRSRDYAYFNNIPHKELSIEKAVQNWIQVEGDKFKFPGGGTMFPRGADAYIDDINKLISLSDGKIRTAVDTGCGVASWGAYLLKRNIIAMSFAPRDTHQAQVQFALERGVPAIIGVMAKQRLPYPSRAFDMAHCSRCLIPWDEHDGLYLAEVDRILRPGGYWILSGPPINWKTHHRGWERTKDDLKREQDKIEDVARSLCWNKVVEKGDLSIWQKPKNHLECANIKKTYKTPHICKSDNPDAAWYTQMEACVTPLPEVSNQGEVAGGAVEKWPERAFLVPPRIKRGMIPGLDAKKFDEDKKLWEKRVAYYKRTIPIAENRYRNVMDMNANMGGFAASLVKYPVWVMNVVPVNSDRDTLGAIYERGFIGTYQDWCEAFSTYPRTYDLLHADNLFSIYQDRCDITGILLEMDRILRPEGTAIIRDTVDVLTKVQAITKRMRWESRIMDXEDGXFNPEKVLMAVKTYWTAEAEEEH

SEQ ID NO: 12897 - protein, 636 aa, Zea mays subsp. mays
  peptide (1)..(636): Ceres Seq. ID no. 12414506
  misc_feature (115)..(625): Pfam Name: Putative methyltransferase Pfam Description: Putative methyltransferase
  misc_feature (11)..(629): Homolog of NCBI NO: 18398763 NR Description: unknown protein; protein id: At1g33170.1
  misc_feature (1)..(635): Homolog of NCBI NO: 24413975 NR Description: hypothetical protein~similar to Oryza sativa
  misc_feature (16)..(636): Homolog of NCBI NO: 15235080 NR Description: putative protein; protein id: At4g10440.1
  misc_feature (304)..(629): Homolog of NCBI NO: 9665165 NR Description: Unknown Protein [Arabidopsis thaliana]
  misc_feature (11)..(304): Homolog of NCBI NO: 9665165 NR Description: Unknown Protein [Arabidopsis thaliana]
  misc_feature (17)..(635): Homolog of NCBI NO: 15225560 NR Description: hypothetical protein; protein id: At2g45750.1
  misc_feature (4)..(635): Homolog of NCBI NO: 15236921 NR Description: hypothetical protein; protein id: At4g00750.1
  misc_feature (14)..(630): Homolog of NCBI NO: 34898042 NR Description: OSJNBa0038F22.19 [Oryza sativa (japonica >gi|5734619|dbj|BAA83350.1| Similar to Arabidopsis thaliana BAC
  misc_feature (16)..(636): Homolog of NCBI NO: 18396075 NR Description: expressed protein; protein id: At1g26850.1, by cDNA: gi_14335101 [Arabidopsis thaliana] At1g26850/T2P11_4 [Arabidopsis thaliana]
  misc_feature (11)..(633): Homolog of NCBI NO: 18071395 NR Description: hypothetical protein [Oryza sativa]
  misc_feature (610)..(610): Xaa is any aa, unknown or other
  misc_feature (614)..(614): Xaa is any aa, unknown or other
MAKDYPASPKAQQLQESKKQRLTYILVVSALCIAFYVLGAWQNTTLPKPIGNSAITRVGCDPTAATAQSSGSVPSFGPGSGEVLDFDAHHRLTINNTDGDGELQQFPACPLNFSEYTPCEDRRRGRRFDRNMLVYRERHCPGKDEQVRCLIPAPPGYRTPFKWPRSRDYAYFNNIPHKELSIEKAVQNWIQVEGDKFKFPGGGTMFPRGADAYIDDINKLISLSDGKIRTAVDTGCGVASWGAYLLKRNIIAMSFAPRDTHQAQVQFALERGVPAIIGVMAKQRLPYPSRAFDMAHCSRCLIPWDEHDGLYLAEVDRILRPGGYWILSGPPINWKTHHRGWERTKDDLKREQDKIEDVARSLCWNKVVEKGDLSIWQKPKNHLECANIKKTYKTPHICKSDNPDAAWYTQMEACVTPLPEVSNQGEVAGGAVEKWPERAFLVPPRIKRGMIPGLDAKKFDEDKKLWEKRVAYYKRTIPIAENRYRNVMDMNANMGGFAASLVKYPVWVMNVVPVNSDRDTLGAIYERGFIGTYQDWCEAFSTYPRTYDLLHADNLFSIYQDRCDITGILLEMDRILRPEGTAIIRDTVDVLTKVQAITKRMRWESRIMDXEDGXFNPEKVLMAVKTYWTAEAEEEH

SEQ ID NO: 12898 - protein, 505 aa, Zea mays subsp. mays
  peptide (1)..(505): Ceres Seq. ID no. 12414507
  misc_feature (1)..(494): Pfam Name: Putative methyltransferase Pfam Description: Putative methyltransferase
  misc_feature (1)..(498): Homolog of NCBI NO: 18398763 NR Description: unknown protein; protein id: At1g33170.1
  misc_feature (1)..(504): Homolog of NCBI NO: 24413975 NR Description: hypothetical protein~similar to Oryza sativa
  misc_feature (1)..(505): Homolog of NCBI NO: 15235080 NR Description: putative protein; protein id: At4g10440.1
  misc_feature (173)..(498): Homolog of NCBI NO: 9665165 NR Description: Unknown Protein [Arabidopsis thaliana]
  misc_feature (1)..(173): Homolog of NCBI NO: 9665165 NR Description: Unknown Protein [Arabidopsis thaliana]
  misc_feature (1)..(504): Homolog of NCBI NO: 15225560 NR Description: hypothetical protein; protein id: At2g45750.1
  misc_feature (1)..(504): Homolog of NCBI NO: 15236921 NR Description: hypothetical protein; protein id: At4g00750.1
  misc_feature (1)..(499): Homolog of NCBI NO: 34898042 NR Description: OSJNBa0038F22.19 [Oryza sativa (japonica >gi|5734619|dbj|BAA83350.1| Similar to Arabidopsis thaliana BAC
  misc_feature (1)..(505): Homolog of NCBI NO: 18396075 NR Description: expressed protein; protein id: At1g26850.1, by cDNA: gi_14335101 [Arabidopsis thaliana] At1g26850/T2P11_4 [Arabidopsis thaliana]
  misc_feature (1)..(502): Homolog of NCBI NO: 18071395 NR Description: hypothetical protein [Oryza sativa]
  misc_feature (479)..(479): Xaa is any aa, unknown or other
  misc_feature (483)..(483): Xaa is any aa, unknown or other
MLVYRERHCPGKDEQVRCLIPAPPGYRTPFKWPRSRDYAYFNNIPHKELSIEKAVQNWIQVEGDKFKFPGGGTMFPRGADAYIDDINKLISLSDGKIRTAVDTGCGVASWGAYLLKRNIIAMSFAPRDTHQAQVQFALERGVPAIIGVMAKQRLPYPSRAFDMAHCSRCLIPWDEHDGLYLAEVDRILRPGGYWILSGPPINWKTHHRGWERTKDDLKREQDKIEDVARSLCWNKVVEKGDLSIWQKPKNHLECANIKKTYKTPHICKSDNPDAAWYTQMEACVTPLPEVSNQGEVAGGAVEKWPERAFLVPPRIKRGMIPGLDAKKFDEDKKLWEKRVAYYKRTIPIAENRYRNVMDMNANMGGFAASLVKYPVWVMNVVPVNSDRDTLGAIYERGFIGTYQDWCEAFSTYPRTYDLLHADNLFSIYQDRCDITGILLEMDRILRPEGTAIIRDTVDVLTKVQAITKRMRWESRIMDXEDGXFNPEKVLMAVKTYWTAEAEEEH

SEQ ID NO: 12899 - DNA, 1668 bp, Zea mays subsp. mays
  misc_feature (1)..(1668): Ceres Seq. ID no. 12355794
  misc_feature: MA Experiment ID: 108535 Result: Up-regulated in Transcription
  misc_feature: MA Experiment 108535 PARAMETER Experiment Name: Zm_Meristem_P Parameter: Age (day) Value: 8
  misc_feature: MA Experiment 108535 PARAMETER Experiment Name: Zm_Meristem_P Parameter: Organism Value: Zea mays
  misc_feature: MA Experiment 108535 PARAMETER Experiment Name: Zm_Meristem_P Parameter: Plant Line Value: 35A19
  misc_feature: MA Experiment 108535 PARAMETER Experiment Name: Zm_Meristem_P Parameter: Tissue Value: Root Meristem vs. Above Root Meristem
atttatgaaacggaccattgaatgtgctcaagtcttctttcctccagaatcccccatctgagcaagggcgccgccgccgtcggctagcgccgcagcattgacgtggacgccgaccctctccggcagccgcttgcagcgcgtcccttccccgctcccgcggcatggactgcgcaaagaggagggcggtggcggacctccacgacgagctgatggtggagatcttctcgcgcgtgcccgtcaaagacctccgccgttgcacgtgcgtgtgcaaatcttggtgcaacatcatcaccgaccccctcaacggcaagaagctgccccagaccctggaaggcttcttccaaggcgtcgtcggagggcctcacaactacggccaattcaccagcctgtcggggagcggagaacgcgtgcctccggtcgacccttccttctccttcatcacggcaatgctgcctggcgtggagcattggtcctcttggattcttgcaacgggctcctgctctttgggtgcacccgggaggacaagttcgggtacatcgtgacaaaccctgcgactgaggaattgatgactgtgcccaccagctcctgctcttgtcctcctccaccttcggttggtggggaaagatatgcgcacacctttctgatgtttaaccctgctgtctcctcgcacttccacttggtccagatctgggaggataatgcggtgaaggaggtggaaacggtacactcttactcgtctgaaaccaaggcatggagtgacaggtcaagcaagtgggggcgaggtgaagagggcggtgaatggaagctgtggggtgaatccgtgattggattgacgcgtggctgggctttggtcgatggtctgctgcattttcttgtcttcgatcttcagaaacaagagaatgtgataattgcagtggatggggaagggaaaacttgtaggatcatcggctggcatggtaaggatgtgagaacaattgcttttattggtcaatcccaaaaccatctacactgcatcggtgtgaatttgcaattacatcaaggctcccaagtgcgcttcacgcaaatgtcgatctgggttcttgaggactatgatacagaagcatggatcctaaagcacaatgtgagctcttcgcagttctttgaattactgagtcacccaatcaaagacttccatattgtggccattcatccagatcacaattcgttcatccttgttcagcactggaaccagaaactggtatcatataacatggatactcaggaactgcatggtctctgcactcttggaaagggctatgtgattattaccccatatgttccctgtttcttggagtcatcggttcttgccaccaaacactgaggttgttgtttctggggacttctctgcatgttcaacaagagcctgatcatccaagtgtggggcaaggtgatctagtctgatggtgctttaatgtccttttgtaatgctttgagaaagctgtttacaggacaacatggttagttctatgatatatcagtgagaaagctgtttacaggacagtattgttagttctatgatatatcaaattagatcacacttaattgctggccaatataggtattagcttcggttttttgttgtgattattcaatattgaatgcgcacctgcgcacctatggtattgcccg

SEQ ID NO: 12900 - protein, 264 aa, Zea mays subsp. mays
  peptide (1)..(264): Ceres Seq. ID no. 12355795
  misc_feature (5)..(257): Homolog of NCBI NO: 34898810 NR Description: OJ1131_E05.32 [Oryza sativa (japonica
  misc_feature (75)..(257): Homolog of NCBI NO: 34898788 NR Description: OJ1131_E05.20 [Oryza sativa (japonica
  misc_feature (75)..(257): Homolog of NCBI NO: 34898790 NR Description: OJ1131_E05.21 [Oryza sativa (japonica
  misc_feature (64)..(258): Homolog of NCBI NO: 34898796 NR Description: OJ1131_E05.24 [Oryza sativa (japonica >gi|22831061|dbj|BAC15924.1| hypothetical protein [Oryza sativa
  misc_feature (5)..(257): Homolog of NCBI NO: 33146481 NR Description: unknown protein [Oryza sativa (japonica
  misc_feature (63)..(257): Homolog of NCBI NO: 34898802 NR Description: OJ1131_E05.28 [Oryza sativa (japonica
  misc_feature (63)..(257): Homolog of NCBI NO: 33146479 NR Description: receptor-like kinase-like [Oryza sativa (japonica
  misc_feature (63)..(264): Homolog of NCBI NO: 37536818 NR Description: hypothetical protein [Oryza sativa (japonica group)] >gi|18873858|gb|AAL79804.1| hypothetical protein [Oryza >gi|31433493|gb|AAP54998.1| hypothetical protein [Oryza sativa
MTVPTSSCSCPPPPSVGGERYAHTFLMFNPAVSSHFHLVQIWEDNAVKEVETVHSYSSETKAWSDRSSKWGRGEEGGEWKLWGESVIGLTRGWALVDGLLHFLVFDLQKQENVIIAVDGEGKTCRIIGWHGKDVRTIAFIGQSQNHLHCIGVNLQLHQGSQVRFTQMSIWVLEDYDTEAWILKHNVSSSQFFELLSHPIKDFHIVAIHPDHNSFILVQHWNQKLVSYNMDTQELHGLCTLGKGYVIITPYVPCFLESSVLATKH

SEQ ID NO: 12901 - protein, 238 aa, Zea mays subsp. mays
  peptide (1)..(238): Ceres Seq. ID no. 12355796
  misc_feature (1)..(231): Homolog of NCBI NO: 34898810 NR Description: OJ1131_E05.32 [Oryza sativa (japonica
  misc_feature (49)..(231): Homolog of NCBI NO: 34898788 NR Description: OJ1131_E05.20 [Oryza sativa (japonica
  misc_feature (49)..(231): Homolog of NCBI NO: 34898790 NR Description: OJ1131_E05.21 [Oryza sativa (japonica
  misc_feature (38)..(232): Homolog of NCBI NO: 34898796 NR Description: OJ1131_E05.24 [Oryza sativa (japonica >gi|22831061|dbj|BAC15924.1| hypothetical protein [Oryza sativa
  misc_feature (1)..(231): Homolog of NCBI NO: 33146481 NR Description: unknown protein [Oryza sativa (japonica
  misc_feature (37)..(231): Homolog of NCBI NO: 34898802 NR Description: OJ1131_E05.28 [Oryza sativa (japonica
  misc_feature (37)..(231): Homolog of NCBI NO: 33146479 NR Description: receptor-like kinase-like [Oryza sativa (japonica
  misc_feature (37)..(238): Homolog of NCBI NO: 37536818 NR Description: hypothetical protein [Oryza sativa (japonica group)] >gi|18873858|gb|AAL79804.1| hypothetical protein [Oryza >gi|31433493|gb|AAP54998.1| hypothetical protein [Oryza sativa
MFNPAVSSHFHLVQIWEDNAVKEVETVHSYSSETKAWSDRSSKWGRGEEGGEWKLWGESVIGLTRGWALVDGLLHFLVFDLQKQENVIIAVDGEGKTCRIIGWHGKDVRTIAFIGQSQNHLHCIGVNLQLHQGSQVRFTQMSIWVLEDYDTEAWILKHNVSSSQFFELLSHPIKDFHIVAIHPDHNSFILVQHWNQKLVSYNMDTQELHGLCTLGKGYVIITPYVPCFLESSVLATKH

SEQ ID NO: 12902 - DNA, 1621 bp, Zea mays subsp. mays
  misc_feature (1)..(1621): Ceres Seq. ID no. 12374562
  misc_feature: MA Experiment ID: 108529 Result: Down-regulated in Transcription
  misc_feature: MA Experiment 108529 PARAMETER Experiment Name: Zm_Imbibed_Seeds_P Parameter: Age (day) Value: 5 vs. 2
  misc_feature: MA Experiment 108529 PARAMETER Experiment Name: Zm_Imbibed_Seeds_P Parameter: Organism Value: Zea mays
  misc_feature: MA Experiment 108529 PARAMETER Experiment Name: Zm_Imbibed_Seeds_P Parameter: Plant Line Value: 35A19
  misc_feature: MA Experiment 108529 PARAMETER Experiment Name: Zm_Imbibed_Seeds_P Parameter: Tissue Value: Roots vs. Embryo
  misc_feature: MA Experiment ID: 108543 Result: Up-regulated in Transcription
  misc_feature: MA Experiment ID: 108545 Result: Up-regulated in Transcription
  misc_feature: MA Experiment 108545 PARAMETER Experiment Name: Zm_Imbibed_Seeds_P Parameter: Age (day) Value: 3 vs. 2
  misc_feature: MA Experiment 108545 PARAMETER Experiment Name: Zm_Imbibed_Seeds_P Parameter: Organism Value: Zea mays
  misc_feature: MA Experiment 108545 PARAMETER Experiment Name: Zm_Imbibed_Seeds_P Parameter: Plant Line Value: 35A19
  misc_feature: MA Experiment 108545 PARAMETER Experiment Name: Zm_Imbibed_Seeds_P Parameter: Tissue Value: Aerial vs. Embryo
  misc_feature: MA Experiment ID: 108546 Result: Down-regulated in Transcription
  misc_feature: MA Experiment 108546 PARAMETER Experiment Name: Zm_Imbibed_Seeds_P Parameter: Age (day) Value: 3 vs. 2
  misc_feature: MA Experiment 108546 PARAMETER Experiment Name: Zm_Imbibed_Seeds_P Parameter: Organism Value: Zea mays
  misc_feature: MA Experiment 108546 PARAMETER Experiment Name: Zm_Imbibed_Seeds_P Parameter: Plant Line Value: 35A19
  misc_feature: MA Experiment 108546 PARAMETER Experiment Name: Zm_Imbibed_Seeds_P Parameter: Tissue Value: Roots vs. Embryo
  misc_feature: MA Experiment ID: 108689 Result: Down-regulated in Transcription
  misc_feature: MA Experiment 108689 PARAMETER Experiment Name: Zm_Drought_Roots_P Parameter: Age (day) Value: 9
  misc_feature: MA Experiment 108689 PARAMETER Experiment Name: Zm_Drought_Roots_P Parameter: Organism Value: Zea mays
  misc_feature: MA Experiment 108689 PARAMETER Experiment Name: Zm_Drought_Roots_P Parameter: Plant Line Value: 35A19
  misc_feature: MA Experiment 108689 PARAMETER Experiment Name: Zm_Drought_Roots_P Parameter: Timepoint (hr) Value: 24
  misc_feature: MA Experiment 108689 PARAMETER Experiment Name: Zm_Drought_Roots_P Parameter: Tissue Value: Roots
  misc_feature: MA Experiment 108689 PARAMETER Experiment Name: Zm_Drought_Roots_P Parameter: Treatment Value: Drought vs. No Drought
  misc_feature: MA Experiment ID: 20000477 Result: Down-regulated in Transcription
  misc_feature: MA Experiment 20000477 PARAMETER Experiment Name: Zm_5mM_SA_P Parameter: Age (day) Value: 10
  misc_feature: MA Experiment 20000477 PARAMETER Experiment Name: Zm_5mM_SA_P Parameter: Organism Value: Zea mays
  misc_feature: MA Experiment 20000477 PARAMETER Experiment Name: Zm_5mM_SA_P Parameter: Plant Line Value: 35A19
  misc_feature: MA Experiment 20000477 PARAMETER Experiment Name: Zm_5mM_SA_P Parameter: Timepoint (hr) Value: 48
  misc_feature: MA Experiment 20000477 PARAMETER Experiment Name: Zm_5mM_SA_P Parameter: Tissue Value: Aerial
  misc_feature: MA Experiment 20000477 PARAMETER Experiment Name: Zm_5mM_SA_P Parameter: Treatment Value: 5mM SA vs. No Treatment
  misc_feature: MA Experiment ID: 20000478 Result: Down-regulated in Transcription
  misc_feature: MA Experiment 20000478 PARAMETER Experiment Name: Zm_5mM_SA_P Parameter: Age (day) Value: 11
  misc_feature: MA Experiment 20000478 PARAMETER Experiment Name: Zm_5mM_SA_P Parameter: Organism Value: Zea mays
  misc_feature: MA Experiment 20000478 PARAMETER Experiment Name: Zm_5mM_SA_P Parameter: Plant Line Value: 35A19
  misc_feature: MA Experiment 20000478 PARAMETER Experiment Name: Zm_5mM_SA_P Parameter: Timepoint (hr) Value: 72
  misc_feature: MA Experiment 20000478 PARAMETER Experiment Name: Zm_5mM_SA_P Parameter: Tissue Value: Aerial
  misc_feature: MA Experiment 20000478 PARAMETER Experiment Name: Zm_5mM_SA_P Parameter: Treatment Value: 5mM SA vs. No Treatment
  misc_feature: MA Experiment ID: 20000480 Result: Down-regulated in Transcription
  misc_feature: MA Experiment 20000480 PARAMETER Experiment Name: Zm_Drought_P Parameter: Age (day) Value: 11
  misc_feature: MA Experiment 20000480 PARAMETER Experiment Name: Zm_Drought_P Parameter: Organism Value: Zea mays
  misc_feature: MA Experiment 20000480 PARAMETER Experiment Name: Zm_Drought_P Parameter: Plant Line Value: 35A19
  misc_feature: MA Experiment 20000480 PARAMETER Experiment Name: Zm_Drought_P Parameter: Timepoint (hr) Value: 72
  misc_feature: MA Experiment 20000480 PARAMETER Experiment Name: Zm_Drought_P Parameter: Tissue Value: Aerial
  misc_feature: MA Experiment 20000480 PARAMETER Experiment Name: Zm_Drought_P Parameter: Treatment Value: Drought vs. No Drought
  misc_feature: MA Experiment ID: 20000535 Result: Down-regulated in Transcription
  misc_feature: MA Experiment 20000535 PARAMETER Experiment Name: Zm_Hybrid_Seed_Dev_P Parameter: DAP Value: 30 vs. 12
  misc_feature: MA Experiment 20000535 PARAMETER Experiment Name: Zm_Hybrid_Seed_Dev_P Parameter: Organism Value: Zea mays
  misc_feature: MA Experiment 20000535 PARAMETER Experiment Name: Zm_Hybrid_Seed_Dev_P Parameter: Plant Line Value: 35A19
  misc_feature: MA Experiment 20000535 PARAMETER Experiment Name: Zm_Hybrid_Seed_Dev_P Parameter: Tissue Value: Embryo vs. Unfert Floret
  misc_feature: MA Experiment ID: 20000629 Result: Down-regulated in Transcription
  misc_feature: MA Experiment 20000629 PARAMETER Experiment Name: Zm_Herbicide-Treatments_P Parameter: Timepoint (hr) Value: 12
  misc_feature: MA Experiment 20000629 PARAMETER Experiment Name: Zm_Herbicide-Treatments_P Parameter: Tissue Value: Aerial
  misc_feature: MA Experiment 20000629 PARAMETER Experiment Name: Zm_Herbicide-Treatments_P Parameter: Treatment Value: Trimec vs. No Treatment
  misc_feature: MA Experiment ID: 20000632 Result: Down-regulated in Transcription
  misc_feature: MA Experiment 20000632 PARAMETER Experiment Name: Zm_Herbicide-Treatments_P Parameter: Timepoint (hr) Value: 4
  misc_feature: MA Experiment 20000632 PARAMETER Experiment Name: Zm_Herbicide-Treatments_P Parameter: Tissue Value: Aerial
  misc_feature: MA Experiment 20000632 PARAMETER Experiment Name: Zm_Herbicide-Treatments_P Parameter: Treatment Value: Glean vs. No Treatment
  misc_feature: MA Experiment ID: 20001608 Result: Down-regulated in Transcription
  misc_feature: MA Experiment 20001608 PARAMETER Experiment Name: Zm_50ppm_KNO3_L-to-H_P Parameter: Age (day) Value: 21
  misc_feature: MA Experiment 20001608 PARAMETER Experiment Name: Zm_50ppm_KNO3_L-to-H_P Parameter: Organism Value: Zea mays
  misc_feature: MA Experiment 20001608 PARAMETER Experiment Name: Zm_50ppm_KNO3_L-to-H_P Parameter: Plant Line Value: 35A19
  misc_feature: MA Experiment 20001608 PARAMETER Experiment Name: Zm_50ppm_KNO3_L-to-H_P Parameter: Timepoint (hr) Value: 48
  misc_feature: MA Experiment 20001608 PARAMETER Experiment Name: Zm_50ppm_KNO3_L-to-H_P Parameter: Tissue Value: Shoots
  misc_feature: MA Experiment 20001608 PARAMETER Experiment Name: Zm_50ppm_KNO3_L-to-H_P Parameter: Treatment Value: 50ppm KNO3 vs. 50ppm KCl
acacacaaacacatcagcattcagcaatagctaatcgagcatcgtcgccttagctcctctcctctcctcttctctccgtcgtcgtggaacttctctccgccggctgccatataaaggaggaagaagagaacagcaacgctagctagccggccggcctccgtcgtcgccggcgtcgtcgactagctagctaactctcgatctccagttcctgcccccgccccacgcccggccgtcgtcgatcgtcagcaatataatggcaggaggcctcttctccatggctcacccggccgtcaccctctccggcatcgcaggaaacatcatctccttcctggtgttccttgcaccagtggcgacgttcctgcaggtgtaccggaagaagtcgacgggcgggttcagctcggtgccgtacgtggtggcgctcttcagctcggtgctgtggatcttctacgcgctggtgaagaccaactcgaggccgctgctgaccatcaacgccttcggctgcggcgtggaggcggcctacatagtcctctacctggcgtacgcgccgcggcgggcgcgcctgcggactctggcctacttcttcctgctggacgtggcggccttcgcgctcgtcgtcgccgtcacgctcttcgccgtccgcgagccccaccgcgtcaagttcctcggcagcgtctgcctcgccttctccatggccgtcttcgtcgcgccgctcagcatcatcgtcaaggtggtcaagaccaagagcgtcgagttcctgcccatcagcctctccttctgcctcacgctcagcgccgtcgcctggttctgctacggcctcttcaccaaggacccctttgtcatgtaccccaacgtcggcggcttcttcttcagctgcgtccagatgggcctctacttctggtaccgcaagccccgcccggcggccaagaacaacgccgtgctgccgacgaccacggacggcggcaacgcggtgcaggtgcaggggcaggtcatcgagctggcgcccaacacggtggccatcctgtcggtgagccccatccccatcgtgggcgtgcacaagatcgaggtggtggagcagcagcacaaggaggccgccgtggccgccgagacccgccggatggccgccgcaaacccggacggcgccatgccggaggtcatcgagatcgtccccgccgccgccgcggtgtgacccaacgccaatcaccatgcaccgtacacaccctgctagcttcttattagctagctcggatgacgtacgacagtttggtggcaagtggctggcagctcaagcatgcagatgcaggcatcgtcgtctgctatagttggtcgtttagttggttaattgttggattattattgcgtatctctctcgtgtgcgtcgtagccttgtctcagttcagttcagtgtcgaatcaagtagtagtagctgttgtttgcattggatctgacaatgcatgcatgctaataattatggtggtgtgatggtcttggtcgatctggtgtatgtaatgtacgtacgcgcgcggtacgtacgtagtcgtctacgtacgccgtgtcaacgtcgtagatctctacgggaagatgataagactgtaacatgcagggcatgcatctatttatactt

SEQ ID NO: 12903 - protein, 310 aa, Zea mays subsp. mays
  peptide (1)..(310): Ceres Seq. ID no. 12374563
  misc_feature (17)..(101): Pfam Name: MtN3/saliva family Pfam Description: MtN3/saliva family
  misc_feature (7)..(247): Homolog of NCBI NO: 1619602 NR Description: MtN3 [Medicago truncatula]
  misc_feature (4)..(217): Homolog of NCBI NO: 15240040 NR Description: senescence-associated protein (SAG29); protein At5g13170.1, supported by cDNA: 38843., supported by cDNA:
  misc_feature (4)..(217): Homolog of NCBI NO: 21593422 NR Description: senescence-associated protein (SAG29)
  misc_feature (14)..(219): Homolog of NCBI NO: 15241265 NR Description: MtN3-like protein; protein id: At5g50790.1, by cDNA: 114681., supported by cDNA: gi_15450935, supported by
  misc_feature (5)..(270): Homolog of NCBI NO: 21554178 NR Description: similar to MtN3 protein [Arabidopsis thaliana]
  misc_feature (5)..(270): Homolog of NCBI NO: 15225014 NR Description: similar to MtN3 protein; protein id: At2g39060.1, by cDNA: 20810. [Arabidopsis thaliana] >gi|25354616|pir||F84812
  misc_feature (5)..(217): Homolog of NCBI NO: 15229019 NR Description: MTN3-like protein; protein id: At3g48740.1, by cDNA: gi_13605687, supported by cDNA: gi_16930410, supported
  misc_feature (17)..(241): Homolog of NCBI NO: 14715258 NR Description: N3 like protein [Medicago truncatula]
  misc_feature (17)..(217): Homolog of NCBI NO: 11345413 NR Description: NEC1 [Petunia x hybrida]
  misc_feature (17)..(226): Homolog of NCBI NO: 15241278 NR Description: MtN3-like protein; protein id: At5g50800.1,
MAGGLFSMAHPAVTLSGIAGNIISFLVFLAPVATFLQVYRKKSTGGFSSVPYVVALFSSVLWIFYALVKTNSRPLLTINAFGCGVEAAYIVLYLAYAPRRARLRTLAYFFLLDVAAFALVVAVTLFAVREPHRVKFLGSVCLAFSMAVFVAPLSIIVKVVKTKSVEFLPISLSFCLTLSAVAWFCYGLFTKDPFVMYPNVGGFFFSCVQMGLYFWYRKPRPAAKNNAVLPTTTDGGNAVQVQGQVIELAPNTVAILSVSPIPIVGVHKIEVVEQQHKEAAVAAETRRMAAANPDGAMPEVIEIVPAAAAV

SEQ ID NO: 12904 - protein, 303 aa, Zea mays subsp. mays
  peptide (1)..(303): Ceres Seq. ID no. 12374564
  misc_feature (10)..(94): Pfam Name: MtN3/saliva family Pfam Description: MtN3/saliva family
  misc_feature (1)..(240): Homolog of NCBI NO: 1619602 NR Description: MtN3 [Medicago truncatula]
  misc_feature (1)..(210): Homolog of NCBI NO: 15240040 NR Description: senescence-associated protein (SAG29); protein At5g13170.1, supported by cDNA: 38843., supported by cDNA:
  misc_feature (1)..(210): Homolog of NCBI NO: 21593422 NR Description: senescence-associated protein (SAG29)
  misc_feature (7)..(212): Homolog of NCBI NO: 15241265 NR Description: MtN3-like protein; protein id: At5g50790.1, by cDNA: 114681., supported by cDNA: gi_15450935, supported by
  misc_feature (1)..(263): Homolog of NCBI NO: 21554178 NR Description: similar to MtN3 protein [Arabidopsis thaliana]
  misc_feature (1)..(263): Homolog of NCBI NO: 15225014 NR Description: similar to MtN3 protein; protein id: At2g39060.1, by cDNA: 20810. [Arabidopsis thaliana] >gi|25354616|pir||F84812
  misc_feature (1)..(210): Homolog of NCBI NO: 15229019 NR Description: MTN3-like protein; protein id: At3g48740.1, by cDNA: gi_13605687, supported by cDNA: gi_16930410, supported
  misc_feature (10)..(234): Homolog of NCBI NO: 14715258 NR Description: N3 like protein [Medicago truncatula]
  misc_feature (10)..(210): Homolog of NCBI NO: 11345413 NR Description: NEC1 [Petunia x hybrida]
  misc_feature (10)..(219): Homolog of NCBI NO: 15241278 NR Description: MtN3-like protein; protein id: At5g50800.1,
MAHPAVTLSGIAGNIISFLVFLAPVATFLQVYRKKSTGGFSSVPYVVALFSSVLWIFYALVKTNSRPLLTINAFGCGVEAAYIVLYLAYAPRRARLRTLAYFFLLDVAAFALVVAVTLFAVREPHRVKFLGSVCLAFSMAVFVAPLSIIVKVVKTKSVEFLPISLSFCLTLSAVAWFCYGLFTKDPFVMYPNVGGFFFSCVQMGLYFWYRKPRPAAKNNAVLPTTTDGGNAVQVQGQVIELAPNTVAILSVSPIPIVGVHKIEVVEQQHKEAAVAAETRRMAAANPDGAMPEVIEIVPAAAAV

SEQ ID NO: 12905 - protein, 165 aa, Zea mays subsp. mays
  peptide (1)..(165): Ceres Seq. ID no. 12374565
  misc_feature (1)..(102): Homolog of NCBI NO: 1619602 NR Description: MtN3 [Medicago truncatula]
  misc_feature (1)..(72): Homolog of NCBI NO: 15240040 NR Description: senescence-associated protein (SAG29); protein At5g13170.1, supported by cDNA: 38843., supported by cDNA:
  misc_feature (1)..(72): Homolog of NCBI NO: 21593422 NR Description: senescence-associated protein (SAG29)
  misc_feature (1)..(74): Homolog of NCBI NO: 15241265 NR Description: MtN3-like protein; protein id: At5g50790.1, by cDNA: 114681., supported by cDNA: gi_15450935, supported by
  misc_feature (1)..(125): Homolog of NCBI NO: 21554178 NR Description: similar to MtN3 protein [Arabidopsis thaliana]
  misc_feature (1)..(125): Homolog of NCBI NO: 15225014 NR Description: similar to MtN3 protein; protein id: At2g39060.1, by cDNA: 20810. [Arabidopsis thaliana] >gi|25354616|pir||F84812
  misc_feature (1)..(72): Homolog of NCBI NO: 15229019 NR Description: MTN3-like protein; protein id: At3g48740.1, by cDNA: gi_13605687, supported by cDNA: gi_16930410, supported
  misc_feature (1)..(96): Homolog of NCBI NO: 14715258 NR Description: N3 like protein [Medicago truncatula]
  misc_feature (1)..(72): Homolog of NCBI NO: 11345413 NR Description: NEC1 [Petunia x hybrida]
  misc_feature (1)..(81): Homolog of NCBI NO: 15241278 NR Description: MtN3-like protein; protein id: At5g50800.1,
MAVFVAPLSIIVKVVKTKSVEFLPISLSFCLTLSAVAWFCYGLFTKDPFVMYPNVGGFFFSCVQMGLYFWYRKPRPAAKNNAVLPTTTDGGNAVQVQGQVIELAPNTVAILSVSPIPIVGVHKIEVVEQQHKEAAVAAETRRMAAANPDGAMPEVIEIVPAAAAV

SEQ ID NO: 12906 - DNA, 1091 bp, Zea mays subsp. mays
  misc_feature (1)..(1091): Ceres Seq. ID no. 12365120
  misc_feature: MA Experiment ID: 108527 Result: Down-regulated in Transcription
  misc_feature: MA Experiment 108527 PARAMETER Experiment Name: Zm_5mM_NO_P Parameter: Age (day) Value: 8
  misc_feature: MA Experiment 108527 PARAMETER Experiment Name: Zm_5mM_NO_P Parameter: Organism Value: Zea mays
  misc_feature: MA Experiment 108527 PARAMETER Experiment Name: Zm_5mM_NO_P Parameter: Plant Line Value: 35A19
  misc_feature: MA Experiment 108527 PARAMETER Experiment Name: Zm_5mM_NO_P Parameter: Timepoint (hr) Value: 6
  misc_feature: MA Experiment 108527 PARAMETER Experiment Name: Zm_5mM_NO_P Parameter: Tissue Value: Aerial
  misc_feature: MA Experiment 108527 PARAMETER Experiment Name: Zm_5mM_NO_P Parameter: Treatment Value: 5mM NO vs. No Treatment
atgattatggatatgctggggcctagtttgtgggattcatggaattcattaggccaatccatgccatcggaaatggtggcttgcattgccatggagtccatttccatcttggaaagcatgcattctaaaggatatgtgcatggagacgtcaaacctgagaactttcttctggggcagccttcaacgcctcatgaaaagaaactttatcttgtggatcttggattagcaacaaagtggagagatactgctaatgggcagcatgttagttatgatcaacgtcctgatgcctttagaggaacagtcagatatgctagtgtccatgcacatttaggaagaaccgctagcaggagagatgatttggagtcacttgcctatacactagtattccttcaccggggcaggttgccatggcagggatatcagggtgataataaatcatttttggtgtgcaagagaaagatgagtacctcacctgaggccctctgcggcatatgtcctcaacctttcaaggagtttcttgaggccgttgtcaacatgaagtttgatgaagagccaaactattccaagttgatttcattgtttgacagtttaattggaccaatcccttccattagaccaatcaatactgatggagcccaaaaggtagggcagaagcgtgccaggttgcttaatgatgacgacgaccatgtaaaaaagaagattcggctgggtgctcctgcaacacagtggatttcagtatacaattcaaggcaacctatgaagcagaggtaccactataatgtggctgatgcaaggttagcgcaacatgtggagaaaggaaatgaggatggtttgttgataagttcaatatcatcatgcgcaaatctttgggcaatcattatggatgcaggaactggcttctcagctcaagtttatgagctatcttcacactttcttcataaggagtggatcatggaacaatgggataaaagtttctacatcagttctgttgctggctccaacaatggaagttctattgtagtgatgtcaaaaggcacaccatatacacagcaatcttataaagtcagtgattcctttccatttaagtggat

SEQ ID NO: 12907 - protein, 363 aa, Zea mays subsp. mays
  peptide (1)..(363): Ceres Seq. ID no. 12365121
  misc_feature (1)..(362): Homolog of NCBI NO: 15231321 NR Description: casein kinase, putative; protein id: At3g13670.1, by cDNA: gi_19310580 [Arabidopsis thaliana]
  misc_feature (1)..(362): Homolog of NCBI NO: 15228670 NR Description: putative casein kinase; protein id: At3g03940.1 thaliana] >gi|6223639|gb|AAF05853.1|AC011698_4 putative casein
  misc_feature (1)..(362): Homolog of NCBI NO: 15238765 NR Description: casein kinase-like protein; protein id:
  misc_feature (1)..(362): Homolog of NCBI NO: 30682888 NR Description: protein kinase family [Arabidopsis thaliana]
  misc_feature (1)..(362): Homolog of NCBI NO: 34909952 NR Description: putative casein kinase [Oryza sativa (japonica group)] >gi|20160915|dbj|BAB89852.1| putative casein kinase
  misc_feature (1)..(362): Homolog of NCBI NO: 28269422 NR Description: putative serine/threonine protein kinase [Oryza
  misc_feature (1)..(362): Homolog of NCBI NO: 34394436 NR Description: putative casein kinase 1, delta isoform 1 [Oryza
  misc_feature (18)..(362): Homolog of NCBI NO: 6006848 NR Description: unknown protein, 5' partial [Arabidopsis thaliana]
  misc_feature (1)..(362): Homolog of NCBI NO: 34903604 NR Description: casein kinase-like protein [Oryza sativa
  misc_feature (1)..(362): Homolog of NCBI NO: 18139937 NR Description: serine/threonine protein kinase [Chlamydomonas
MIMDMLGPSLWDSWNSLGQSMPSEMVACIAMESISILESMHSKGYVHGDVKPENFLLGQPSTPHEKKLYLVDLGLATKWRDTANGQHVSYDQRPDAFRGTVRYASVHAHLGRTASRRDDLESLAYTLVFLHRGRLPWQGYQGDNKSFLVCKRKMSTSPEALCGICPQPFKEFLEAVVNMKFDEEPNYSKLISLFDSLIGPIPSIRPINTDGAQKVGQKRARLLNDDDDHVKKKIRLGAPATQWISVYNSRQPMKQRYHYNVADARLAQHVEKGNEDGLLISSISSCANLWAIIMDAGTGFSAQVYELSSHFLHKEWIMEQWDKSFYISSVAGSNNGSSIVVMSKGTPYTQQSYKVSDSFPFKW

SEQ ID NO: 12908 - protein, 361 aa, Zea mays subsp. mays
  peptide (1)..(361): Ceres Seq. ID no. 12365122
  misc_feature (1)..(360): Homolog of NCBI NO: 15231321 NR Description: casein kinase, putative; protein id: At3g13670.1, by cDNA: gi_19310580 [Arabidopsis thaliana]
  misc_feature (1)..(360): Homolog of NCBI NO: 15228670 NR Description: putative casein kinase; protein id: At3g03940.1 thaliana] >gi|6223639|gb|AAF05853.1|AC011698_4 putative casein
  misc_feature (1)..(360): Homolog of NCBI NO: 15238765 NR Description: casein kinase-like protein; protein id:
  misc_feature (1)..(360): Homolog of NCBI NO: 30682888 NR Description: protein kinase family [Arabidopsis thaliana]
  misc_feature (1)..(360): Homolog of NCBI NO: 34909952 NR Description: putative casein kinase [Oryza sativa (japonica group)] >gi|20160915|dbj|BAB89852.1| putative casein kinase
  misc_feature (1)..(360): Homolog of NCBI NO: 28269422 NR Description: putative serine/threonine protein kinase [Oryza
  misc_feature (1)..(360): Homolog of NCBI NO: 34394436 NR Description: putative casein kinase 1, delta isoform 1 [Oryza
  misc_feature (16)..(360): Homolog of NCBI NO: 6006848 NR Description: unknown protein, 5' partial [Arabidopsis thaliana]
  misc_feature (1)..(360): Homolog of NCBI NO: 34903604 NR Description: casein kinase-like protein [Oryza sativa
  misc_feature (1)..(360): Homolog of NCBI NO: 18139937 NR Description: serine/threonine protein kinase [Chlamydomonas
MDMLGPSLWDSWNSLGQSMPSEMVACIAMESISILESMHSKGYVHGDVKPENFLLGQPSTPHEKKLYLVDLGLATKWRDTANGQHVSYDQRPDAFRGTVRYASVHAHLGRTASRRDDLESLAYTLVFLHRGRLPWQGYQGDNKSFLVCKRKMSTSPEALCGICPQPFKEFLEAVVNMKFDEEPNYSKLISLFDSLIGPIPSIRPINTDGAQKVGQKRARLLNDDDDHVKKKIRLGAPATQWISVYNSRQPMKQRYHYNVADARLAQHVEKGNEDGLLISSISSCANLWAIIMDAGTGFSAQVYELSSHFLHKEWIMEQWDKSFYISSVAGSNNGSSIVVMSKGTPYTQQSYKVSDSFPFKW

SEQ ID NO: 12909 - protein, 359 aa, Zea mays subsp. mays
  peptide (1)..(359): Ceres Seq. ID no. 12365123
  misc_feature (14)..(358): Homolog of NCBI NO: 6006848 NR Description: unknown protein, 5' partial [Arabidopsis thaliana]
  misc_feature (1)..(358): Homolog of NCBI NO: 34903604 NR Description: casein kinase-like protein [Oryza sativa
  misc_feature (1)..(358): Homolog of NCBI NO: 18139937 NR Description: serine/threonine protein kinase [Chlamydomonas
  misc_feature (1)..(358): Homolog of NCBI NO: 15231321 NR Description: casein kinase, putative; protein id: At3g13670.1, by cDNA: gi_19310580 [Arabidopsis thaliana]
  misc_feature (1)..(358): Homolog of NCBI NO: 15228670 NR Description: putative casein kinase; protein id: At3g03940.1 thaliana] >gi|6223639|gb|AAF05853.1|AC011698_4 putative casein
  misc_feature (1)..(358): Homolog of NCBI NO: 15238765 NR Description: casein kinase-like protein; protein id:
  misc_feature (1)..(358): Homolog of NCBI NO: 30682888 NR Description: protein kinase family [Arabidopsis thaliana]
  misc_feature (1)..(358): Homolog of NCBI NO: 34909952 NR Description: putative casein kinase [Oryza sativa (japonica group)] >gi|20160915|dbj|BAB89852.1| putative casein kinase
  misc_feature (1)..(358): Homolog of NCBI NO: 28269422 NR Description: putative serine/threonine protein kinase [Oryza
  misc_feature (1)..(358): Homolog of NCBI NO: 34394436 NR Description: putative casein kinase 1, delta isoform 1 [Oryza
MLGPSLWDSWNSLGQSMPSEMVACIAMESISILESMHSKGYVHGDVKPENFLLGQPSTPHEKKLYLVDLGLATKWRDTANGQHVSYDQRPDAFRGTVRYASVHAHLGRTASRRDDLESLAYTLVFLHRGRLPWQGYQGDNKSFLVCKRKMSTSPEALCGICPQPFKEFLEAVVNMKFDEEPNYSKLISLFDSLIGPIPSIRPINTDGAQKVGQKRARLLNDDDDHVKKKIRLGAPATQWISVYNSRQPMKQRYHYNVADARLAQHVEKGNEDGLLISSISSCANLWAIIMDAGTGFSAQVYELSSHFLHKEWIMEQWDKSFYISSVAGSNNGSSIVVMSKGTPYTQQSYKVSDSFPFKW

SEQ ID NO: 12910 - DNA, 1705 bp, Zea mays subsp. mays
  misc_feature (1)..(1705): Ceres Seq. ID no. 12374558
  misc_feature: MA Experiment ID: 108528 Result: Up-regulated in Transcription
  misc_feature: MA Experiment 108528 PARAMETER Experiment Name: Zm_Imbibed_Seeds_P Parameter: Age (day) Value: 5 vs. 2
  misc_feature: MA Experiment 108528 PARAMETER Experiment Name: Zm_Imbibed_Seeds_P Parameter: Organism Value: Zea mays
  misc_feature: MA Experiment 108528 PARAMETER Experiment Name: Zm_Imbibed_Seeds_P Parameter: Plant Line Value: 35A19
  misc_feature: MA Experiment 108528 PARAMETER Experiment Name: Zm_Imbibed_Seeds_P Parameter: Tissue Value: Aerial vs. Embryo
  misc_feature: MA Experiment ID: 108530 Result: Up-regulated in Transcription
  misc_feature: MA Experiment 108530 PARAMETER Experiment Name: Zm_Imbibed_Seeds_P Parameter: Age (day) Value: 6 vs. 2
  misc_feature: MA Experiment 108530 PARAMETER Experiment Name: Zm_Imbibed_Seeds_P Parameter: Organism Value: Zea mays
  misc_feature: MA Experiment 108530 PARAMETER Experiment Name: Zm_Imbibed_Seeds_P Parameter: Plant Line Value: 35A19
  misc_feature: MA Experiment 108530 PARAMETER Experiment Name: Zm_Imbibed_Seeds_P Parameter: Tissue Value: Aerial vs. Embryo
  misc_feature: MA Experiment ID: 108535 Result: Down-regulated in Transcription
  misc_feature: MA Experiment 108535 PARAMETER Experiment Name: Zm_Meristem_P Parameter: Age (day) Value: 8
  misc_feature: MA Experiment 108535 PARAMETER Experiment Name: Zm_Meristem_P Parameter: Organism Value: Zea mays
  misc_feature: MA Experiment 108535 PARAMETER Experiment Name: Zm_Meristem_P Parameter: Plant Line Value: 35A19
  misc_feature: MA Experiment 108535 PARAMETER Experiment Name: Zm_Meristem_P Parameter: Tissue Value: Root Meristem vs. Above Root Meristem
  misc_feature: MA Experiment ID: 108543 Result: Down-regulated in Transcription
  misc_feature: MA Experiment ID: 108547 Result: Up-regulated in Transcription
  misc_feature: MA Experiment 108547 PARAMETER Experiment Name: Zm_Imbibed_Seeds_P Parameter: Age (day) Value: 4 vs. 2
  misc_feature: MA Experiment 108547 PARAMETER Experiment Name: Zm_Imbibed_Seeds_P Parameter: Organism Value: Zea mays
  misc_feature: MA Experiment 108547 PARAMETER Experiment Name: Zm_Imbibed_Seeds_P Parameter: Plant Line Value: 35A19
  misc_feature: MA Experiment 108547 PARAMETER Experiment Name: Zm_Imbibed_Seeds_P Parameter: Tissue Value: Aerial vs. Embryo
gtacggttaaagttgtggcaggaggagtgggggcgcgggagagatgataaggatggcggcagcgtctcagccgccatcgtcagccttgcggatgcacgggtgcggcggcgcggcttctgcgtcgtccgcgcccgtgcgcctcttcacggagtcgcggggtagagtcgtggcgtcgattgggaggggcaggaggcggaggcgcgccatctcgtgctgctcgtctccagacgcagatggccctcgccccgccgcgccaccgacctccgcagcgccttccgacgggtcgatacagctctattcccagatcgagagggtaatcacggaggcggcaaagcagtcccgggaaggctggggttcgactggagattggaccgaagtcgagggatcatgggtgttgagaccgaagtccttggagccatcatttgttgtccactttgttggaggaatttttgttggagccgctccccagatcacataccgcttcttcctcgagtgtctcgcgaacaggggagctttggtgattgctacgccttatgcgagcggctttgaccatttcttcattgcagatgaagttcaatttaagtttgacaggtgtttgagaaacttggatgagcctgtaaatgatctcccaacgtttggtgttggacattcattgggatctgttatccacatgttgattggatcaagatatgctgtgcagcgaagtggaaatgtactgatgtcctttaacaacaaggaggcaagctctgcgatcccactattttcacctgtaattgttcctatgtcacagagttttggccctatattctcccaattggcatcgtatccaacaatccggtttggggcagaagcagctattaagcagcttgagaatctaagcccacctgttgttaagcaacttctacctttacttcaacaacttcctccgttgtatatggacctaataaaagggcgggaggacttcattccaaaaccagaagagacacgccgcctgataaaatcctactatggaatttctcggaatctcttaataaagtttaaagatgatcaaattgatgaaacctctacccttgcacaagtactaagctctgaagcagctattagctcattgcttgatatgtcaattcgatcacttcctggggatcatgggttaccattacaacaggttcttcctgatgttccaccagcaatggctgatgcagtgaaccgcggaggtgaacttctgacaaatctgacaacaggcacaccatgggaggctgttgctaaggaggttggcaccactttgggtactgactcaggcattctacgagcacagatctcaaaagacgttgaaactcttgttgatgtaattgcttcatggacatcttcaaattctggtccaagactacttcgcccatgatcacccagctgtctgcgtacagaaatgttagtaacagtgaagagcaacatgatttaatgatgcattgtgagtaacaaaaagttagattgcacttcagtgcggctgtcttagtattttagatccatactatagttcagaaaaaagtgaagatatgtatttatatggtgtatttttgaaccaagatattttgatagaaggaaactttataaggaatagaaatagaatgatagattctggatacggtaaagctgctaagctgtatgaaaggagtcttggcaattcaataattggcaattcagcatttcg

SEQ ID NO: 12911 - protein, 451 aa, Zea mays subsp. mays
  peptide (1)..(451): Ceres Seq. ID no. 12374559
  misc_feature (1)..(270): Homolog of NCBI NO: 38347589 NR Description: OSJNBa0042I15.2 [Oryza sativa (japonica
  misc_feature (277)..(450): Homolog of NCBI NO: 38347589 NR Description: OSJNBa0042I15.2 [Oryza sativa (japonica
  misc_feature (42)..(451): Homolog of NCBI NO: 15238825 NR Description: putative protein; protein id: At5g47860.1, by cDNA: gi_16648765 [Arabidopsis thaliana] gene_id:MCA23.20~pir||S75306~similar to unknown protein
  misc_feature (190)..(438): Homolog of NCBI NO: 38569178 NR Description: OJ000315_02.20 [Oryza sativa (japonica
  misc_feature (108)..(253): Homolog of NCBI NO: 17228580 NR Description: hypothetical protein [Nostoc sp. PCC 7120]
  misc_feature (306)..(374): Homolog of NCBI NO: 17228580 NR Description: hypothetical protein [Nostoc sp. PCC 7120]
  misc_feature (108)..(238): Homolog of NCBI NO: 16329812 NR Description: hypothetical protein [Synechocystis sp. PCC 6803]
  misc_feature (252)..(374): Homolog of NCBI NO: 16329812 NR Description: hypothetical protein [Synechocystis sp. PCC 6803]
  misc_feature (108)..(253): Homolog of NCBI NO: 23039808 NR Description: hypothetical protein [Trichodesmium erythraeum
  misc_feature (284)..(376): Homolog of NCBI NO: 23039808 NR Description: hypothetical protein [Trichodesmium erythraeum
MIRMAAASQPPSSALRMHGCGGAASASSAPVRLFTESRGRVVASIGRGRRRRRAISCCSSPDADGPRPAAPPTSAAPSDGSIQLYSQIERVITEAAKQSREGWGSTGDWTEVEGSWVLRPKSLEPSFVVHFVGGIFVGAAPQITYRFFLECLANRGALVIATPYASGFDHFFIADEVQFKFDRCLRNLDEPVNDLPTFGVGHSLGSVIHMLIGSRYAVQRSGNVLMSFNNKEASSAIPLFSPVIVPMSQSFGPIFSQLASYPTIRFGAEAAIKQLENLSPPVVKQLLPLLQQLPPLYMDLIKGREDFIPKPEETRRLIKSYYGISRNLLIKFKDDQIDETSTLAQVLSSEAAISSLLDMSIRSLPGDHGLPLQQVLPDVPPAMADAVNRGGELLTNLTTGTPWEAVAKEVGTTLGTDSGILRAQISKDVETLVDVIASWTSSNSGPRLLRP

SEQ ID NO: 12912 - protein, 448 aa, Zea mays subsp. mays
  peptide (1)..(448): Ceres Seq. ID no. 12374560
  misc_feature (1)..(267): Homolog of NCBI NO: 38347589 NR Description: OSJNBa0042I15.2 [Oryza sativa (japonica
  misc_feature (274)..(447): Homolog of NCBI NO: 38347589 NR Description: OSJNBa0042I15.2 [Oryza sativa (japonica
  misc_feature (39)..(448): Homolog of NCBI NO: 15238825 NR Description: putative protein; protein id: At5g47860.1, by cDNA: gi_16648765 [Arabidopsis thaliana] gene_id:MCA23.20~pir||S75306~similar to unknown protein
  misc_feature (187)..(435): Homolog of NCBI NO: 38569178 NR Description: OJ000315_02.20 [Oryza sativa (japonica
  misc_feature (105)..(250): Homolog of NCBI NO: 17228580 NR Description: hypothetical protein [Nostoc sp. PCC 7120]
  misc_feature (303)..(371): Homolog of NCBI NO: 17228580 NR Description: hypothetical protein [Nostoc sp. PCC 7120]
  misc_feature (105)..(235): Homolog of NCBI NO: 16329812 NR Description: hypothetical protein [Synechocystis sp. PCC 6803]
  misc_feature (249)..(371): Homolog of NCBI NO: 16329812 NR Description: hypothetical protein [Synechocystis sp. PCC 6803]
  misc_feature (105)..(250): Homolog of NCBI NO: 23039808 NR Description: hypothetical protein [Trichodesmium erythraeum
  misc_feature (281)..(373): Homolog of NCBI NO: 23039808 NR Description: hypothetical protein [Trichodesmium erythraeum
MAAASQPPSSALRMHGCGGAASASSAPVRLFTESRGRVVASIGRGRRRRRAISCCSSPDADGPRPAAPPTSAAPSDGSIQLYSQIERVITEAAKQSREGWGSTGDWTEVEGSWVLRPKSLEPSFVVHFVGGIFVGAAPQITYRFFLECLANRGALVIATPYASGFDHFFIADEVQFKFDRCLRNLDEPVNDLPTFGVGHSLGSVIHMLIGSRYAVQRSGNVLMSFNNKEASSAIPLFSPVIVPMSQSFGPIFSQLASYPTIRFGAEAAIKQLENLSPPVVKQLLPLLQQLPPLYMDLIKGREDFIPKPEETRRLIKSYYGISRNLLIKFKDDQIDETSTLAQVLSSEAAISSLLDMSIRSLPGDHGLPLQQVLPDVPPAMADAVNRGGELLTNLTTGTPWEAVAKEVGTTLGTDSGILRAQISKDVETLVDVIASWTSSNSGPRLLRP

SEQ ID NO: 12913 - protein, 435 aa, Zea mays subsp. mays
  peptide (1)..(435): Ceres Seq. ID no. 12374561
  misc_feature (1)..(254): Homolog of NCBI NO: 38347589 NR Description: OSJNBa0042I15.2 [Oryza sativa (japonica
  misc_feature (261)..(434): Homolog of NCBI NO: 38347589 NR Description: OSJNBa0042I15.2 [Oryza sativa (japonica
  misc_feature (26)..(435): Homolog of NCBI NO: 15238825 NR Description: putative protein; protein id: At5g47860.1, by cDNA: gi_16648765 [Arabidopsis thaliana] gene_id:MCA23.20~pir||S75306~similar to unknown protein
  misc_feature (174)..(422): Homolog of NCBI NO: 38569178 NR Description: OJ000315_02.20 [Oryza sativa (japonica
  misc_feature (92)..(237): Homolog of NCBI NO: 17228580 NR Description: hypothetical protein [Nostoc sp. PCC 7120]
  misc_feature (290)..(358): Homolog of NCBI NO: 17228580 NR Description: hypothetical protein [Nostoc sp. PCC 7120]
  misc_feature (92)..(222): Homolog of NCBI NO: 16329812 NR Description: hypothetical protein [Synechocystis sp. PCC 6803]
  misc_feature (236)..(358): Homolog of NCBI NO: 16329812 NR Description: hypothetical protein [Synechocystis sp. PCC 6803]
  misc_feature (92)..(237): Homolog of NCBI NO: 23039808 NR Description: hypothetical protein [Trichodesmium erythraeum
  misc_feature (268)..(360): Homolog of NCBI NO: 23039808 NR Description: hypothetical protein [Trichodesmium erythraeum
MHGCGGAASASSAPVRLFTESRGRVVASIGRGRRRRRAISCCSSPDADGPRPAAPPTSAAPSDGSIQLYSQIERVITEAAKQSREGWGSTGDWTEVEGSWVLRPKSLEPSFVVHFVGGIFVGAAPQITYRFFLECLANRGALVIATPYASGFDHFFIADEVQFKFDRCLRNLDEPVNDLPTFGVGHSLGSVIHMLIGSRYAVQRSGNVLMSFNNKEASSAIPLFSPVIVPMSQSFGPIFSQLASYPTIRFGAEAAIKQLENLSPPVVKQLLPLLQQLPPLYMDLIKGREDFIPKPEETRRLIKSYYGISRNLLIKFKDDQIDETSTLAQVLSSEAAISSLLDMSIRSLPGDHGLPLQQVLPDVPPAMADAVNRGGELLTNLTTGTPWEAVAKEVGTTLGTDSGILRAQISKDVETLVDVIASWTSSNSGPRLLRP

SEQ ID NO: 12914 - DNA, 902 bp, Zea mays subsp. mays
  misc_feature (1)..(902): Ceres Seq. ID no. 12414821
  misc_feature: MA Experiment ID: 20000534 Result: Down-regulated in Transcription
  misc_feature: MA Experiment 20000534 PARAMETER Experiment Name: Zm_Hybrid_Pollen_P Parameter: Age (day) Value: 8
  misc_feature: MA Experiment 20000534 PARAMETER Experiment Name: Zm_Hybrid_Pollen_P Parameter: Organism Value: Zea mays
  misc_feature: MA Experiment 20000534 PARAMETER Experiment Name: Zm_Hybrid_Pollen_P Parameter: Plant Line Value: 35A19
  misc_feature: MA Experiment 20000534 PARAMETER Experiment Name: Zm_Hybrid_Pollen_P Parameter: Tissue Value: Pollen vs. Aerial
agacacggaggtacaggagcgagggggaaagtgggatggtagtgggggcatcatcggtgtccggcgccgcggcttccggaggtacctctggtacggctccgccgcggaaggggaagtcgtgcaagggctgcctttactactcgtcagtgctcaagtcccgcggctacaacccaatctgcgttgggatcccccgttccatcccccaagttcctaactacgtggtggatgagcctaaggaggacgcgacagcgcaggggcatgatctcaggcggttcaggtacgggtgcgcgggttactccatattcgtgaacagggacggccaaggtggtgagggcgagggcaagacgttgttgccgtattgcaggggcctcgagttattggtggacagcagattggtcgagagaaaaccatccgcagctgaacaagctccagcacatgttacaaaggatgcagctaccacccgctctcaccaacaaggacaacagagacctgcgaacttgtcgaggcaggaattcttggagaggtttaagaagagtgctggactggtcgcttcaggggtcgcgaagaatctaaacaaaacggccaattatatcaaggaaaatattcatgacatattgtaccacgatcgtcgcccaccaaagtagtagccatgccgacttgctgagtcccagaacgaagcacagcagccccagctccgtcactgattatgcaaatggagccttccaggattccaacttcactcgctttacttgcataatcttgtaatttagggctgcatatgtacatgcaatttaacttgctgcttgtttgaagcggaaaatcagatttcgtttggtgtaatcggaagacgatgatattggttgaattttgactgaaaattcgagaaacagcatttctcgatg

SEQ ID NO: 12915 - protein, 213 aa, Zea mays subsp. mays
  peptide (1)..(213): Ceres Seq. ID no. 12414822
  misc_feature (36)..(213): Homolog of NCBI NO: 15230397 NR Description: putative protein; protein id: At3g51100.1
TRRYRSEGESGMVVGASSVSGAAASGGTSGTAPPRKGKSCKGCLYYSSVLKSRGYNPICVGIPRSIPQVPNYVVDEPKEDATAQGHDLRRFRYGCAGYSIFVNRDGQGGEGEGKTLLPYCRGLELLVDSRLVERKPSAAEQAPAHVTKDAATTRSHQQGQQRPANLSRQEFLERFKKSAGLVASGVAKNLNKTANYIKENIHDILYHDRRPPK

SEQ ID NO: 12916 - protein, 202 aa, Zea mays subsp. mays
  peptide (1)..(202): Ceres Seq. ID no. 12414823
  misc_feature (25)..(202): Homolog of NCBI NO: 15230397 NR Description: putative protein; protein id: At3g51100.1
MVVGASSVSGAAASGGTSGTAPPRKGKSCKGCLYYSSVLKSRGYNPICVGIPRSIPQVPNYVVDEPKEDATAQGHDLRRFRYGCAGYSIFVNRDGQGGEGEGKTLLPYCRGLELLVDSRLVERKPSAAEQAPAHVTKDAATTRSHQQGQQRPANLSRQEFLERFKKSAGLVASGVAKNLNKTANYIKENIHDILYHDRRPPK

SEQ ID NO: 12917 - DNA, 2305 bp, Zea mays subsp. mays
  misc_feature (1)..(2305): Ceres Seq. ID no. 12374507
  misc_feature: MA Experiment ID: 108522 Result: Down-regulated in Transcription
  misc_feature: MA Experiment 108522 PARAMETER Experiment Name: Zm_42deg_Heat_P Parameter: Age (day) Value: 8
  misc_feature: MA Experiment 108522 PARAMETER Experiment Name: Zm_42deg_Heat_P Parameter: Organism Value: Zea mays
  misc_feature: MA Experiment 108522 PARAMETER Experiment Name: Zm_42deg_Heat_P Parameter: Plant Line Value: 35A19
  misc_feature: MA Experiment 108522 PARAMETER Experiment Name: Zm_42deg_Heat_P Parameter: Temperature (deg C) Value: 42 vs. 22
  misc_feature: MA Experiment 108522 PARAMETER Experiment Name: Zm_42deg_Heat_P Parameter: Timepoint (hr) Value: 1
  misc_feature: MA Experiment 108522 PARAMETER Experiment Name: Zm_42deg_Heat_P Parameter: Tissue Value: Aerial
  misc_feature: MA Experiment ID: 108527 Result: Down-regulated in Transcription
  misc_feature: MA Experiment 108527 PARAMETER Experiment Name: Zm_5mM_NO_P Parameter: Age (day) Value: 8
  misc_feature: MA Experiment 108527 PARAMETER Experiment Name: Zm_5mM_NO_P Parameter: Organism Value: Zea mays
  misc_feature: MA Experiment 108527 PARAMETER Experiment Name: Zm_5mM_NO_P Parameter: Plant Line Value: 35A19
  misc_feature: MA Experiment 108527 PARAMETER Experiment Name: Zm_5mM_NO_P Parameter: Timepoint (hr) Value: 6
  misc_feature: MA Experiment 108527 PARAMETER Experiment Name: Zm_5mM_NO_P Parameter: Tissue Value: Aerial
  misc_feature: MA Experiment 108527 PARAMETER Experiment Name: Zm_5mM_NO_P Parameter: Treatment Value: 5mM NO vs. No Treatment
  misc_feature: MA Experiment ID: 108528 Result: Up-regulated in Transcription
  misc_feature: MA Experiment 108528 PARAMETER Experiment Name: Zm_Imbibed_Seeds_P Parameter: Age (day) Value: 5 vs. 2
  misc_feature: MA Experiment 108528 PARAMETER Experiment Name: Zm_Imbibed_Seeds_P Parameter: Organism Value: Zea mays
  misc_feature: MA Experiment 108528 PARAMETER Experiment Name: Zm_Imbibed_Seeds_P Parameter: Plant Line Value: 35A19
  misc_feature: MA Experiment 108528 PARAMETER Experiment Name: Zm_Imbibed_Seeds_P Parameter: Tissue Value: Aerial vs. Embryo
  misc_feature: MA Experiment ID: 108545 Result: Up-regulated in Transcription
  misc_feature: MA Experiment 108545 PARAMETER Experiment Name: Zm_Imbibed_Seeds_P Parameter: Age (day) Value: 3 vs. 2
  misc_feature: MA Experiment 108545 PARAMETER Experiment Name: Zm_Imbibed_Seeds_P Parameter: Organism Value: Zea mays
  misc_feature: MA Experiment 108545 PARAMETER Experiment Name: Zm_Imbibed_Seeds_P Parameter: Plant Line Value: 35A19
  misc_feature: MA Experiment 108545 PARAMETER Experiment Name: Zm_Imbibed_Seeds_P Parameter: Tissue Value: Aerial vs. Embryo
  misc_feature: MA Experiment ID: 108547 Result: Up-regulated in Transcription
  misc_feature: MA Experiment 108547 PARAMETER Experiment Name: Zm_Imbibed_Seeds_P Parameter: Age (day) Value: 4 vs. 2
  misc_feature: MA Experiment 108547 PARAMETER Experiment Name: Zm_Imbibed_Seeds_P Parameter: Organism Value: Zea mays
  misc_feature: MA Experiment 108547 PARAMETER Experiment Name: Zm_Imbibed_Seeds_P Parameter: Plant Line Value: 35A19
  misc_feature: MA Experiment 108547 PARAMETER Experiment Name: Zm_Imbibed_Seeds_P Parameter: Tissue Value: Aerial vs. Embryo
  misc_feature: MA Experiment ID: 108556 Result: Down-regulated in Transcription
  misc_feature: MA Experiment 108556 PARAMETER Experiment Name: Zm_Drought_P Parameter: Age (day) Value: 9
  misc_feature: MA Experiment 108556 PARAMETER Experiment Name: Zm_Drought_P Parameter: Organism Value: Zea mays
  misc_feature: MA Experiment 108556 PARAMETER Experiment Name: Zm_Drought_P Parameter: Plant Line Value: 35A19
  misc_feature: MA Experiment 108556 PARAMETER Experiment Name: Zm_Drought_P Parameter: Timepoint (hr) Value: 24
  misc_feature: MA Experiment 108556 PARAMETER Experiment Name: Zm_Drought_P Parameter: Tissue Value: Aerial
  misc_feature: MA Experiment 108556 PARAMETER Experiment Name: Zm_Drought_P Parameter: Treatment Value: Drought vs. No Drought
  misc_feature: MA Experiment ID: 108559 Result: Down-regulated in Transcription
  misc_feature: MA Experiment 108559 PARAMETER Experiment Name: Zm_5mM_NO_P Parameter: Age (day) Value: 8
  misc_feature: MA Experiment 108559 PARAMETER Experiment Name: Zm_5mM_NO_P Parameter: Organism Value: Zea mays
  misc_feature: MA Experiment 108559 PARAMETER Experiment Name: Zm_5mM_NO_P Parameter: Plant Line Value: 35A19
  misc_feature: MA Experiment 108559 PARAMETER Experiment Name: Zm_5mM_NO_P Parameter: Timepoint (hr) Value: 12
  misc_feature: MA Experiment 108559 PARAMETER Experiment Name: Zm_5mM_NO_P Parameter: Tissue Value: Aerial
  misc_feature: MA Experiment 108559 PARAMETER Experiment Name: Zm_5mM_NO_P Parameter: Treatment Value: 5mM NO vs. No Treatment
  misc_feature: MA Experiment ID: 108597 Result: Down-regulated in Transcription
  misc_feature: MA Experiment 108597 PARAMETER Experiment Name: Zm_100uM_ABA_P Parameter: Age (day) Value: 9
  misc_feature: MA Experiment 108597 PARAMETER Experiment Name: Zm_100uM_ABA_P Parameter: Organism Value: Zea mays
  misc_feature: MA Experiment 108597 PARAMETER Experiment Name: Zm_100uM_ABA_P Parameter: Plant Line Value: 35A19
  misc_feature: MA Experiment 108597 PARAMETER Experiment Name: Zm_100uM_ABA_P Parameter: Timepoint (hr) Value: 24
  misc_feature: MA Experiment 108597 PARAMETER Experiment Name: Zm_100uM_ABA_P Parameter: Tissue Value: Aerial
  misc_feature: MA Experiment 108597 PARAMETER Experiment Name: Zm_100uM_ABA_P Parameter: Treatment Value: 100uM ABA vs. No Treatment
  misc_feature: MA Experiment ID: 20000478 Result: Down-regulated in Transcription
  misc_feature: MA Experiment 20000478 PARAMETER Experiment Name: Zm_5mM_SA_P Parameter: Age (day) Value: 11
  misc_feature: MA Experiment 20000478 PARAMETER Experiment Name: Zm_5mM_SA_P Parameter: Organism Value: Zea mays
  misc_feature: MA Experiment 20000478 PARAMETER Experiment Name: Zm_5mM_SA_P Parameter: Plant Line Value: 35A19
  misc_feature: MA Experiment 20000478 PARAMETER Experiment Name: Zm_5mM_SA_P Parameter: Timepoint (hr) Value: 72
  misc_feature: MA Experiment 20000478 PARAMETER Experiment Name: Zm_5mM_SA_P Parameter: Tissue Value: Aerial
  misc_feature: MA Experiment 20000478 PARAMETER Experiment Name: Zm_5mM_SA_P Parameter: Treatment Value: 5mM SA vs. No Treatment
  misc_feature: MA Experiment ID: 20000480 Result: Down-regulated in Transcription
  misc_feature: MA Experiment 20000480 PARAMETER Experiment Name: Zm_Drought_P Parameter: Age (day) Value: 11
  misc_feature: MA Experiment 20000480 PARAMETER Experiment Name: Zm_Drought_P Parameter: Organism Value: Zea mays
  misc_feature: MA Experiment 20000480 PARAMETER Experiment Name: Zm_Drought_P Parameter: Plant Line Value: 35A19
  misc_feature: MA Experiment 20000480 PARAMETER Experiment Name: Zm_Drought_P Parameter: Timepoint (hr) Value: 72
  misc_feature: MA Experiment 20000480 PARAMETER Experiment Name: Zm_Drought_P Parameter: Tissue Value: Aerial
  misc_feature: MA Experiment 20000480 PARAMETER Experiment Name: Zm_Drought_P Parameter: Treatment Value: Drought vs. No Drought
  misc_feature: MA Experiment ID: 20000492 Result: Down-regulated in Transcription
  misc_feature: MA Experiment 20000492 PARAMETER Experiment Name: Zm_Hybrid_Seed_Dev_P Parameter: DAP Value: 12
  misc_feature: MA Experiment 20000492 PARAMETER Experiment Name: Zm_Hybrid_Seed_Dev_P Parameter: Organism Value: Zea mays
  misc_feature: MA Experiment 20000492 PARAMETER Experiment Name: Zm_Hybrid_Seed_Dev_P Parameter: Plant Line Value: 35A19
  misc_feature: MA Experiment 20000492 PARAMETER Experiment Name: Zm_Hybrid_Seed_Dev_P Parameter: Tissue Value: Fert Kernel vs. Unfert Floret
  misc_feature: MA Experiment ID: 20000535 Result: Down-regulated in Transcription
  misc_feature: MA Experiment 20000535 PARAMETER Experiment Name: Zm_Hybrid_Seed_Dev_P Parameter: DAP Value: 30 vs. 12
  misc_feature: MA Experiment 20000535 PARAMETER Experiment Name: Zm_Hybrid_Seed_Dev_P Parameter: Organism Value: Zea mays
  misc_feature: MA Experiment 20000535 PARAMETER Experiment Name: Zm_Hybrid_Seed_Dev_P Parameter: Plant Line Value: 35A19
  misc_feature: MA Experiment 20000535 PARAMETER Experiment Name: Zm_Hybrid_Seed_Dev_P Parameter: Tissue Value: Embryo vs. Unfert Floret
acacgacatctcgtgtctctgttgggagcttcttcaacatctcgtctctctcatcctccgacgccatccgctcccgccccggccgagccgcgcgttgtgtatggattccaaaagcaatcatacaggggctatggcgaggccttacaaacctaagaatatcctcattacaggagctgctggttttatcgcctcccatgtcgcaatccgcattaccaagaagtaccccgattacaagattatcgtccttgacaaacttgactactgctctaatctgaagaacctgcttcctgtgagctcatcaccaaacttcaagtttgtgaagggtgatattgcaagtgttgatcttgtcaacttccttcttgtcacagagaacattgataccataatgcacttcgcggcccagacacatgtcgacaattcatttgggaattctttcgaatttaccaagaacaatatttatggtacacatgtacttcttgaggcctgcaggattagtggccagatcaagaggttcatccatgtcagcactgatgaggtctatggggagactgacgaggatgcagttgttggcaaccatgaagcatcacagctgcttcctacaaacccatatgcagccaccaaagcgggagcggagatgcttgtaatggcatatgggagatcctatggactgccagttatcactactcggggaaacaatgtctatggcccaaatcagttccctgagaagcttatcccaaagttcattctcttggccatgagaggggagcccctccctatccatggtgatggagtcaatgttcgtagctacctctattgtgaggatgttgcggaggcatttgaggtcattcttcatcatggagaagttggacatgtttataatattggaacaaaaagggagaggacagtgcttgatgtggcaaaagatgtttgcagactcttcaatcttgaacctgacaaagtcatcatgtttgtcgagaacagacctttcaatgaccagaggtatttcttggacgatgagaagctcaagagccttggatgggctgagcgcaccccatgggaagaaggcttaaaaaaggcaatggagtggtatgtagcaaaatctgattattggggtgatgtttctggggccttactgcctcatccaaggacattgatgatgccagggtgcgagggctcagaggagattaaaggaatactcagccggtttaataacattcaaacaaaggtcggttcaacatcagataatgctccagaaccgcatgccttcaagttcttgatatatggcaggacaggatggatcggcggacttcttgggaaaatatgtgagaagaaaggaattccgtatgaatatggaaatggccgcttgcaagagcgttcttcactagtcctagacatccaaactattaagccaacacatgtcttcaatgccgctggtgtgactggaaggcccaatgttgactggtgtgaatcgcacaagccggacaccatccgtaccaatgttgtgggcaccttgaatctagcagatgtatgtaggaagcatggcttattgatgatgaactatgccactgggtgcatatttgaatacgatgcacatcatcctgaagggtcaggtatcggcttcaaagaggaagatacaccaaattttactggttcgttctactcgaagacgaaggcaatggtcgaggaattattgaaggagtatgagaacgtctgcactctgcgagttcggatgccgatatcctctgacctcagcaacccgcggaacttcgtgacaaagatcagccgttacaacaaggtggtgaacatccccaacagcatgacgatattggacgaactcctgcccatctcagtggagatggcgaagaggaacctgcggggcatctataacttcaccaaccccggcgtcgtcagccacaacgagatcctagagatgtacaagcagtacatcgaccctagcttcaagtggacaaacttcaccctcgaggagcaggcgaaggtcatcgttgctccgcgaagcaacaacgagatggacgcaaccaagctgaagaacgagttccccgagctgctgtcgatcaaggactctttgatcaagtacgtctttgagcccaacagaaaggtgcccacagactgaagtccgaagggctggcacagctgataccgtacaacacagcaaccattagtgttagactatgtgtgtgggccagcactactttacttttgggctgtcggtctattagggttagagtcctgtgagtctatatattgtacctcatctcttatacaatacatttttgggctgcgagcc

SEQ ID NO: 12918 - protein, 709 aa, Zea mays subsp. mays
  peptide (1)..(709): Ceres Seq. ID no. 12374508
  misc_feature (53)..(363): Pfam Name: NAD dependent epimerase/dehydratase family Pfam Description: NAD dependent epimerase/dehydratase family
  misc_feature (48)..(705): Homolog of NCBI NO: 15218420 NR Description: dTDP-glucose 4,6-dehydratase, putative; protein At1g78570.1, supported by cDNA: gi_14596090, supported by cDNA: [Arabidopsis thaliana] >gi|25406555|pir||C96814 hypothetical
  misc_feature (48)..(705): Homolog of NCBI NO: 15231926 NR Description: dTDP-glucose 4,6-dehydratase, putative; protein At3g14790.1, supported by cDNA: gi_19310442 [Arabidopsis
  misc_feature (48)..(705): Homolog of NCBI NO: 25405640 NR Description: hypothetical protein F22G10.13 [imported] -
  misc_feature (212)..(705): Homolog of NCBI NO: 18404494 NR Description: dTDP-D-glucose 4,6-dehydratase, putative; protein At1g53500.1, supported by cDNA: gi_15081768 [Arabidopsis
  misc_feature (212)..(705): Homolog of NCBI NO: 15081769 NR Description: At1g53500/F22G10_13 [Arabidopsis thaliana]
  misc_feature (415)..(705): Homolog of NCBI NO: 18407710 NR Description: expressed protein; protein id: At1g63000.1, by cDNA: 41505., supported by cDNA: gi_12083297, supported by
  misc_feature (421)..(705): Homolog of NCBI NO: 21593701 NR Description: unknown [Arabidopsis thaliana]
  misc_feature (415)..(705): Homolog of NCBI NO: 14423536 NR Description: Unknown protein [Arabidopsis thaliana]
  misc_feature (439)..(707): Homolog of NCBI NO: 2982303 NR Description: hypothetical protein [Picea mariana]
  misc_feature (48)..(357): Homolog of NCBI NO: 17531421 NR Description: 4 6-dehydratase (71.1 kD) [Caenorhabditis elegans]
HDISCLCWELLQHLVSLILRRHPLPPRPSRALCMDSKSNHTGAMARPYKPKNILITGAAGFIASHVAIRITKKYPDYKIIVLDKLDYCSNLKNLLPVSSSPNFKFVKGDIASVDLVNFLLVTENIDTIMHFAAQTHVDNSFGNSFEFTKNNIYGTHVLLEACRISGQIKRFIHVSTDEVYGETDEDAVVGNHEASQLLPTNPYAATKAGAEMLVMAYGRSYGLPVITTRGNNVYGPNQFPEKLIPKFILLAMRGEPLPIHGDGVNVRSYLYCEDVAEAFEVILHHGEVGHVYNIGTKRERTVLDVAKDVCRLFNLEPDKVIMFVENRPFNDQRYFLDDEKLKSLGWAERTPWEEGLKKAMEWYVAKSDYWGDVSGALLPHPRTLMMPGCEGSEEIKGILSRFNNIQTKVGSTSDNAPEPHAFKFLIYGRTGWIGGLLGKICEKKGIPYEYGNGRLQERSSLVLDIQTIKPTHVFNAAGVTGRPNVDWCESHKPDTIRTNVVGTLNLADVCRKHGLLMMNYATGCIFEYDAHHPEGSGIGFKEEDTPNFTGSFYSKTKAMVEELLKEYENVCTLRVRMPISSDLSNPRNFVTKISRYNKVVNIPNSMTILDELLPISVEMAKRNLRGIYNFTNPGVVSHNEILEMYKQYIDPSFKWTNFTLEEQAKVIVAPRSNNEMDATKLKNEFPELLSIKDSLIKYVFEPNRKVPTD

SEQ ID NO: 12919 - protein, 676 aa, Zea mays subsp. mays
  peptide (1)..(676): Ceres Seq. ID no. 12374509
  misc_feature (20)..(330): Pfam Name: NAD dependent epimerase/dehydratase family Pfam Description: NAD dependent epimerase/dehydratase family
  misc_feature (15)..(672): Homolog of NCBI NO: 15218420 NR Description: dTDP-glucose 4,6-dehydratase, putative; protein At1g78570.1, supported by cDNA: gi_14596090, supported by cDNA: [Arabidopsis thaliana] >gi|25406555|pir||C96814 hypothetical
  misc_feature (15)..(672): Homolog of NCBI NO: 15231926 NR Description: dTDP-glucose 4,6-dehydratase, putative; protein At3g14790.1, supported by cDNA: gi_19310442 [Arabidopsis
  misc_feature (15)..(672): Homolog of NCBI NO: 25405640 NR Description: hypothetical protein F22G10.13 [imported] -
  misc_feature (179)..(672): Homolog of NCBI NO: 18404494 NR Description: dTDP-D-glucose 4,6-dehydratase, putative; protein At1g53500.1, supported by cDNA: gi_15081768 [Arabidopsis
  misc_feature (179)..(672): Homolog of NCBI NO: 15081769 NR Description: At1g53500/F22G10_13 [Arabidopsis thaliana]
  misc_feature (382)..(672): Homolog of NCBI NO: 18407710 NR Description: expressed protein; protein id: At1g63000.1, by cDNA: 41505., supported by cDNA: gi_12083297, supported by
  misc_feature (388)..(672): Homolog of NCBI NO: 21593701 NR Description: unknown [Arabidopsis thaliana]
  misc_feature (382)..(672): Homolog of NCBI NO: 14423536 NR Description: Unknown protein [Arabidopsis thaliana]
  misc_feature (406)..(674): Homolog of NCBI NO: 2982303 NR Description: hypothetical protein [Picea mariana]
  misc_feature (15)..(324): Homolog of NCBI NO: 17531421 NR Description: 4 6-dehydratase (71.1 kD) [Caenorhabditis elegans]
MDSKSNHTGAMARPYKPKNILITGAAGFIASHVAIRITKKYPDYKIIVLDKLDYCSNLKNLLPVSSSPNFKFVKGDIASVDLVNFLLVTENIDTIMHFAAQTHVDNSFGNSFEFTKNNIYGTHVLLEACRISGQIKRFIHVSTDEVYGETDEDAVVGNHEASQLLPTNPYAATKAGAEMLVMAYGRSYGLPVITTRGNNVYGPNQFPEKLIPKFILLAMRGEPLPIHGDGVNVRSYLYCEDVAEAFEVILHHGEVGHVYNIGTKRERTVLDVAKDVCRLFNLEPDKVIMFVENRPFNDQRYFLDDEKLKSLGWAERTPWEEGLKKAMEWYVAKSDYWGDVSGALLPHPRTLMMPGCEGSEEIKGILSRFNNIQTKVGSTSDNAPEPHAFKFLIYGRTGWIGGLLGKICEKKGIPYEYGNGRLQERSSLVLDIQTIKPTHVFNAAGVTGRPNVDWCESHKPDTIRTNVVGTLNLADVCRKHGLLMMNYATGCIFEYDAHHPEGSGIGFKEEDTPNFTGSFYSKTKAMVEELLKEYENVCTLRVRMPISSDLSNPRNFVTKISRYNKVVNIPNSMTILDELLPISVEMAKRNLRGIYNFTNPGVVSHNEILEMYKQYIDPSFKWTNFTLEEQAKVIVAPRSNNEMDATKLKNEFPELLSIKDSLIKYVFEPNRKVPTD

SEQ ID NO: 12920 - protein, 666 aa, Zea mays subsp. mays
  peptide (1)..(666): Ceres Seq. ID no. 12374510
  misc_feature (10)..(320): Pfam Name: NAD dependent epimerase/dehydratase family Pfam Description: NAD dependent epimerase/dehydratase family
  misc_feature (5)..(662): Homolog of NCBI NO: 15218420 NR Description: dTDP-glucose 4,6-dehydratase, putative; protein At1g78570.1, supported by cDNA: gi_14596090, supported by cDNA: [Arabidopsis thaliana] >gi|25406555|pir||C96814 hypothetical
  misc_feature (5)..(662): Homolog of NCBI NO: 15231926 NR Description: dTDP-glucose 4,6-dehydratase, putative; protein At3g14790.1, supported by cDNA: gi_19310442 [Arabidopsis
  misc_feature (5)..(662): Homolog of NCBI NO: 25405640 NR Description: hypothetical protein F22G10.13 [imported] -
  misc_feature (169)..(662): Homolog of NCBI NO: 18404494 NR Description: dTDP-D-glucose 4,6-dehydratase, putative; protein At1g53500.1, supported by cDNA: gi_15081768 [Arabidopsis
  misc_feature (169)..(662): Homolog of NCBI NO: 15081769 NR Description: At1g53500/F22G10_13 [Arabidopsis thaliana]
  misc_feature (372)..(662): Homolog of NCBI NO: 18407710 NR Description: expressed protein; protein id: At1g63000.1, by cDNA: 41505., supported by cDNA: gi_12083297, supported by
  misc_feature (378)..(662): Homolog of NCBI NO: 21593701 NR Description: unknown [Arabidopsis thaliana]
  misc_feature (372)..(662): Homolog of NCBI NO: 14423536 NR Description: Unknown protein [Arabidopsis thaliana]
  misc_feature (396)..(664): Homolog of NCBI NO: 2982303 NR Description: hypothetical protein [Picea mariana]
  misc_feature (5)..(314): Homolog of NCBI NO: 17531421 NR Description: 4 6-dehydratase (71.1 kD) [Caenorhabditis elegans]
MARPYKPKNILITGAAGFIASHVAIRITKKYPDYKIIVLDKLDYCSNLKNLLPVSSSPNFKFVKGDIASVDLVNFLLVTENIDTIMHFAAQTHVDNSFGNSFEFTKNNIYGTHVLLEACRISGQIKRFIHVSTDEVYGETDEDAVVGNHEASQLLPTNPYAATKAGAEMLVMAYGRSYGLPVITTRGNNVYGPNQFPEKLIPKFILLAMRGEPLPIHGDGVNVRSYLYCEDVAEAFEVILHHGEVGHVYNIGTKRERTVLDVAKDVCRLFNLEPDKVIMFVENRPFNDQRYFLDDEKLKSLGWAERTPWEEGLKKAMEWYVAKSDYWGDVSGALLPHPRTLMMPGCEGSEEIKGILSRFNNIQTKVGSTSDNAPEPHAFKFLIYGRTGWIGGLLGKICEKKGIPYEYGNGRLQERSSLVLDIQTIKPTHVFNAAGVTGRPNVDWCESHKPDTIRTNVVGTLNLADVCRKHGLLMMNYATGCIFEYDAHHPEGSGIGFKEEDTPNFTGSFYSKTKAMVEELLKEYENVCTLRVRMPISSDLSNPRNFVTKISRYNKVVNIPNSMTILDELLPISVEMAKRNLRGIYNFTNPGVVSHNEILEMYKQYIDPSFKWTNFTLEEQAKVIVAPRSNNEMDATKLKNEFPELLSIKDSLIKYVFEPNRKVPTD

SEQ ID NO: 12921 - DNA, 812 bp, Zea mays subsp. mays
  misc_feature (1)..(812): Ceres Seq. ID no. 13499119
  misc_feature: MA Experiment ID: 108534 Result: Up-regulated in Transcription
  misc_feature: MA Experiment 108534 PARAMETER Experiment Name: Zm_4deg_Cold_P Parameter: Age (hr) Value: 8
  misc_feature: MA Experiment 108534 PARAMETER Experiment Name: Zm_4deg_Cold_P Parameter: Organism Value: Zea mays
  misc_feature: MA Experiment 108534 PARAMETER Experiment Name: Zm_4deg_Cold_P Parameter: Plant Line Value: 35A19
  misc_feature: MA Experiment 108534 PARAMETER Experiment Name: Zm_4deg_Cold_P Parameter: Temperature (deg C) Value: 4 vs. 22
  misc_feature: MA Experiment 108534 PARAMETER Experiment Name: Zm_4deg_Cold_P Parameter: Timepoint (hr) Value: 6
  misc_feature: MA Experiment 108534 PARAMETER Experiment Name: Zm_4deg_Cold_P Parameter: Tissue Value: Aerial
  misc_feature: MA Experiment ID: 108535 Result: Down-regulated in Transcription
  misc_feature: MA Experiment 108535 PARAMETER Experiment Name: Zm_Meristem_P Parameter: Age (day) Value: 8
  misc_feature: MA Experiment 108535 PARAMETER Experiment Name: Zm_Meristem_P Parameter: Organism Value: Zea mays
  misc_feature: MA Experiment 108535 PARAMETER Experiment Name: Zm_Meristem_P Parameter: Plant Line Value: 35A19
  misc_feature: MA Experiment 108535 PARAMETER Experiment Name: Zm_Meristem_P Parameter: Tissue Value: Root Meristem vs. Above Root Meristem
  misc_feature: MA Experiment ID: 108543 Result: Down-regulated in Transcription
  misc_feature: MA Experiment ID: 108556 Result: Down-regulated in Transcription
  misc_feature: MA Experiment 108556 PARAMETER Experiment Name: Zm_Drought_P Parameter: Age (day) Value: 9
  misc_feature: MA Experiment 108556 PARAMETER Experiment Name: Zm_Drought_P Parameter: Organism Value: Zea mays
  misc_feature: MA Experiment 108556 PARAMETER Experiment Name: Zm_Drought_P Parameter: Plant Line Value: 35A19
  misc_feature: MA Experiment 108556 PARAMETER Experiment Name: Zm_Drought_P Parameter: Timepoint (hr) Value: 24
  misc_feature: MA Experiment 108556 PARAMETER Experiment Name: Zm_Drought_P Parameter: Tissue Value: Aerial
  misc_feature: MA Experiment 108556 PARAMETER Experiment Name: Zm_Drought_P Parameter: Treatment Value: Drought vs. No Drought
  misc_feature: MA Experiment ID: 108689 Result: Down-regulated in Transcription
  misc_feature: MA Experiment 108689 PARAMETER Experiment Name: Zm_Drought_Roots_P Parameter: Age (day) Value: 9
  misc_feature: MA Experiment 108689 PARAMETER Experiment Name: Zm_Drought_Roots_P Parameter: Organism Value: Zea mays
  misc_feature: MA Experiment 108689 PARAMETER Experiment Name: Zm_Drought_Roots_P Parameter: Plant Line Value: 35A19
  misc_feature: MA Experiment 108689 PARAMETER Experiment Name: Zm_Drought_Roots_P Parameter: Timepoint (hr) Value: 24
  misc_feature: MA Experiment 108689 PARAMETER Experiment Name: Zm_Drought_Roots_P Parameter: Tissue Value: Roots
  misc_feature: MA Experiment 108689 PARAMETER Experiment Name: Zm_Drought_Roots_P Parameter: Treatment Value: Drought vs. No Drought
ccagcctcgccgccccaccaccccagcattgccttaccttgccttgccttgccctgccctccattccacctccacctcgccgcccaaatccccccacccaacaatcccccatggggtcgcaggccatcgaggcgcaccgcgcgggcgcggaggtgtaccgcggcgcggcgctgtgcgcggagaagtcgacggagctgctggcagaggcgcacctcccgctgggcctgctgccgctggccgacatggaggaggtcggctacaaccgcgccacgggcttcgtgtggctgcgccagaggaagtcgctcacgcacacgttccgcccgatcgcgcgccaggtctcgtacgccgccgaggtcaccgccttcgtggaggaccggcggatgaggcgcatgaccggggtcaagaccaaggagctcctcatctgggtcaccctctccgacatgttcgtcgacagggacgacccctccaagatcaccttcaagacgcccaccgggctcggcaggacctaccccgtctccgccttcgctaaggaaggcgccggtgacgacggcgcggcggccaagcacaaggatgatgcccccgccccgaccgccgccggtaaggctgctgccagcaagtgaggtgcgcggcgtccggagctttttaccttgccgtagtcgccatacttgcctccccaataatggcgtttgtaccccctctacctgcttcaaattagtgtgttttatgaatggaaacgaccatccaactttccatccgtccttgcaatgtgtcacggcgggatgtttttactacacatcagctttaccagttcc

SEQ ID NO: 12922 - protein, 205 aa, Zea mays subsp. mays
  peptide (1)..(205): Ceres Seq. ID no. 13499120
  misc_feature (40)..(183): Pfam Name: Protein of unknown function, DUF538 Pfam Description: Protein of unknown function, DUF538
  misc_feature (37)..(203): Homolog of NCBI NO: 34903866 NR Description: unnamed protein product [Oryza sativa (japonica group)] >gi|8096574|dbj|BAA96147.1| unnamed protein product
  misc_feature (37)..(175): Homolog of NCBI NO: 34915410 NR Description: hypothetical protein~similar to Arabidopsis
  misc_feature (37)..(175): Homolog of NCBI NO: 34915422 NR Description: hypothetical protein~similar to Arabidopsis
  misc_feature (37)..(175): Homolog of NCBI NO: 33146557 NR Description: unknown protein [Oryza sativa (japonica
  misc_feature (37)..(175): Homolog of NCBI NO: 34915418 NR Description: hypothetical protein~similar to Arabidopsis
  misc_feature (37)..(175): Homolog of NCBI NO: 34915426 NR Description: hypothetical protein~similar to Arabidopsis
  misc_feature (37)..(177): Homolog of NCBI NO: 18422648 NR Description: expressed protein [Arabidopsis thaliana] gene_id:MPL12.1~unknown protein [Arabidopsis thaliana]
  misc_feature (43)..(205): Homolog of NCBI NO: 18391006 NR Description: expressed protein [Arabidopsis thaliana]
  misc_feature (42)..(175): Homolog of NCBI NO: 34915430 NR Description: hypothetical protein~similar to Arabidopsis
SLAAPPPQHCLTLPCLALPSIPPPPRRPNPPTQQSPMGSQAIEAHRAGAEVYRGAALCAEKSTELLAEAHLPLGLLPLADMEEVGYNRATGFVWLRQRKSLTHTFRPIARQVSYAAEVTAFVEDRRMRRMTGVKTKELLIWVTLSDMFVDRDDPSKITFKTPTGLGRTYPVSAFAKEGAGDDGAAAKHKDDAPAPTAAGKAAASK

SEQ ID NO: 12923 - protein, 175 aa, Zea mays subsp. mays
  peptide (1)..(175): Ceres Seq. ID no. 13499121
QPRRPTTPALPYLALPCPALHSTSTSPPKSPHPTIPHGVAGHRGAPRGRGGVPRRGAVRGEVDGAAGRGAPPAGPAAAGRHGGGRLQPRHGLRVAAPEEVAHAHVPPDRAPGLVRRRGHRLRGGPADEAHDRGQDQGAPHLGHPLRHVRRQGRPLQDHLQDAHRARQDLPRLRLR

SEQ ID NO: 12924 - protein, 169 aa, Zea mays subsp. mays
  peptide (1)..(169): Ceres Seq. ID no. 13499122
  misc_feature (4)..(147): Pfam Name: Protein of unknown function, DUF538 Pfam Description: Protein of unknown function, DUF538
  misc_feature (1)..(167): Homolog of NCBI NO: 34903866 NR Description: unnamed protein product [Oryza sativa (japonica group)] >gi|8096574|dbj|BAA96147.1| unnamed protein product
  misc_feature (1)..(139): Homolog of NCBI NO: 34915410 NR Description: hypothetical protein~similar to Arabidopsis
  misc_feature (1)..(139): Homolog of NCBI NO: 34915422 NR Description: hypothetical protein~similar to Arabidopsis
  misc_feature (1)..(139): Homolog of NCBI NO: 33146557 NR Description: unknown protein [Oryza sativa (japonica
  misc_feature (1)..(139): Homolog of NCBI NO: 34915418 NR Description: hypothetical protein~similar to Arabidopsis
  misc_feature (1)..(139): Homolog of NCBI NO: 34915426 NR Description: hypothetical protein~similar to Arabidopsis
  misc_feature (1)..(141): Homolog of NCBI NO: 18422648 NR Description: expressed protein [Arabidopsis thaliana] gene_id:MPL12.1~unknown protein [Arabidopsis thaliana]
  misc_feature (7)..(169): Homolog of NCBI NO: 18391006 NR Description: expressed protein [Arabidopsis thaliana]
  misc_feature (6)..(139): Homolog of NCBI NO: 34915430 NR Description: hypothetical protein~similar to Arabidopsis
MGSQAIEAHRAGAEVYRGAALCAEKSTELLAEAHLPLGLLPLADMEEVGYNRATGFVWLRQRKSLTHTFRPIARQVSYAAEVTAFVEDRRMRRMTGVKTKELLIWVTLSDMFVDRDDPSKITFKTPTGLGRTYPVSAFAKEGAGDDGAAAKHKDDAPAPTAAGKAAASK

SEQ ID NO: 12925 - DNA, 2006 bp, Zea mays subsp. mays
  misc_feature (1)..(2006): Ceres Seq. ID no. 13499123
  misc_feature: MA Experiment ID: 108527 Result: Down-regulated in Transcription
  misc_feature: MA Experiment 108527 PARAMETER Experiment Name: Zm_5mM_NO_P Parameter: Age (day) Value: 8
  misc_feature: MA Experiment 108527 PARAMETER Experiment Name: Zm_5mM_NO_P Parameter: Organism Value: Zea mays
  misc_feature: MA Experiment 108527 PARAMETER Experiment Name: Zm_5mM_NO_P Parameter: Plant Line Value: 35A19
  misc_feature: MA Experiment 108527 PARAMETER Experiment Name: Zm_5mM_NO_P Parameter: Timepoint (hr) Value: 6
  misc_feature: MA Experiment 108527 PARAMETER Experiment Name: Zm_5mM_NO_P Parameter: Tissue Value: Aerial
  misc_feature: MA Experiment 108527 PARAMETER Experiment Name: Zm_5mM_NO_P Parameter: Treatment Value: 5mM NO vs. No Treatment
  misc_feature: MA Experiment ID: 108528 Result: Up-regulated in Transcription
  misc_feature: MA Experiment 108528 PARAMETER Experiment Name: Zm_Imbibed_Seeds_P Parameter: Age (day) Value: 5 vs. 2
  misc_feature: MA Experiment 108528 PARAMETER Experiment Name: Zm_Imbibed_Seeds_P Parameter: Organism Value: Zea mays
  misc_feature: MA Experiment 108528 PARAMETER Experiment Name: Zm_Imbibed_Seeds_P Parameter: Plant Line Value: 35A19
  misc_feature: MA Experiment 108528 PARAMETER Experiment Name: Zm_Imbibed_Seeds_P Parameter: Tissue Value: Aerial vs. Embryo
  misc_feature: MA Experiment ID: 108529 Result: Down-regulated in Transcription
  misc_feature: MA Experiment 108529 PARAMETER Experiment Name: Zm_Imbibed_Seeds_P Parameter: Age (day) Value: 5 vs. 2
  misc_feature: MA Experiment 108529 PARAMETER Experiment Name: Zm_Imbibed_Seeds_P Parameter: Organism Value: Zea mays
  misc_feature: MA Experiment 108529 PARAMETER Experiment Name: Zm_Imbibed_Seeds_P Parameter: Plant Line Value: 35A19
  misc_feature: MA Experiment 108529 PARAMETER Experiment Name: Zm_Imbibed_Seeds_P Parameter: Tissue Value: Roots vs. Embryo
  misc_feature: MA Experiment ID: 108532 Result: Up-regulated in Transcription
  misc_feature: MA Experiment 108532 PARAMETER Experiment Name: Zm_20uM_KNO3_H-to-L_P Parameter: Age (day) Value: 11
  misc_feature: MA Experiment 108532 PARAMETER Experiment Name: Zm_20uM_KNO3_H-to-L_P Parameter: Organism Value: Zea mays
  misc_feature: MA Experiment 108532 PARAMETER Experiment Name: Zm_20uM_KNO3_H-to-L_P Parameter: Plant Line Value: 35A19
  misc_feature: MA Experiment 108532 PARAMETER Experiment Name: Zm_20uM_KNO3_H-to-L_P Parameter: Timepoint (hr) Value: 16
  misc_feature: MA Experiment 108532 PARAMETER Experiment Name: Zm_20uM_KNO3_H-to-L_P Parameter: Tissue Value: Roots
  misc_feature: MA Experiment 108532 PARAMETER Experiment Name: Zm_20uM_KNO3_H-to-L_P Parameter: Treatment Value: 20uM KNO3 vs. 60mM KNO3
  misc_feature: MA Experiment ID: 108534 Result: Up-regulated in Transcription
  misc_feature: MA Experiment 108534 PARAMETER Experiment Name: Zm_4deg_Cold_P Parameter: Age (hr) Value: 8
  misc_feature: MA Experiment 108534 PARAMETER Experiment Name: Zm_4deg_Cold_P Parameter: Organism Value: Zea mays
  misc_feature: MA Experiment 108534 PARAMETER Experiment Name: Zm_4deg_Cold_P Parameter: Plant Line Value: 35A19
  misc_feature: MA Experiment 108534 PARAMETER Experiment Name: Zm_4deg_Cold_P Parameter: Temperature (deg C) Value: 4 vs. 22
  misc_feature: MA Experiment 108534 PARAMETER Experiment Name: Zm_4deg_Cold_P Parameter: Timepoint (hr) Value: 6
  misc_feature: MA Experiment 108534 PARAMETER Experiment Name: Zm_4deg_Cold_P Parameter: Tissue Value: Aerial
  misc_feature: MA Experiment ID: 108535 Result: Down-regulated in Transcription
  misc_feature: MA Experiment 108535 PARAMETER Experiment Name: Zm_Meristem_P Parameter: Age (day) Value: 8
  misc_feature: MA Experiment 108535 PARAMETER Experiment Name: Zm_Meristem_P Parameter: Organism Value: Zea mays
  misc_feature: MA Experiment 108535 PARAMETER Experiment Name: Zm_Meristem_P Parameter: Plant Line Value: 35A19
  misc_feature: MA Experiment 108535 PARAMETER Experiment Name: Zm_Meristem_P Parameter: Tissue Value: Root Meristem vs. Above Root Meristem
  misc_feature: MA Experiment ID: 108543 Result: Down-regulated in Transcription
  misc_feature: MA Experiment ID: 108546 Result: Down-regulated in Transcription
  misc_feature: MA Experiment 108546 PARAMETER Experiment Name: Zm_Imbibed_Seeds_P Parameter: Age (day) Value: 3 vs. 2
  misc_feature: MA Experiment 108546 PARAMETER Experiment Name: Zm_Imbibed_Seeds_P Parameter: Organism Value: Zea mays
  misc_feature: MA Experiment 108546 PARAMETER Experiment Name: Zm_Imbibed_Seeds_P Parameter: Plant Line Value: 35A19
  misc_feature: MA Experiment 108546 PARAMETER Experiment Name: Zm_Imbibed_Seeds_P Parameter: Tissue Value: Roots vs. Embryo
  misc_feature: MA Experiment ID: 108547 Result: Up-regulated in Transcription
  misc_feature: MA Experiment 108547 PARAMETER Experiment Name: Zm_Imbibed_Seeds_P Parameter: Age (day) Value: 4 vs. 2
  misc_feature: MA Experiment 108547 PARAMETER Experiment Name: Zm_Imbibed_Seeds_P Parameter: Organism Value: Zea mays
  misc_feature: MA Experiment 108547 PARAMETER Experiment Name: Zm_Imbibed_Seeds_P Parameter: Plant Line Value: 35A19
  misc_feature: MA Experiment 108547 PARAMETER Experiment Name: Zm_Imbibed_Seeds_P Parameter: Tissue Value: Aerial vs. Embryo
  misc_feature: MA Experiment ID: 108548 Result: Up-regulated in Transcription
  misc_feature: MA Experiment 108548 PARAMETER Experiment Name: Zm_20uM_KNO3_H-to-L_P Parameter: Age (day) Value: 11
  misc_feature: MA Experiment 108548 PARAMETER Experiment Name: Zm_20uM_KNO3_H-to-L_P Parameter: Organism Value: Zea mays
  misc_feature: MA Experiment 108548 PARAMETER Experiment Name: Zm_20uM_KNO3_H-to-L_P Parameter: Plant Line Value: 35A19
  misc_feature: MA Experiment 108548 PARAMETER Experiment Name: Zm_20uM_KNO3_H-to-L_P Parameter: Timepoint (hr) Value: 4
  misc_feature: MA Experiment 108548 PARAMETER Experiment Name: Zm_20uM_KNO3_H-to-L_P Parameter: Tissue Value: Roots
  misc_feature: MA Experiment 108548 PARAMETER Experiment Name: Zm_20uM_KNO3_H-to-L_P Parameter: Treatment Value: 20uM KNO3 vs. 60mM KNO3
  misc_feature: MA Experiment ID: 108559 Result: Down-regulated in Transcription
  misc_feature: MA Experiment 108559 PARAMETER Experiment Name: Zm_5mM_NO_P Parameter: Age (day) Value: 8
  misc_feature: MA Experiment 108559 PARAMETER Experiment Name: Zm_5mM_NO_P Parameter: Organism Value: Zea mays
  misc_feature: MA Experiment 108559 PARAMETER Experiment Name: Zm_5mM_NO_P Parameter: Plant Line Value: 35A19
  misc_feature: MA Experiment 108559 PARAMETER Experiment Name: Zm_5mM_NO_P Parameter: Timepoint (hr) Value: 12
  misc_feature: MA Experiment 108559 PARAMETER Experiment Name: Zm_5mM_NO_P Parameter: Tissue Value: Aerial
  misc_feature: MA Experiment 108559 PARAMETER Experiment Name: Zm_5mM_NO_P Parameter: Treatment Value: 5mM NO vs. No Treatment
  misc_feature: MA Experiment ID: 108688 Result: Down-regulated in Transcription
  misc_feature: MA Experiment 108688 PARAMETER Experiment Name: Zm_Embryos-Flowers__P Parameter: Tissue Value: Immature Flowers vs. Aerial+
  misc_feature: MA Experiment ID: 20000492 Result: Down-regulated in Transcription
  misc_feature: MA Experiment 20000492 PARAMETER Experiment Name: Zm_Hybrid_Seed_Dev_P Parameter: DAP Value: 12
  misc_feature: MA Experiment 20000492 PARAMETER Experiment Name: Zm_Hybrid_Seed_Dev_P Parameter: Organism Value: Zea mays
  misc_feature: MA Experiment 20000492 PARAMETER Experiment Name: Zm_Hybrid_Seed_Dev_P Parameter: Plant Line Value: 35A19
  misc_feature: MA Experiment 20000492 PARAMETER Experiment Name: Zm_Hybrid_Seed_Dev_P Parameter: Tissue Value: Fert Kernel vs. Unfert Floret
  misc_feature: MA Experiment ID: 20000535 Result: Down-regulated in Transcription
  misc_feature: MA Experiment 20000535 PARAMETER Experiment Name: Zm_Hybrid_Seed_Dev_P Parameter: DAP Value: 30 vs. 12
  misc_feature: MA Experiment 20000535 PARAMETER Experiment Name: Zm_Hybrid_Seed_Dev_P Parameter: Organism Value: Zea mays
  misc_feature: MA Experiment 20000535 PARAMETER Experiment Name: Zm_Hybrid_Seed_Dev_P Parameter: Plant Line Value: 35A19
  misc_feature: MA Experiment 20000535 PARAMETER Experiment Name: Zm_Hybrid_Seed_Dev_P Parameter: Tissue Value: Embryo vs. Unfert Floret
accgatcgcggggccgatcgagtctgctgaagcctcgcctcgcctcgcagaagaagcagcgtgagtaaaaaacccgcagggtgcagacgaaaacctcgtccgtttccgtcgtcttcctcctccctccgtctcccttcacccggcctcggtgggtccgctccccagccacgcgccgctctcttatttaaccccggccccggcctccgctccgccactcgcgcacccatcacaccccctaaccactccacctccctcagcagccctcacggccactacccactgcggctgtaccacctgtacggctgcactgtccgtcgatcggctttgcaccacacgtccgcgcgctcgctccgtcggtgtcggtagccatggcgctggcggggacgggggtgttcgcggagatcctggacagcgaggtgtacaggtactacgccgacggggagtggcgcagctccgcctccggcaagtccgtcgccatcgtcaaccccaccacccgcaagacgcagtacagggtgcaagcatgcacgcaggaggaggtgaacaaggcgatggacgcggccaaggtcgcgcagaaggcatgggcccggacgccgctgtggaagcgtgcggagctcctccacaaggcggccgcgatcctcaaggagcacaaggcccccatcgccgagtgccttgtcaaggagatagccaagccggccaaggatgccgtttctgaggttgtccggtctggggatttggtgtcgtacacagctgaggagggtgtgcggatactcggggagggcaagctgcttgtttcggatagcttccctggtaatgaacgaaacaagtactgtctgagctccaagataccccttggagtagttttggcaatcccgccgttcaactatcctgtcaacttagcagtttctaagattggcccagcactaattgcaggcaatgctcttgtgctaaagcctccaactcagggcgctgtggctgcacttcatatggtacactgcttccacctggctggtttcccgaaaggtttgatcagttgtgtgactgggaagggttctgaaataggagattttcttacaatgcatcctggagtcaactgcataagttttactggtggcgatactggtatagccatttcaaagaaggctggaatggtccctcttcagatggagcttgggggaaaagatgcttgcattgtgctagaggatgcagatctggatttggtttccgcaaatatagtaaagggtggcttctcatacagtggccagaggtgcactgctgtcaaagtagtgctgatcatggaatcgattgctgatgctgtggtacagaaggttaatgccaagttggcgaaactgaaagttggcccacctgaggacgactctgatatcaccccggttgtaacagaatcctcagccaacttcatcgagggtctggtgatggatgcaaaggagaaaggagcaactttctgccaggagtacaggagagaaggcaaccttatctggccgttgctgctggatcatgtccgccctgacatgaggatcgcatgggaggagccttttgggcctgtcttgcctgtgattaggattaactcagttgaggaaggcatccaccattgcaatgccagtaatttcggcctacagggatgcatttttacaagagacatcaacaaggcaatcctgatcagtgatgcaatggagactggaactgtgcagatcaactctgcaccggctcgtgggcctgatcatttccccttccagggactgaaagacagtggcattgggtcccaggggataacaaacagcattaacatgatgaccaaggtgaagagcactgtcataaacctgccgtcaccatcctacaccatgggctgagatattcttgttaagtgttctatagctccatgagcaatgtagagagttaaatgtttcatagccacgtgagatttggacgctatttacacctcagttcttcctgcagaagatcttttgcagtttaaagaataaagtgcgttg

SEQ ID NO: 12926 - protein, 498 aa, Zea mays subsp. mays
  peptide (1)..(498): Ceres Seq. ID no. 13499124
  misc_feature (1)..(498): Homolog of NCBI NO: 2494075 NR Description: NADP-DEPENDENT GLYCERALDEHYDE-3-PHOSPHATE
  misc_feature (2)..(498): Homolog of NCBI NO: 19880027 NR Description: glyceraldehyde-3-phosphate dehydrogenase [Oryza
  misc_feature (3)..(498): Homolog of NCBI NO: 3913711 NR Description: NADP-dependent glyceraldehyde-3-phosphate
  misc_feature (3)..(498): Homolog of NCBI NO: 2494076 NR Description: NADP-DEPENDENT GLYCERALDEHYDE-3-PHOSPHATE
  misc_feature (24)..(498): Homolog of NCBI NO: 29367371 NR Description: NADH-dependent glyceraldehyde-3-phosphate
  misc_feature (3)..(498): Homolog of NCBI NO: 1084372 NR Description: glyceraldehyde-3-phosphate dehydrogenase (NADP)
  misc_feature (3)..(498): Homolog of NCBI NO: 6425093 NR Description: nonreversible glyceraldehyde-3-phosphate
  misc_feature (3)..(498): Homolog of NCBI NO: 15224111 NR Description: NADP-dependent glyceraldehyde-3-phosphate putative [Arabidopsis thaliana] >gi|25284182|pir||F84634
  misc_feature (3)..(498): Homolog of NCBI NO: 21780314 NR Description: nonphosphorylating glyceraldehyde-3-phosphate
  misc_feature (3)..(498): Homolog of NCBI NO: 21780317 NR Description: nonphosphorylating glyceraldehyde-3-phosphate
MALAGTGVFAEILDSEVYRYYADGEWRSSASGKSVAIVNPTTRKTQYRVQACTQEEVNKAMDAAKVAQKAWARTPLWKRAELLHKAAAILKEHKAPIAECLVKEIAKPAKDAVSEVVRSGDLVSYTAEEGVRILGEGKLLVSDSFPGNERNKYCLSSKIPLGVVLAIPPFNYPVNLAVSKIGPALIAGNALVLKPPTQGAVAALHMVHCFHLAGFPKGLISCVTGKGSEIGDFLTMHPGVNCISFTGGDTGIAISKKAGMVPLQMELGGKDACIVLEDADLDLVSANIVKGGFSYSGQRCTAVKVVLIMESIADAVVQKVNAKLAKLKVGPPEDDSDITPVVTESSANFIEGLVMDAKEKGATFCQEYRREGNLIWPLLLDHVRPDMRIAWEEPFGPVLPVIRINSVEEGIHHCNASNFGLQGCIFTRDINKAILISDAMETGTVQINSAPARGPDHFPFQGLKDSGIGSQGITNSINMMTKVKSTVINLPSPSYTMG

SEQ ID NO: 12927 - protein, 438 aa, Zea mays subsp. mays
  peptide (1)..(438): Ceres Seq. ID no. 13499125
  misc_feature (1)..(438): Homolog of NCBI NO: 2494075 NR Description: NADP-DEPENDENT GLYCERALDEHYDE-3-PHOSPHATE
  misc_feature (1)..(438): Homolog of NCBI NO: 19880027 NR Description: glyceraldehyde-3-phosphate dehydrogenase [Oryza
  misc_feature (1)..(438): Homolog of NCBI NO: 3913711 NR Description: NADP-dependent glyceraldehyde-3-phosphate
  misc_feature (1)..(438): Homolog of NCBI NO: 2494076 NR Description: NADP-DEPENDENT GLYCERALDEHYDE-3-PHOSPHATE
  misc_feature (1)..(438): Homolog of NCBI NO: 29367371 NR Description: NADH-dependent glyceraldehyde-3-phosphate
  misc_feature (1)..(438): Homolog of NCBI NO: 1084372 NR Description: glyceraldehyde-3-phosphate dehydrogenase (NADP)
  misc_feature (1)..(438): Homolog of NCBI NO: 6425093 NR Description: nonreversible glyceraldehyde-3-phosphate
  misc_feature (1)..(438): Homolog of NCBI NO: 15224111 NR Description: NADP-dependent glyceraldehyde-3-phosphate putative [Arabidopsis thaliana] >gi|25284182|pir||F84634
  misc_feature (1)..(438): Homolog of NCBI NO: 21780314 NR Description: nonphosphorylating glyceraldehyde-3-phosphate
  misc_feature (1)..(438): Homolog of NCBI NO: 21780317 NR Description: nonphosphorylating glyceraldehyde-3-phosphate
MDAAKVAQKAWARTPLWKRAELLHKAAAILKEHKAPIAECLVKEIAKPAKDAVSEVVRSGDLVSYTAEEGVRILGEGKLLVSDSFPGNERNKYCLSSKIPLGVVLAIPPFNYPVNLAVSKIGPALIAGNALVLKPPTQGAVAALHMVHCFHLAGFPKGLISCVTGKGSEIGDFLTMHPGVNCISFTGGDTGIAISKKAGMVPLQMELGGKDACIVLEDADLDLVSANIVKGGFSYSGQRCTAVKVVLIMESIADAVVQKVNAKLAKLKVGPPEDDSDITPVVTESSANFIEGLVMDAKEKGATFCQEYRREGNLIWPLLLDHVRPDMRIAWEEPFGPVLPVIRINSVEEGIHHCNASNFGLQGCIFTRDINKAILISDAMETGTVQINSAPARGPDHFPFQGLKDSGIGSQGITNSINMMTKVKSTVINLPSPSYTMG

SEQ ID NO: 12928 - protein, 293 aa, Zea mays subsp. mays
  peptide (1)..(293): Ceres Seq. ID no. 13499126
  misc_feature (1)..(293): Homolog of NCBI NO: 2494075 NR Description: NADP-DEPENDENT GLYCERALDEHYDE-3-PHOSPHATE
  misc_feature (1)..(293): Homolog of NCBI NO: 19880027 NR Description: glyceraldehyde-3-phosphate dehydrogenase [Oryza
  misc_feature (1)..(293): Homolog of NCBI NO: 3913711 NR Description: NADP-dependent glyceraldehyde-3-phosphate
  misc_feature (1)..(293): Homolog of NCBI NO: 2494076 NR Description: NADP-DEPENDENT GLYCERALDEHYDE-3-PHOSPHATE
  misc_feature (1)..(293): Homolog of NCBI NO: 29367371 NR Description: NADH-dependent glyceraldehyde-3-phosphate
  misc_feature (1)..(293): Homolog of NCBI NO: 1084372 NR Description: glyceraldehyde-3-phosphate dehydrogenase (NADP)
  misc_feature (1)..(293): Homolog of NCBI NO: 6425093 NR Description: nonreversible glyceraldehyde-3-phosphate
  misc_feature (1)..(293): Homolog of NCBI NO: 15224111 NR Description: NADP-dependent glyceraldehyde-3-phosphate putative [Arabidopsis thaliana] >gi|25284182|pir||F84634
  misc_feature (1)..(293): Homolog of NCBI NO: 21780314 NR Description: nonphosphorylating glyceraldehyde-3-phosphate
  misc_feature (1)..(293): Homolog of NCBI NO: 21780317 NR Description: nonphosphorylating glyceraldehyde-3-phosphate
MVHCFHLAGFPKGLISCVTGKGSEIGDFLTMHPGVNCISFTGGDTGIAISKKAGMVPLQMELGGKDACIVLEDADLDLVSANIVKGGFSYSGQRCTAVKVVLIMESIADAVVQKVNAKLAKLKVGPPEDDSDITPVVTESSANFIEGLVMDAKEKGATFCQEYRREGNLIWPLLLDHVRPDMRIAWEEPFGPVLPVIRINSVEEGIHHCNASNFGLQGCIFTRDINKAILISDAMETGTVQINSAPARGPDHFPFQGLKDSGIGSQGITNSINMMTKVKSTVINLPSPSYTMG

SEQ ID NO: 12929 - DNA, 841 bp, Zea mays subsp. mays
  misc_feature (1)..(841): Ceres Seq. ID no. 12347087
  misc_feature: MA Experiment ID: 108543 Result: Up-regulated in Transcription
  misc_feature: MA Experiment ID: 108556 Result: Down-regulated in Transcription
  misc_feature: MA Experiment 108556 PARAMETER Experiment Name: Zm_Drought_P Parameter: Age (day) Value: 9
  misc_feature: MA Experiment 108556 PARAMETER Experiment Name: Zm_Drought_P Parameter: Organism Value: Zea mays
  misc_feature: MA Experiment 108556 PARAMETER Experiment Name: Zm_Drought_P Parameter: Plant Line Value: 35A19
  misc_feature: MA Experiment 108556 PARAMETER Experiment Name: Zm_Drought_P Parameter: Timepoint (hr) Value: 24
  misc_feature: MA Experiment 108556 PARAMETER Experiment Name: Zm_Drought_P Parameter: Tissue Value: Aerial
  misc_feature: MA Experiment 108556 PARAMETER Experiment Name: Zm_Drought_P Parameter: Treatment Value: Drought vs. No Drought
  misc_feature: MA Experiment ID: 108689 Result: Down-regulated in Transcription
  misc_feature: MA Experiment 108689 PARAMETER Experiment Name: Zm_Drought_Roots_P Parameter: Age (day) Value: 9
  misc_feature: MA Experiment 108689 PARAMETER Experiment Name: Zm_Drought_Roots_P Parameter: Organism Value: Zea mays
  misc_feature: MA Experiment 108689 PARAMETER Experiment Name: Zm_Drought_Roots_P Parameter: Plant Line Value: 35A19
  misc_feature: MA Experiment 108689 PARAMETER Experiment Name: Zm_Drought_Roots_P Parameter: Timepoint (hr) Value: 24
  misc_feature: MA Experiment 108689 PARAMETER Experiment Name: Zm_Drought_Roots_P Parameter: Tissue Value: Roots
  misc_feature: MA Experiment 108689 PARAMETER Experiment Name: Zm_Drought_Roots_P Parameter: Treatment Value: Drought vs. No Drought
  misc_feature: MA Experiment ID: 20000480 Result: Down-regulated in Transcription
  misc_feature: MA Experiment 20000480 PARAMETER Experiment Name: Zm_Drought_P Parameter: Age (day) Value: 11
  misc_feature: MA Experiment 20000480 PARAMETER Experiment Name: Zm_Drought_P Parameter: Organism Value: Zea mays
  misc_feature: MA Experiment 20000480 PARAMETER Experiment Name: Zm_Drought_P Parameter: Plant Line Value: 35A19
  misc_feature: MA Experiment 20000480 PARAMETER Experiment Name: Zm_Drought_P Parameter: Timepoint (hr) Value: 72
  misc_feature: MA Experiment 20000480 PARAMETER Experiment Name: Zm_Drought_P Parameter: Tissue Value: Aerial
  misc_feature: MA Experiment 20000480 PARAMETER Experiment Name: Zm_Drought_P Parameter: Treatment Value: Drought vs. No Drought
atctctctactcactcttcctgtctcctcgtcttgctggagccagtattaacagatccgggttcgagcgtccagtctcgccggacctccgactggcggtcgctgctatctctctggtaccgcggtctcttgcgcgcttctctccattcgctcccactcaccggcttgggggaatgaaggatgtggtagggagcccggggacctggagtggcatggcgctgcggttgtcgcaatgcgtgtccgctggcgcatccatgggcgctatggccacagcgtacggcttctccaactacactgctttctgctacttgattgcttcaatgggcctacaacttctttggagttttggccttgcttgtcttgatgtctactctttgaagactaaaagagatcttcacaaccctgtgcttgtaagcctttttgttgttggggactgggtcactgcaattctgtcgtttgctgccgcgtcggcgtccgcgggcgtgaccatcctgttcgagagggacgtccacttctgcaggatgtacccgcagttgtcgtgcggccggtacgcgctctcggtggtgctggcgttcatcacctggtccttcatcgcaacttctgctgtctccatgttctggttgctgccgtcgctctgatgtggcacggaaggagcctgccgtgtcgtcctgtttagatccgtttgcttcagcagctggttgatgccctgggtcgctctgggttgtgtgcttaagtaactatcaggatcctgatcttaaccggatgtactctgctggagacgagaaattatctagtgtatttgttaaaacaatgaggtggtttatcttcttatttcttttttt

SEQ ID NO: 12930 - protein, 211 aa, Zea mays subsp. mays
  peptide (1)..(211): Ceres Seq. ID no. 12347088
  misc_feature (63)..(194): Pfam Name: Domain of unknown function (DUF588) Pfam Description: Domain of unknown function (DUF588)
  misc_feature (58)..(208): Homolog of NCBI NO: 25408537 NR Description: hypothetical protein At2g37200 [imported] - thaliana >gi|4371281|gb|AAD18139.1| unknown protein [Arabidopsis
  misc_feature (58)..(208): Homolog of NCBI NO: 30687069 NR Description: expressed protein [Arabidopsis thaliana]
  misc_feature (58)..(180): Homolog of NCBI NO: 7939530 NR Description: gb|AAD20689.1~gene_id:K14B15.11~similar to
  misc_feature (58)..(211): Homolog of NCBI NO: 18409932 NR Description: putative protein; protein id: At3g53850.1, by cDNA: gi_15724235 [Arabidopsis thaliana] AT4g31460/F3L17_30 [Arabidopsis thaliana]
  misc_feature (92)..(211): Homolog of NCBI NO: 11357817 NR Description: hypothetical protein F5K20.150 - Arabidopsis >gi|7630005|emb|CAB88347.1| putative protein [Arabidopsis
  misc_feature (58)..(210): Homolog of NCBI NO: 18401722 NR Description: expressed protein; protein id: At2g28370.1, by cDNA: 14111., supported by cDNA: gi_14030700 [Arabidopsis >gi|25407978|pir||A84684 hypothetical protein At2g28370
  misc_feature (58)..(210): Homolog of NCBI NO: 30686969 NR Description: expressed protein [Arabidopsis thaliana] ethylene responsive element binding protein, putative thaliana] >gi|30102860|gb|AAP21348.1| At3g23220 [Arabidopsis
  misc_feature (58)..(208): Homolog of NCBI NO: 15241672 NR Description: putative protein; protein id: At5g02060.1
  misc_feature (65)..(196): Homolog of NCBI NO: 26006486 NR Description: Unknown protein [Oryza sativa (japonica
  misc_feature (58)..(211): Homolog of NCBI NO: 22330130 NR Description: hypothetical protein; protein id: At1g49405.1
SLYSLFLSPRLAGASINRSGFERPVSPDLRLAVAAISLVPRSLARFSPFAPTHRLGGMKDVVGSPGTWSGMALRLSQCVSAGASMGAMATAYGFSNYTAFCYLIASMGLQLLWSFGLACLDVYSLKTKRDLHNPVLVSLFVVGDWVTAILSFAAASASAGVTILFERDVHFCRMYPQLSCGRYALSVVLAFITWSFIATSAVSMFWLLPSL

SEQ ID NO: 12931 - protein, 154 aa, Zea mays subsp. mays
  peptide (1)..(154): Ceres Seq. ID no. 12347089
  misc_feature (6)..(137): Pfam Name: Domain of unknown function (DUF588) Pfam Description: Domain of unknown function (DUF588)
  misc_feature (1)..(151): Homolog of NCBI NO: 15241672 NR Description: putative protein; protein id: At5g02060.1
  misc_feature (1)..(154): Homolog of NCBI NO: 18409932 NR Description: putative protein; protein id: At3g53850.1, by cDNA: gi_15724235 [Arabidopsis thaliana] AT4g31460/F3L17_30 [Arabidopsis thaliana]
  misc_feature (1)..(153): Homolog of NCBI NO: 30686969 NR Description: expressed protein [Arabidopsis thaliana] ethylene responsive element binding protein, putative thaliana] >gi|30102860|gb|AAP21348.1| At3g23220 [Arabidopsis
  misc_feature (35)..(154): Homolog of NCBI NO: 11357817 NR Description: hypothetical protein F5K20.150 - Arabidopsis >gi|7630005|emb|CAB88347.1| putative protein [Arabidopsis
  misc_feature (1)..(153): Homolog of NCBI NO: 18401722 NR Description: expressed protein; protein id: At2g28370.1, by cDNA: 14111., supported by cDNA: gi_14030700 [Arabidopsis >gi|25407978|pir||A84684 hypothetical protein At2g28370
  misc_feature (1)..(151): Homolog of NCBI NO: 25408537 NR Description: hypothetical protein At2g37200 [imported] - thaliana >gi|4371281|gb|AAD18139.1| unknown protein [Arabidopsis
  misc_feature (1)..(151): Homolog of NCBI NO: 30687069 NR Description: expressed protein [Arabidopsis thaliana]
  misc_feature (1)..(123): Homolog of NCBI NO: 7939530 NR Description: gb|AAD20689.1~gene_id:K14B15.11~similar to
  misc_feature (8)..(139): Homolog of NCBI NO: 26006486 NR Description: Unknown protein [Oryza sativa (japonica
  misc_feature (1)..(154): Homolog of NCBI NO: 22330130 NR Description: hypothetical protein; protein id: At1g49405.1
MKDVVGSPGTWSGMALRLSQCVSAGASMGAMATAYGFSNYTAFCYLIASMGLQLLWSFGLACLDVYSLKTKRDLHNPVLVSLFVVGDWVTAILSFAAASASAGVTILFERDVHFCRMYPQLSCGRYALSVVLAFITWSFIATSAVSMFWLLPSL

SEQ ID NO: 12932 - protein, 141 aa, Zea mays subsp. mays
  peptide (1)..(141): Ceres Seq. ID no. 12347090
  misc_feature (1)..(124): Pfam Name: Domain of unknown function (DUF588) Pfam Description: Domain of unknown function (DUF588)
  misc_feature (1)..(138): Homolog of NCBI NO: 15241672 NR Description: putative protein; protein id: At5g02060.1
  misc_feature (1)..(141): Homolog of NCBI NO: 18409932 NR Description: putative protein; protein id: At3g53850.1, by cDNA: gi_15724235 [Arabidopsis thaliana] AT4g31460/F3L17_30 [Arabidopsis thaliana]
  misc_feature (1)..(140): Homolog of NCBI NO: 30686969 NR Description: expressed protein [Arabidopsis thaliana] ethylene responsive element binding protein, putative thaliana] >gi|30102860|gb|AAP21348.1| At3g23220 [Arabidopsis
  misc_feature (22)..(141): Homolog of NCBI NO: 11357817 NR Description: hypothetical protein F5K20.150 - Arabidopsis >gi|7630005|emb|CAB88347.1| putative protein [Arabidopsis
  misc_feature (1)..(140): Homolog of NCBI NO: 18401722 NR Description: expressed protein; protein id: At2g28370.1, by cDNA: 14111., supported by cDNA: gi_14030700 [Arabidopsis >gi|25407978|pir||A84684 hypothetical protein At2g28370
  misc_feature (1)..(138): Homolog of NCBI NO: 25408537 NR Description: hypothetical protein At2g37200 [imported] - thaliana >gi|4371281|gb|AAD18139.1| unknown protein [Arabidopsis
  misc_feature (1)..(138): Homolog of NCBI NO: 30687069 NR Description: expressed protein [Arabidopsis thaliana]
  misc_feature (1)..(110): Homolog of NCBI NO: 7939530 NR Description: gb|AAD20689.1~gene_id:K14B15.11~similar to
  misc_feature (1)..(126): Homolog of NCBI NO: 26006486 NR Description: Unknown protein [Oryza sativa (japonica
  misc_feature (1)..(141): Homolog of NCBI NO: 22330130 NR Description: hypothetical protein; protein id: At1g49405.1
MALRLSQCVSAGASMGAMATAYGFSNYTAFCYLIASMGLQLLWSFGLACLDVYSLKTKRDLHNPVLVSLFVVGDWVTAILSFAAASASAGVTILFERDVHFCRMYPQLSCGRYALSVVLAFITWSFIATSAVSMFWLLPSL

SEQ ID NO: 12933 - DNA, 1227 bp, Zea mays subsp. mays
  misc_feature (1)..(1227): Ceres Seq. ID no. 12347785
  misc_feature: MA Experiment ID: 108515 Result: Up-regulated in Transcription
  misc_feature: MA Experiment 108515 PARAMETER Experiment Name: Zm_2mM_SA_P Parameter: Age (day) Value: 8
  misc_feature: MA Experiment 108515 PARAMETER Experiment Name: Zm_2mM_SA_P Parameter: Organism Value: Zea mays
  misc_feature: MA Experiment 108515 PARAMETER Experiment Name: Zm_2mM_SA_P Parameter: Plant Line Value: 35A19
  misc_feature: MA Experiment 108515 PARAMETER Experiment Name: Zm_2mM_SA_P Parameter: Timepoint (hr) Value: 12
  misc_feature: MA Experiment 108515 PARAMETER Experiment Name: Zm_2mM_SA_P Parameter: Tissue Value: Aerial
  misc_feature: MA Experiment 108515 PARAMETER Experiment Name: Zm_2mM_SA_P Parameter: Treatment Value: 2mM SA vs. No Treatment
  misc_feature: MA Experiment ID: 108522 Result: Up-regulated in Transcription
  misc_feature: MA Experiment 108522 PARAMETER Experiment Name: Zm_42deg_Heat_P Parameter: Age (day) Value: 8
  misc_feature: MA Experiment 108522 PARAMETER Experiment Name: Zm_42deg_Heat_P Parameter: Organism Value: Zea mays
  misc_feature: MA Experiment 108522 PARAMETER Experiment Name: Zm_42deg_Heat_P Parameter: Plant Line Value: 35A19
  misc_feature: MA Experiment 108522 PARAMETER Experiment Name: Zm_42deg_Heat_P Parameter: Temperature (deg C) Value: 42 vs. 22
  misc_feature: MA Experiment 108522 PARAMETER Experiment Name: Zm_42deg_Heat_P Parameter: Timepoint (hr) Value: 1
  misc_feature: MA Experiment 108522 PARAMETER Experiment Name: Zm_42deg_Heat_P Parameter: Tissue Value: Aerial
  misc_feature: MA Experiment ID: 108523 Result: Up-regulated in Transcription
  misc_feature: MA Experiment 108523 PARAMETER Experiment Name: Zm_42deg_Heat_P Parameter: Age (day) Value: 8
  misc_feature: MA Experiment 108523 PARAMETER Experiment Name: Zm_42deg_Heat_P Parameter: Organism Value: Zea mays
  misc_feature: MA Experiment 108523 PARAMETER Experiment Name: Zm_42deg_Heat_P Parameter: Plant Line Value: 35A19
  misc_feature: MA Experiment 108523 PARAMETER Experiment Name: Zm_42deg_Heat_P Parameter: Temperature (deg C) Value: 42 vs. 22
  misc_feature: MA Experiment 108523 PARAMETER Experiment Name: Zm_42deg_Heat_P Parameter: Timepoint (hr) Value: 6
  misc_feature: MA Experiment 108523 PARAMETER Experiment Name: Zm_42deg_Heat_P Parameter: Tissue Value: Aerial
  misc_feature: MA Experiment ID: 108526 Result: Up-regulated in Transcription
  misc_feature: MA Experiment 108526 PARAMETER Experiment Name: Zm_5mM_NO_P Parameter: Age (day) Value: 8
  misc_feature: MA Experiment 108526 PARAMETER Experiment Name: Zm_5mM_NO_P Parameter: Organism Value: Zea mays
  misc_feature: MA Experiment 108526 PARAMETER Experiment Name: Zm_5mM_NO_P Parameter: Plant Line Value: 35A19
  misc_feature: MA Experiment 108526 PARAMETER Experiment Name: Zm_5mM_NO_P Parameter: Timepoint (hr) Value: 1
  misc_feature: MA Experiment 108526 PARAMETER Experiment Name: Zm_5mM_NO_P Parameter: Tissue Value: Aerial
  misc_feature: MA Experiment 108526 PARAMETER Experiment Name: Zm_5mM_NO_P Parameter: Treatment Value: 5mM NO vs. No Treatment
  misc_feature: MA Experiment ID: 108527 Result: Up-regulated in Transcription
  misc_feature: MA Experiment 108527 PARAMETER Experiment Name: Zm_5mM_NO_P Parameter: Age (day) Value: 8
  misc_feature: MA Experiment 108527 PARAMETER Experiment Name: Zm_5mM_NO_P Parameter: Organism Value: Zea mays
  misc_feature: MA Experiment 108527 PARAMETER Experiment Name: Zm_5mM_NO_P Parameter: Plant Line Value: 35A19
  misc_feature: MA Experiment 108527 PARAMETER Experiment Name: Zm_5mM_NO_P Parameter: Timepoint (hr) Value: 6
  misc_feature: MA Experiment 108527 PARAMETER Experiment Name: Zm_5mM_NO_P Parameter: Tissue Value: Aerial
  misc_feature: MA Experiment 108527 PARAMETER Experiment Name: Zm_5mM_NO_P Parameter: Treatment Value: 5mM NO vs. No Treatment
  misc_feature: MA Experiment ID: 108535 Result: Down-regulated in Transcription
  misc_feature: MA Experiment 108535 PARAMETER Experiment Name: Zm_Meristem_P Parameter: Age (day) Value: 8
  misc_feature: MA Experiment 108535 PARAMETER Experiment Name: Zm_Meristem_P Parameter: Organism Value: Zea mays
  misc_feature: MA Experiment 108535 PARAMETER Experiment Name: Zm_Meristem_P Parameter: Plant Line Value: 35A19
  misc_feature: MA Experiment 108535 PARAMETER Experiment Name: Zm_Meristem_P Parameter: Tissue Value: Root Meristem vs. Above Root Meristem
  misc_feature: MA Experiment ID: 108543 Result: Up-regulated in Transcription
  misc_feature: MA Experiment ID: 108559 Result: Up-regulated in Transcription
  misc_feature: MA Experiment 108559 PARAMETER Experiment Name: Zm_5mM_NO_P Parameter: Age (day) Value: 8
  misc_feature: MA Experiment 108559 PARAMETER Experiment Name: Zm_5mM_NO_P Parameter: Organism Value: Zea mays
  misc_feature: MA Experiment 108559 PARAMETER Experiment Name: Zm_5mM_NO_P Parameter: Plant Line Value: 35A19
  misc_feature: MA Experiment 108559 PARAMETER Experiment Name: Zm_5mM_NO_P Parameter: Timepoint (hr) Value: 12
  misc_feature: MA Experiment 108559 PARAMETER Experiment Name: Zm_5mM_NO_P Parameter: Tissue Value: Aerial
  misc_feature: MA Experiment 108559 PARAMETER Experiment Name: Zm_5mM_NO_P Parameter: Treatment Value: 5mM NO vs. No Treatment
  misc_feature: MA Experiment ID: 20000478 Result: Up-regulated in Transcription
  misc_feature: MA Experiment 20000478 PARAMETER Experiment Name: Zm_5mM_SA_P Parameter: Age (day) Value: 11
  misc_feature: MA Experiment 20000478 PARAMETER Experiment Name: Zm_5mM_SA_P Parameter: Organism Value: Zea mays
  misc_feature: MA Experiment 20000478 PARAMETER Experiment Name: Zm_5mM_SA_P Parameter: Plant Line Value: 35A19
  misc_feature: MA Experiment 20000478 PARAMETER Experiment Name: Zm_5mM_SA_P Parameter: Timepoint (hr) Value: 72
  misc_feature: MA Experiment 20000478 PARAMETER Experiment Name: Zm_5mM_SA_P Parameter: Tissue Value: Aerial
  misc_feature: MA Experiment 20000478 PARAMETER Experiment Name: Zm_5mM_SA_P Parameter: Treatment Value: 5mM SA vs. No Treatment
  misc_feature: MA Experiment ID: 20000532 Result: Up-regulated in Transcription
  misc_feature: MA Experiment 20000532 PARAMETER Experiment Name: Zm_0.001percent_MeJA_P Parameter: Age (day) Value: 10
  misc_feature: MA Experiment 20000532 PARAMETER Experiment Name: Zm_0.001percent_MeJA_P Parameter: Organism Value: Zea mays
  misc_feature: MA Experiment 20000532 PARAMETER Experiment Name: Zm_0.001percent_MeJA_P Parameter: Plant Line Value: 35A19
  misc_feature: MA Experiment 20000532 PARAMETER Experiment Name: Zm_0.001percent_MeJA_P Parameter: Timepoint (hr) Value: 48
  misc_feature: MA Experiment 20000532 PARAMETER Experiment Name: Zm_0.001percent_MeJA_P Parameter: Tissue Value: Aerial
  misc_feature: MA Experiment 20000532 PARAMETER Experiment Name: Zm_0.001percent_MeJA_P Parameter: Treatment Value: 0.001percent MeJA vs. No Treatment
  misc_feature: MA Experiment ID: 20000626 Result: Up-regulated in Transcription
  misc_feature: MA Experiment 20000626 PARAMETER Experiment Name: Zm_Herbicide-Treatments_P Parameter: Timepoint (hr) Value: 12
  misc_feature: MA Experiment 20000626 PARAMETER Experiment Name: Zm_Herbicide-Treatments_P Parameter: Tissue Value: Aerial
  misc_feature: MA Experiment 20000626 PARAMETER Experiment Name: Zm_Herbicide-Treatments_P Parameter: Treatment Value: Roundup vs. No Treatment
gcaagccacaaacccgcaccacggcaccagcgggcagcggccaccctagtcagccagtcggaacgaagccgcgcctcgcgccctcccctcgcgaccaccactgcttccagttctggtgcagtgtggaagagcgcccagtgggagagattcagagagaggcggcgatggcgcggcatttcgtgctgaacaccggcgccaaggtcccctatgttgggctcggcacatggcagtctgaccccggcgtcgtcggcaacgccgtctacgccgccgtcaaggcgggttaccgacacatcgattgtgccagagtttacggaaatgagaaggagattggtttggcgctgaagaagctatttgaagagggtgtagtgaagcgagaagatatgtttatcacctctaagttgtggaatgatcatcatgctcctgaagatgtgcctgaggcactaaatcacagcctgaatgatttgcagcttgagtacctggatctttatcttatccattggccatttagagtcaagaagggagcaaataccagtcctgaaaatttcgttacacctgacatccctgctacttggggggcaatggaaaagttatatgatgctggcaaagctcgtgccattggtgtgagtaacttttcctcaaagaaattgggtgacttgcttgctgtagctcgtgtacctccagccgttgatcaggtggaatgtcatcctggttggcagcaaactaagctccatagcttttgtcagtcaactggtgttcaactgcttactcaccactaggttcacctggtacaacttggatgaatggtaatgtccttaaagaaccaataatcatctcaatagctgagaaactcggaaaaactcctgcacaagtggctctgcgctggaacattcagatgggtcacagtgttcttccaaaaagcacgaatgaagaaaggataaagcaaaaccttgatgtttatgattggtcgattccagatgacttgctcgcaaagttctctgagattaagcaggataggctacttagaggcaacttcattgttaatcctgagagcgcttacaagacccatgaggagctctgggacggtgaactctaggaaggacaccgttgttttatcgtgagcagggagcagcgttccattagggtctgccatatcattttatctcctaatttgcgctttatctgaaatgaaggttcagtgctcggaagctctgatgccatcctttatcg

SEQ ID NO: 12934 - protein, 257 aa, Zea mays subsp. mays
  peptide (1)..(257): Ceres Seq. ID no. 12347786
  misc_feature (55)..(253): Homolog of NCBI NO: 34908280 NR Description: putative aldose reductase [Oryza sativa (japonica group)] >gi|15408884|dbj|BAB64275.1| putative aldose reductase
  misc_feature (55)..(253): Homolog of NCBI NO: 34908276 NR Description: putative aldose reductase [Oryza sativa (japonica group)] >gi|15408882|dbj|BAB64273.1| putative aldose reductase
  misc_feature (57)..(253): Homolog of NCBI NO: 30687261 NR Description: aldo/keto reductase family [Arabidopsis thaliana]
  misc_feature (57)..(253): Homolog of NCBI NO: 25283479 NR Description: probable alcohol dehydrogenase [imported] -
  misc_feature (59)..(253): Homolog of NCBI NO: 30687247 NR Description: aldo/keto reductase family [Arabidopsis thaliana]
  misc_feature (63)..(253): Homolog of NCBI NO: 28393400 NR Description: putative aldo/keto reductase [Arabidopsis
  misc_feature (57)..(253): Homolog of NCBI NO: 13160397 NR Description: aldose reductase [Digitalis purpurea]
  misc_feature (53)..(253): Homolog of NCBI NO: 7431112 NR Description: abscisic acid activated protein - alfalfa
  misc_feature (59)..(253): Homolog of NCBI NO: 7431114 NR Description: aldehyde dehydrogenase homolog At2g37770 - thaliana >gi|3236259|gb|AAC23647.1| putative alcohol
  misc_feature (57)..(253): Homolog of NCBI NO: 13160399 NR Description: aldose reductase [Digitalis purpurea]
KPQTRTTAPAGSGHPSQPVGTKPRLAPSPRDHHCFQFWCSVEERPVGEIQREAAMARHFVLNTGAKVPYVGLGTWQSDPGVVGNAVYAAVKAGYRHIDCARVYGNEKEIGLALKKLFEEGVVKREDMFITSKLWNDHHAPEDVPEALNHSLNDLQLEYLDLYLIHWPFRVKKGANTSPENFVTPDIPATWGAMEKLYDAGKARAIGVSNFSSKKLGDLLAVARVPPAVDQVECHPGWQQTKLHSFCQSTGVQLLTHH

SEQ ID NO: 12935 - protein, 203 aa, Zea mays subsp. mays
  peptide (1)..(203): Ceres Seq. ID no. 12347787
  misc_feature (1)..(199): Homolog of NCBI NO: 34908280 NR Description: putative aldose reductase [Oryza sativa (japonica group)] >gi|15408884|dbj|BAB64275.1| putative aldose reductase
  misc_feature (1)..(199): Homolog of NCBI NO: 34908276 NR Description: putative aldose reductase [Oryza sativa (japonica group)] >gi|15408882|dbj|BAB64273.1| putative aldose reductase
  misc_feature (3)..(199): Homolog of NCBI NO: 30687261 NR Description: aldo/keto reductase family [Arabidopsis thaliana]
  misc_feature (3)..(199): Homolog of NCBI NO: 25283479 NR Description: probable alcohol dehydrogenase [imported] -
  misc_feature (5)..(199): Homolog of NCBI NO: 30687247 NR Description: aldo/keto reductase family [Arabidopsis thaliana]
  misc_feature (9)..(199): Homolog of NCBI NO: 28393400 NR Description: putative aldo/keto reductase [Arabidopsis
  misc_feature (3)..(199): Homolog of NCBI NO: 13160397 NR Description: aldose reductase [Digitalis purpurea]
  misc_feature (1)..(199): Homolog of NCBI NO: 7431112 NR Description: abscisic acid activated protein - alfalfa
  misc_feature (5)..(199): Homolog of NCBI NO: 7431114 NR Description: aldehyde dehydrogenase homolog At2g37770 - thaliana >gi|3236259|gb|AAC23647.1| putative alcohol
  misc_feature (3)..(199): Homolog of NCBI NO: 13160399 NR Description: aldose reductase [Digitalis purpurea]
MARHFVLNTGAKVPYVGLGTWQSDPGVVGNAVYAAVKAGYRHIDCARVYGNEKEIGLALKKLFEEGVVKREDMFITSKLWNDHHAPEDVPEALNHSLNDLQLEYLDLYLIHWPFRVKKGANTSPENFVTPDIPATWGAMEKLYDAGKARAIGVSNFSSKKLGDLLAVARVPPAVDQVECHPGWQQTKLHSFCQSTGVQLLTHH

SEQ ID NO: 12936 - protein, 131 aa, Zea mays subsp. mays
  peptide (1)..(131): Ceres Seq. ID no. 12347788
  misc_feature (1)..(127): Homolog of NCBI NO: 34908280 NR Description: putative aldose reductase [Oryza sativa (japonica group)] >gi|15408884|dbj|BAB64275.1| putative aldose reductase
  misc_feature (1)..(127): Homolog of NCBI NO: 34908276 NR Description: putative aldose reductase [Oryza sativa (japonica group)] >gi|15408882|dbj|BAB64273.1| putative aldose reductase
  misc_feature (1)..(127): Homolog of NCBI NO: 30687261 NR Description: aldo/keto reductase family [Arabidopsis thaliana]
  misc_feature (1)..(127): Homolog of NCBI NO: 25283479 NR Description: probable alcohol dehydrogenase [imported] -
  misc_feature (1)..(127): Homolog of NCBI NO: 30687247 NR Description: aldo/keto reductase family [Arabidopsis thaliana]
  misc_feature (1)..(127): Homolog of NCBI NO: 28393400 NR Description: putative aldo/keto reductase [Arabidopsis
  misc_feature (1)..(127): Homolog of NCBI NO: 13160397 NR Description: aldose reductase [Digitalis purpurea]
  misc_feature (1)..(127): Homolog of NCBI NO: 7431112 NR Description: abscisic acid activated protein - alfalfa
  misc_feature (1)..(127): Homolog of NCBI NO: 7431114 NR Description: aldehyde dehydrogenase homolog At2g37770 - thaliana >gi|3236259|gb|AAC23647.1| putative alcohol
  misc_feature (1)..(127): Homolog of NCBI NO: 13160399 NR Description: aldose reductase [Digitalis purpurea]
MFITSKLWNDHHAPEDVPEALNHSLNDLQLEYLDLYLIHWPFRVKKGANTSPENFVTPDIPATWGAMEKLYDAGKARAIGVSNFSSKKLGDLLAVARVPPAVDQVECHPGWQQTKLHSFCQSTGVQLLTHH

SEQ ID NO: 12937 - DNA, 2180 bp, Zea mays subsp. mays
  misc_feature (1)..(2180): Ceres Seq. ID no. 12342411
  misc_feature: MA Experiment ID: 108547 Result: Down-regulated in Transcription
  misc_feature: MA Experiment 108547 PARAMETER Experiment Name: Zm_Imbibed_Seeds_P Parameter: Age (day) Value: 4 vs. 2
  misc_feature: MA Experiment 108547 PARAMETER Experiment Name: Zm_Imbibed_Seeds_P Parameter: Organism Value: Zea mays
  misc_feature: MA Experiment 108547 PARAMETER Experiment Name: Zm_Imbibed_Seeds_P Parameter: Plant Line Value: 35A19
  misc_feature: MA Experiment 108547 PARAMETER Experiment Name: Zm_Imbibed_Seeds_P Parameter: Tissue Value: Aerial vs. Embryo
agtcagttcctcctactcccgatccattcgcagagggcagcagccacctcctctccccgcggccgagctcgcgcctcgcccgccgcctgaactcgtcttgcctgcggccgatctcccccctccgttcttcgccgcaacccggagaggagaccgcgctcggtcgagcaccccctggggcagcgtcctcgcgaccagctccggcgcggcgtccgccctcagcagcccgggtgtccccgggaacgtctccggctcggccggcacacagctcgacaggcttttcagttcagtgcagtgtaccaagattctctgttaatttgtgtatgagatcagttaactgataaagacatgtgaagaaccagtgatcagtaatctgtacgcttcagattgtagtatccttgagatggatggaagagaatcaggcttatggtaaatcctggtgaatattcatgggaggtcagcaagttctggcctgactaagactagtaaaaatacggtgcttcatctcagatcatcaatggtgagaatgaggttcccgaaacgttatataatagtattgttgacattcatctgcacaaatgtttgctacattgagcgtgtgggtttctcaattacctatactgttgcagctgatgccatcggtgtgaatcaagccaacaagggcatgatactctctatgttctattatggttatgttttatcacagattcctggtggatgggcagcacagagaataggaggtagacgtgtcctgctactgtcatttgtattgtggtcaatgatatgtggtttaattccacttgatcccaacagagtaaccattctggtcctttctcgcctattcgttggtgtagcacaaggtttcatatttcctgccattcacactgtcctggcacaatgggtgccgccgcaggagcgctctcgctcagtatctcttactacctcagggatgtatcttggtgcagcctgtggcatgcttttcttccctagtctggtgaagcacatgggaccccagtcagttttttttgttgaagcagtgttgggagcagcatggtctgtaatatggctgaaattttccagtgacccaccccgtactgatcttccaaaggtatcaatgccaaaagtgccatctcgagacatgattaaggcacaagcaggaggggttgtggcacctcgcacggtaaagatcccgtggcgaaggataatattcagcctacctgtttgggcaatagttgtgaacaacttcacgttccactatgccctgtatgttcttatgaactggctccctacctattttgagctaggccttaagcttagcctccaggatatgggttcctcaaagatgcttccctatttcaacatgttcattttctccaatatcggcggtgtggttgctgatcacttgattacaaggaggattctatctgttaccaagacaaggaagcttctgaacaccatcgggttcatcgtctcagcgtttgcactcatggcccttcctttgttcagcacaccgtcaggcactgtaatgtgttcagcgatatccctcggttttcttgctctaggaagagcagggtttgccgtgaaccatatggatgttgctccgaagtttgcagggatagtgatgggagtctcaaacacggcggggacactggccggaatcgtcggtgtcggcctcacgggcaatattctggaggcggcaaaggcttctaacaaggatctaacggactcggaaacctggaaaacagtcttcttcgttccagcatatctttgtattttcagttccgtcatttttttgatcttttcgacaggcgaaaagatctttgaataaagggtggttattactttttttgccaattcttttcttacgatgaggcaggattgtgaaatggaaatcttacatgtatctgtagcatttgttacaaaattttcagatttcagactgcatcacatacacacgatcagaggctatgtcaggagatcttgcattttcgttatgatgaagactcggttcattggcagtcacactcacactccaatgcagctaacagaatttgcttgtctcccaggttaactccttggttttggtacatagtctcaccacaaagtttgtcaagttcccttacctttgccctgcaatgtaaacatatatggtgccaatgagaataaacggcattgtcatttgc

SEQ ID NO: 12938 - protein, 436 aa, Zea mays subsp. mays
  peptide (1)..(436): Ceres Seq. ID no. 12342412
  misc_feature (22)..(435): Pfam Name: Sugar (and other) transporter Pfam Description: Sugar (and other) transporter
  misc_feature (7)..(436): Homolog of NCBI NO: 15241475 NR Description: Na+-dependent inorganic phosphate
  misc_feature (6)..(436): Homolog of NCBI NO: 15227589 NR Description: putative Na+-dependent inorganic phosphate protein id: At2g29650.1, supported by cDNA: gi_17064975
  misc_feature (6)..(436): Homolog of NCBI NO: 17064976 NR Description: putative Na+-dependent inorganic phosphate
  misc_feature (5)..(436): Homolog of NCBI NO: 34903342 NR Description: unnamed protein product [Oryza sativa (japonica group)] >gi|6498428|dbj|BAA87831.1| unnamed protein product
  misc_feature (5)..(392): Homolog of NCBI NO: 30678625 NR Description: expressed protein [Arabidopsis thaliana]
  misc_feature (8)..(432): Homolog of NCBI NO: 31248034 NR Description: ENSANGP00000010934 [Anopheles gambiae]
  misc_feature (49)..(433): Homolog of NCBI NO: 9966811 NR Description: differentiation-associated Na-dependent inorganic
  misc_feature (7)..(433): Homolog of NCBI NO: 21322234 NR Description: vesicular glutamate transporter 3 [Homo sapiens]
  misc_feature (49)..(433): Homolog of NCBI NO: 16758166 NR Description: differentation-associated Na-dependent inorganic
  misc_feature (48)..(432): Homolog of NCBI NO: 27370146 NR Description: hypothetical protein 4732491M05 [Mus musculus]
MVRMRFPKRYIIVLLTFICTNVCYIERVGFSITYTVAADAIGVNQANKGMILSMFYYGYVLSQIPGGWAAQRIGGRRVLLLSFVLWSMICGLIPLDPNRVTILVLSRLFVGVAQGFIFPAIHTVLAQWVPPQERSRSVSLTTSGMYLGAACGMLFFPSLVKHMGPQSVFFVEAVLGAAWSVIWLKFSSDPPRTDLPKVSMPKVPSRDMIKAQAGGVVAPRTVKIPWRRIIFSLPVWAIVVNNFTFHYALYVLMNWLPTYFELGLKLSLQDMGSSKMLPYFNMFIFSNIGGVVADHLITRRILSVTKTRKLLNTIGFIVSAFALMALPLFSTPSGTVMCSAISLGFLALGRAGFAVNHMDVAPKFAGIVMGVSNTAGTLAGIVGVGLTGNILEAAKASNKDLTDSETWKTVFFVPAYLCIFSSVIFLIFSTGEKIFE

SEQ ID NO: 12939 - protein, 433 aa, Zea mays subsp. mays
  peptide (1)..(433): Ceres Seq. ID no. 12342413
  misc_feature (19)..(432): Pfam Name: Sugar (and other) transporter Pfam Description: Sugar (and other) transporter
  misc_feature (4)..(433): Homolog of NCBI NO: 15241475 NR Description: Na+-dependent inorganic phosphate
  misc_feature (3)..(433): Homolog of NCBI NO: 15227589 NR Description: putative Na+-dependent inorganic phosphate protein id: At2g29650.1, supported by cDNA: gi_17064975
  misc_feature (3)..(433): Homolog of NCBI NO: 17064976 NR Description: putative Na+-dependent inorganic phosphate
  misc_feature (2)..(433): Homolog of NCBI NO: 34903342 NR Description: unnamed protein product [Oryza sativa (japonica group)] >gi|6498428|dbj|BAA87831.1| unnamed protein product
  misc_feature (2)..(389): Homolog of NCBI NO: 30678625 NR Description: expressed protein [Arabidopsis thaliana]
  misc_feature (5)..(429): Homolog of NCBI NO: 31248034 NR Description: ENSANGP00000010934 [Anopheles gambiae]
  misc_feature (46)..(430): Homolog of NCBI NO: 9966811 NR Description: differentiation-associated Na-dependent inorganic
  misc_feature (4)..(430): Homolog of NCBI NO: 21322234 NR Description: vesicular glutamate transporter 3 [Homo sapiens]
  misc_feature (46)..(430): Homolog of NCBI NO: 16758166 NR Description: differentation-associated Na-dependent inorganic
  misc_feature (45)..(429): Homolog of NCBI NO: 27370146 NR Description: hypothetical protein 4732491M05 [Mus musculus]
MRFPKRYIIVLLTFICTNVCYIERVGFSITYTVAADAIGVNQANKGMILSMFYYGYVLSQIPGGWAAQRIGGRRVLLLSFVLWSMICGLIPLDPNRVTILVLSRLFVGVAQGFIFPAIHTVLAQWVPPQERSRSVSLTTSGMYLGAACGMLFFPSLVKHMGPQSVFFVEAVLGAAWSVIWLKFSSDPPRTDLPKVSMPKVPSRDMIKAQAGGVVAPRTVKIPWRRIIFSLPVWAIVVNNFTFHYALYVLMNWLPTYFELGLKLSLQDMGSSKMLPYFNMFIFSNIGGVVADHLITRRILSVTKTRKLLNTIGFIVSAFALMALPLFSTPSGTVMCSAISLGFLALGRAGFAVNHMDVAPKFAGIVMGVSNTAGTLAGIVGVGLTGNILEAAKASNKDLTDSETWKTVFFVPAYLCIFSSVIFLIFSTGEKIFE

SEQ ID NO: 12940 - protein, 387 aa, Zea mays subsp. mays
  peptide (1)..(387): Ceres Seq. ID no. 12342414
  misc_feature (1)..(386): Pfam Name: Sugar (and other) transporter Pfam Description: Sugar (and other) transporter
  misc_feature (1)..(387): Homolog of NCBI NO: 15241475 NR Description: Na+-dependent inorganic phosphate
  misc_feature (1)..(387): Homolog of NCBI NO: 15227589 NR Description: putative Na+-dependent inorganic phosphate protein id: At2g29650.1, supported by cDNA: gi_17064975
  misc_feature (1)..(387): Homolog of NCBI NO: 17064976 NR Description: putative Na+-dependent inorganic phosphate
  misc_feature (1)..(387): Homolog of NCBI NO: 34903342 NR Description: unnamed protein product [Oryza sativa (japonica group)] >gi|6498428|dbj|BAA87831.1| unnamed protein product
  misc_feature (1)..(343): Homolog of NCBI NO: 30678625 NR Description: expressed protein [Arabidopsis thaliana]
  misc_feature (1)..(383): Homolog of NCBI NO: 31248034 NR Description: ENSANGP00000010934 [Anopheles gambiae]
  misc_feature (1)..(384): Homolog of NCBI NO: 9966811 NR Description: differentiation-associated Na-dependent inorganic
  misc_feature (1)..(384): Homolog of NCBI NO: 21322234 NR Description: vesicular glutamate transporter 3 [Homo sapiens]
  misc_feature (1)..(384): Homolog of NCBI NO: 16758166 NR Description: differentation-associated Na-dependent inorganic
  misc_feature (1)..(383): Homolog of NCBI NO: 27370146 NR Description: hypothetical protein 4732491M05 [Mus musculus]
MILSMFYYGYVLSQIPGGWAAQRIGGRRVLLLSFVLWSMICGLIPLDPNRVTILVLSRLFVGVAQGFIFPAIHTVLAQWVPPQERSRSVSLTTSGMYLGAACGMLFFPSLVKHMGPQSVFFVEAVLGAAWSVIWLKFSSDPPRTDLPKVSMPKVPSRDMIKAQAGGVVAPRTVKIPWRRIIFSLPVWAIVVNNFTFHYALYVLMNWLPTYFELGLKLSLQDMGSSKMLPYFNMFIFSNIGGVVADHLITRRILSVTKTRKLLNTIGFIVSAFALMALPLFSTPSGTVMCSAISLGFLALGRAGFAVNHMDVAPKFAGIVMGVSNTAGTLAGIVGVGLTGNILEAAKASNKDLTDSETWKTVFFVPAYLCIFSSVIFLIFSTGEKIFE

SEQ ID NO: 12941 - DNA, 1298 bp, Zea mays subsp. mays
  misc_feature (1)..(1298): Ceres Seq. ID no. 12347470
  misc_feature: MA Experiment ID: 108502 Result: Down-regulated in Transcription
  misc_feature: MA Experiment 108502 PARAMETER Experiment Name: Zm_Drought_P Parameter: Age (day) Value: 8
  misc_feature: MA Experiment 108502 PARAMETER Experiment Name: Zm_Drought_P Parameter: Organism Value: Zea mays
  misc_feature: MA Experiment 108502 PARAMETER Experiment Name: Zm_Drought_P Parameter: Plant Line Value: 35A19
  misc_feature: MA Experiment 108502 PARAMETER Experiment Name: Zm_Drought_P Parameter: Timepoint (hr) Value: 1
  misc_feature: MA Experiment 108502 PARAMETER Experiment Name: Zm_Drought_P Parameter: Tissue Value: Aerial
  misc_feature: MA Experiment 108502 PARAMETER Experiment Name: Zm_Drought_P Parameter: Treatment Value: Drought vs. No Drought
  misc_feature: MA Experiment ID: 108515 Result: Up-regulated in Transcription
  misc_feature: MA Experiment 108515 PARAMETER Experiment Name: Zm_2mM_SA_P Parameter: Age (day) Value: 8
  misc_feature: MA Experiment 108515 PARAMETER Experiment Name: Zm_2mM_SA_P Parameter: Organism Value: Zea mays
  misc_feature: MA Experiment 108515 PARAMETER Experiment Name: Zm_2mM_SA_P Parameter: Plant Line Value: 35A19
  misc_feature: MA Experiment 108515 PARAMETER Experiment Name: Zm_2mM_SA_P Parameter: Timepoint (hr) Value: 12
  misc_feature: MA Experiment 108515 PARAMETER Experiment Name: Zm_2mM_SA_P Parameter: Tissue Value: Aerial
  misc_feature: MA Experiment 108515 PARAMETER Experiment Name: Zm_2mM_SA_P Parameter: Treatment Value: 2mM SA vs. No Treatment
  misc_feature: MA Experiment ID: 108526 Result: Up-regulated in Transcription
  misc_feature: MA Experiment 108526 PARAMETER Experiment Name: Zm_5mM_NO_P Parameter: Age (day) Value: 8
  misc_feature: MA Experiment 108526 PARAMETER Experiment Name: Zm_5mM_NO_P Parameter: Organism Value: Zea mays
  misc_feature: MA Experiment 108526 PARAMETER Experiment Name: Zm_5mM_NO_P Parameter: Plant Line Value: 35A19
  misc_feature: MA Experiment 108526 PARAMETER Experiment Name: Zm_5mM_NO_P Parameter: Timepoint (hr) Value: 1
  misc_feature: MA Experiment 108526 PARAMETER Experiment Name: Zm_5mM_NO_P Parameter: Tissue Value: Aerial
  misc_feature: MA Experiment 108526 PARAMETER Experiment Name: Zm_5mM_NO_P Parameter: Treatment Value: 5mM NO vs. No Treatment
  misc_feature: MA Experiment ID: 108527 Result: Up-regulated in Transcription
  misc_feature: MA Experiment 108527 PARAMETER Experiment Name: Zm_5mM_NO_P Parameter: Age (day) Value: 8
  misc_feature: MA Experiment 108527 PARAMETER Experiment Name: Zm_5mM_NO_P Parameter: Organism Value: Zea mays
  misc_feature: MA Experiment 108527 PARAMETER Experiment Name: Zm_5mM_NO_P Parameter: Plant Line Value: 35A19
  misc_feature: MA Experiment 108527 PARAMETER Experiment Name: Zm_5mM_NO_P Parameter: Timepoint (hr) Value: 6
  misc_feature: MA Experiment 108527 PARAMETER Experiment Name: Zm_5mM_NO_P Parameter: Tissue Value: Aerial
  misc_feature: MA Experiment 108527 PARAMETER Experiment Name: Zm_5mM_NO_P Parameter: Treatment Value: 5mM NO vs. No Treatment
  misc_feature: MA Experiment ID: 108529 Result: Up-regulated in Transcription
  misc_feature: MA Experiment 108529 PARAMETER Experiment Name: Zm_Imbibed_Seeds_P Parameter: Age (day) Value: 5 vs. 2
  misc_feature: MA Experiment 108529 PARAMETER Experiment Name: Zm_Imbibed_Seeds_P Parameter: Organism Value: Zea mays
  misc_feature: MA Experiment 108529 PARAMETER Experiment Name: Zm_Imbibed_Seeds_P Parameter: Plant Line Value: 35A19
  misc_feature: MA Experiment 108529 PARAMETER Experiment Name: Zm_Imbibed_Seeds_P Parameter: Tissue Value: Roots vs. Embryo
  misc_feature: MA Experiment ID: 108530 Result: Down-regulated in Transcription
  misc_feature: MA Experiment 108530 PARAMETER Experiment Name: Zm_Imbibed_Seeds_P Parameter: Age (day) Value: 6 vs. 2
  misc_feature: MA Experiment 108530 PARAMETER Experiment Name: Zm_Imbibed_Seeds_P Parameter: Organism Value: Zea mays
  misc_feature: MA Experiment 108530 PARAMETER Experiment Name: Zm_Imbibed_Seeds_P Parameter: Plant Line Value: 35A19
  misc_feature: MA Experiment 108530 PARAMETER Experiment Name: Zm_Imbibed_Seeds_P Parameter: Tissue Value: Aerial vs. Embryo
  misc_feature: MA Experiment ID: 108534 Result: Up-regulated in Transcription
  misc_feature: MA Experiment 108534 PARAMETER Experiment Name: Zm_4deg_Cold_P Parameter: Age (hr) Value: 8
  misc_feature: MA Experiment 108534 PARAMETER Experiment Name: Zm_4deg_Cold_P Parameter: Organism Value: Zea mays
  misc_feature: MA Experiment 108534 PARAMETER Experiment Name: Zm_4deg_Cold_P Parameter: Plant Line Value: 35A19
  misc_feature: MA Experiment 108534 PARAMETER Experiment Name: Zm_4deg_Cold_P Parameter: Temperature (deg C) Value: 4 vs. 22
  misc_feature: MA Experiment 108534 PARAMETER Experiment Name: Zm_4deg_Cold_P Parameter: Timepoint (hr) Value: 6
  misc_feature: MA Experiment 108534 PARAMETER Experiment Name: Zm_4deg_Cold_P Parameter: Tissue Value: Aerial
  misc_feature: MA Experiment ID: 108535 Result: Down-regulated in Transcription
  misc_feature: MA Experiment 108535 PARAMETER Experiment Name: Zm_Meristem_P Parameter: Age (day) Value: 8
  misc_feature: MA Experiment 108535 PARAMETER Experiment Name: Zm_Meristem_P Parameter: Organism Value: Zea mays
  misc_feature: MA Experiment 108535 PARAMETER Experiment Name: Zm_Meristem_P Parameter: Plant Line Value: 35A19
  misc_feature: MA Experiment 108535 PARAMETER Experiment Name: Zm_Meristem_P Parameter: Tissue Value: Root Meristem vs. Above Root Meristem
  misc_feature: MA Experiment ID: 108543 Result: Up-regulated in Transcription
  misc_feature: MA Experiment ID: 108544 Result: Down-regulated in Transcription
  misc_feature: MA Experiment ID: 108545 Result: Down-regulated in Transcription
  misc_feature: MA Experiment 108545 PARAMETER Experiment Name: Zm_Imbibed_Seeds_P Parameter: Age (day) Value: 3 vs. 2
  misc_feature: MA Experiment 108545 PARAMETER Experiment Name: Zm_Imbibed_Seeds_P Parameter: Organism Value: Zea mays
  misc_feature: MA Experiment 108545 PARAMETER Experiment Name: Zm_Imbibed_Seeds_P Parameter: Plant Line Value: 35A19
  misc_feature: MA Experiment 108545 PARAMETER Experiment Name: Zm_Imbibed_Seeds_P Parameter: Tissue Value: Aerial vs. Embryo
  misc_feature: MA Experiment ID: 108546 Result: Up-regulated in Transcription
  misc_feature: MA Experiment 108546 PARAMETER Experiment Name: Zm_Imbibed_Seeds_P Parameter: Age (day) Value: 3 vs. 2
  misc_feature: MA Experiment 108546 PARAMETER Experiment Name: Zm_Imbibed_Seeds_P Parameter: Organism Value: Zea mays
  misc_feature: MA Experiment 108546 PARAMETER Experiment Name: Zm_Imbibed_Seeds_P Parameter: Plant Line Value: 35A19
  misc_feature: MA Experiment 108546 PARAMETER Experiment Name: Zm_Imbibed_Seeds_P Parameter: Tissue Value: Roots vs. Embryo
  misc_feature: MA Experiment ID: 108559 Result: Up-regulated in Transcription
  misc_feature: MA Experiment 108559 PARAMETER Experiment Name: Zm_5mM_NO_P Parameter: Age (day) Value: 8
  misc_feature: MA Experiment 108559 PARAMETER Experiment Name: Zm_5mM_NO_P Parameter: Organism Value: Zea mays
  misc_feature: MA Experiment 108559 PARAMETER Experiment Name: Zm_5mM_NO_P Parameter: Plant Line Value: 35A19
  misc_feature: MA Experiment 108559 PARAMETER Experiment Name: Zm_5mM_NO_P Parameter: Timepoint (hr) Value: 12
  misc_feature: MA Experiment 108559 PARAMETER Experiment Name: Zm_5mM_NO_P Parameter: Tissue Value: Aerial
  misc_feature: MA Experiment 108559 PARAMETER Experiment Name: Zm_5mM_NO_P Parameter: Treatment Value: 5mM NO vs. No Treatment
  misc_feature: MA Experiment ID: 108687 Result: Down-regulated in Transcription
  misc_feature: MA Experiment 108687 PARAMETER Experiment Name: Zm_Embryos-Flowers__P Parameter: Tissue Value: Embryo vs. Aerial+
  misc_feature: MA Experiment ID: 20000487 Result: Down-regulated in Transcription
  misc_feature: MA Experiment 20000487 PARAMETER Experiment Name: Zm_50mM_NH4NO3_L_to_H_P Parameter: Organism Value: Zea mays
  misc_feature: MA Experiment 20000487 PARAMETER Experiment Name: Zm_50mM_NH4NO3_L_to_H_P Parameter: Timepoint (hr) Value: 4
  misc_feature: MA Experiment 20000487 PARAMETER Experiment Name: Zm_50mM_NH4NO3_L_to_H_P Parameter: Tissue Value: Leaves
  misc_feature: MA Experiment 20000487 PARAMETER Experiment Name: Zm_50mM_NH4NO3_L_to_H_P Parameter: Treatment Value: 50mM NH4NO3 vs. 100mM Mannitol
  misc_feature: MA Experiment ID: 20000532 Result: Up-regulated in Transcription
  misc_feature: MA Experiment 20000532 PARAMETER Experiment Name: Zm_0.001percent_MeJA_P Parameter: Age (day) Value: 10
  misc_feature: MA Experiment 20000532 PARAMETER Experiment Name: Zm_0.001percent_MeJA_P Parameter: Organism Value: Zea mays
  misc_feature: MA Experiment 20000532 PARAMETER Experiment Name: Zm_0.001percent_MeJA_P Parameter: Plant Line Value: 35A19
  misc_feature: MA Experiment 20000532 PARAMETER Experiment Name: Zm_0.001percent_MeJA_P Parameter: Timepoint (hr) Value: 48
  misc_feature: MA Experiment 20000532 PARAMETER Experiment Name: Zm_0.001percent_MeJA_P Parameter: Tissue Value: Aerial
  misc_feature: MA Experiment 20000532 PARAMETER Experiment Name: Zm_0.001percent_MeJA_P Parameter: Treatment Value: 0.001percent MeJA vs. No Treatment
  misc_feature: MA Experiment ID: 20000533 Result: Up-regulated in Transcription
  misc_feature: MA Experiment 20000533 PARAMETER Experiment Name: Zm_0.001percent_MeJA_P Parameter: Age (day) Value: 11
  misc_feature: MA Experiment 20000533 PARAMETER Experiment Name: Zm_0.001percent_MeJA_P Parameter: Organism Value: Zea mays
  misc_feature: MA Experiment 20000533 PARAMETER Experiment Name: Zm_0.001percent_MeJA_P Parameter: Plant Line Value: 35A19
  misc_feature: MA Experiment 20000533 PARAMETER Experiment Name: Zm_0.001percent_MeJA_P Parameter: Timepoint (hr) Value: 72
  misc_feature: MA Experiment 20000533 PARAMETER Experiment Name: Zm_0.001percent_MeJA_P Parameter: Tissue Value: Aerial
  misc_feature: MA Experiment 20000533 PARAMETER Experiment Name: Zm_0.001percent_MeJA_P Parameter: Treatment Value: 0.001percent MeJA vs. No Treatment
  misc_feature: MA Experiment ID: 20000535 Result: Down-regulated in Transcription
  misc_feature: MA Experiment 20000535 PARAMETER Experiment Name: Zm_Hybrid_Seed_Dev_P Parameter: DAP Value: 30 vs. 12
  misc_feature: MA Experiment 20000535 PARAMETER Experiment Name: Zm_Hybrid_Seed_Dev_P Parameter: Organism Value: Zea mays
  misc_feature: MA Experiment 20000535 PARAMETER Experiment Name: Zm_Hybrid_Seed_Dev_P Parameter: Plant Line Value: 35A19
  misc_feature: MA Experiment 20000535 PARAMETER Experiment Name: Zm_Hybrid_Seed_Dev_P Parameter: Tissue Value: Embryo vs. Unfert Floret
aattaaccatattggccagtgtacgtgggaacgatggccctcatgcaggagagtagtagccaggatttgctccaagctcacgacgagctcttgcaccattccctgtgcttcgccaaatcgctcgcgctcgccgtggcgctagacctccgcatccccgacgcgatccaccaccacggggccggcggcgccacccttctccagatcctcgccgagactgcgctccacccaagcaagcttcgcgcccttcgccgcctcatgcgcgtgctcaccgtcacgggcatcttcagcgtcgtcgagcaaccaccagcaggtggtggtgatgattcaaccgtccacacgtcggacgacgaagctgtcgtcgtctacaggttgacggcagcctcccgcttcctcgtcagcgacgacgtgagcacggcgaccttggctccctttgtgagtctggcgctccagcctatcgctgcctgtccgcacgccctgggtatctccgcgtggttccggcaggagcagcacgagccgtccccgtatggcctggcgttccgccagaccccaacgatctgggaacatgctgacgacgtaaacgccttgctgaacaaaggcatggccgcggacagccgcttcctcatgccaattgtgctgagggagtgcggcgagacgtttcgtgggatcgactcgttggttgacgtcggtggtggccatggtggcgccgccgccaccatcgccgccgccttcccccacctcaagtgcagcgtgcttgacctcccgcacgttgtcgccggtgctccgtctgatggcaacgtgcagttcgtcgcaggcaatatgtttgagagtattccacctgcaaccgctgttttcctcaagaaaactctacatgactggggtgacgatgagtctgtcaagatattgaagaattgcaagcaagccatatctccacgggatgcaggtgggaaggtaataatcttggatgtggtagttggatataaacagtcaaacataaagcatcaagagacacaagttatgtttgatttgtatatgatggcggttaacggagttgagcgtgacgagcaagagtggaagaagatcttcactgaagctggattcaaagactacaaaattctacccgtcattggtgatgtatcggtcatcatcgaggtctatccttgaatgctttgtgaacaaaggcctccataataaactgaagaccaagaaggtgttgatagtatattatgaattgttatttgtcctgtacacttgattctttgcgtatttgtaatgacaagttgagtaattgtgtttttgtc

SEQ ID NO: 12942 - protein, 375 aa, Zea mays subsp. mays
  peptide (1)..(375): Ceres Seq. ID no. 12347471
  misc_feature (104)..(351): Pfam Name: O-methyltransferase Pfam Description: O-methyltransferase
  misc_feature (7)..(375): Homolog of NCBI NO: 1353193 NR Description: O-METHYLTRANSFERASE ZRP4 (OMT)
  misc_feature (5)..(375): Homolog of NCBI NO: 37530606 NR Description: putative o-methyltransferase ZRP4 [Oryza sativa
  misc_feature (5)..(375): Homolog of NCBI NO: 37530600 NR Description: putative o-methyltransferase ZRP4 [Oryza sativa
  misc_feature (8)..(375): Homolog of NCBI NO: 4098238 NR Description: o-methyltransferase [Triticum aestivum]
  misc_feature (1)..(375): Homolog of NCBI NO: 2130032 NR Description: catechol O-methyltransferase (EC 2.1.1.6) - barley
  misc_feature (1)..(375): Homolog of NCBI NO: 453244 NR Description: flavonoid 7-O-methyltransferase [Hordeum vulgare
  misc_feature (103)..(375): Homolog of NCBI NO: 20514369 NR Description: orcinol O-methyltransferase [Rosa hybrid cultivar]
  misc_feature (9)..(123): Homolog of NCBI NO: 20514369 NR Description: orcinol O-methyltransferase [Rosa hybrid cultivar]
  misc_feature (10)..(375): Homolog of NCBI NO: 22093735 NR Description: putative o-methyltransferase [Oryza sativa
  misc_feature (111)..(375): Homolog of NCBI NO: 2282586 NR Description: methyltransferase [Prunus armeniaca]
MALMQESSSQDLLQAHDELLHHSLCFAKSLALAVALDLRIPDAIHHHGAGGATLLQILAETALHPSKLRALRRLMRVLTVTGIFSVVEQPPAGGGDDSTVHTSDDEAVVVYRLTAASRFLVSDDVSTATLAPFVSLALQPIAACPHALGISAWFRQEQHEPSPYGLAFRQTPTIWEHADDVNALLNKGMAADSRFLMPIVLRECGETFRGIDSLVDVGGGHGGAAATIAAAFPHLKCSVLDLPHVVAGAPSDGNVQFVAGNMFESIPPATAVFLKKTLHDWGDDESVKILKNCKQAISPRDAGGKVIILDVVVGYKQSNIKHQETQVMFDLYMMAVNGVERDEQEWKKIFTEAGFKDYKILPVIGDVSVIIEVYP

SEQ ID NO: 12943 - protein, 372 aa, Zea mays subsp. mays
  peptide (1)..(372): Ceres Seq. ID no. 12347472
  misc_feature (101)..(348): Pfam Name: O-methyltransferase Pfam Description: O-methyltransferase
  misc_feature (4)..(372): Homolog of NCBI NO: 1353193 NR Description: O-METHYLTRANSFERASE ZRP4 (OMT)
  misc_feature (2)..(372): Homolog of NCBI NO: 37530606 NR Description: putative o-methyltransferase ZRP4 [Oryza sativa
  misc_feature (2)..(372): Homolog of NCBI NO: 37530600 NR Description: putative o-methyltransferase ZRP4 [Oryza sativa
  misc_feature (5)..(372): Homolog of NCBI NO: 4098238 NR Description: o-methyltransferase [Triticum aestivum]
  misc_feature (1)..(372): Homolog of NCBI NO: 2130032 NR Description: catechol O-methyltransferase (EC 2.1.1.6) - barley
  misc_feature (1)..(372): Homolog of NCBI NO: 453244 NR Description: flavonoid 7-O-methyltransferase [Hordeum vulgare
  misc_feature (100)..(372): Homolog of NCBI NO: 20514369 NR Description: orcinol O-methyltransferase [Rosa hybrid cultivar]
  misc_feature (6)..(120): Homolog of NCBI NO: 20514369 NR Description: orcinol O-methyltransferase [Rosa hybrid cultivar]
  misc_feature (7)..(372): Homolog of NCBI NO: 22093735 NR Description: putative o-methyltransferase [Oryza sativa
  misc_feature (108)..(372): Homolog of NCBI NO: 2282586 NR Description: methyltransferase [Prunus armeniaca]
MQESSSQDLLQAHDELLHHSLCFAKSLALAVALDLRIPDAIHHHGAGGATLLQILAETALHPSKLRALRRLMRVLTVTGIFSVVEQPPAGGGDDSTVHTSDDEAVVVYRLTAASRFLVSDDVSTATLAPFVSLALQPIAACPHALGISAWFRQEQHEPSPYGLAFRQTPTIWEHADDVNALLNKGMAADSRFLMPIVLRECGETFRGIDSLVDVGGGHGGAAATIAAAFPHLKCSVLDLPHVVAGAPSDGNVQFVAGNMFESIPPATAVFLKKTLHDWGDDESVKILKNCKQAISPRDAGGKVIILDVVVGYKQSNIKHQETQVMFDLYMMAVNGVERDEQEWKKIFTEAGFKDYKILPVIGDVSVIIEVYP

SEQ ID NO: 12944 - protein, 301 aa, Zea mays subsp. mays
  peptide (1)..(301): Ceres Seq. ID no. 12347473
  misc_feature (30)..(277): Pfam Name: O-methyltransferase Pfam Description: O-methyltransferase
  misc_feature (1)..(301): Homolog of NCBI NO: 453244 NR Description: flavonoid 7-O-methyltransferase [Hordeum vulgare
  misc_feature (29)..(301): Homolog of NCBI NO: 20514369 NR Description: orcinol O-methyltransferase [Rosa hybrid cultivar]
  misc_feature (1)..(49): Homolog of NCBI NO: 20514369 NR Description: orcinol O-methyltransferase [Rosa hybrid cultivar]
  misc_feature (1)..(301): Homolog of NCBI NO: 37530606 NR Description: putative o-methyltransferase ZRP4 [Oryza sativa
  misc_feature (1)..(301): Homolog of NCBI NO: 4098238 NR Description: o-methyltransferase [Triticum aestivum]
  misc_feature (1)..(301): Homolog of NCBI NO: 2130032 NR Description: catechol O-methyltransferase (EC 2.1.1.6) - barley
  misc_feature (1)..(301): Homolog of NCBI NO: 37530600 NR Description: putative o-methyltransferase ZRP4 [Oryza sativa
  misc_feature (1)..(301): Homolog of NCBI NO: 1353193 NR Description: O-METHYLTRANSFERASE ZRP4 (OMT)
  misc_feature (1)..(301): Homolog of NCBI NO: 22093735 NR Description: putative o-methyltransferase [Oryza sativa
  misc_feature (37)..(301): Homolog of NCBI NO: 2282586 NR Description: methyltransferase [Prunus armeniaca]
MRVLTVTGIFSVVEQPPAGGGDDSTVHTSDDEAVVVYRLTAASRFLVSDDVSTATLAPFVSLALQPIAACPHALGISAWFRQEQHEPSPYGLAFRQTPTIWEHADDVNALLNKGMAADSRFLMPIVLRECGETFRGIDSLVDVGGGHGGAAATIAAAFPHLKCSVLDLPHVVAGAPSDGNVQFVAGNMFESIPPATAVFLKKTLHDWGDDESVKILKNCKQAISPRDAGGKVIILDVVVGYKQSNIKHQETQVMFDLYMMAVNGVERDEQEWKKIFTEAGFKDYKILPVIGDVSVIIEVYP

SEQ ID NO: 12945 - DNA, 1307 bp, Zea mays subsp. mays
  misc_feature (1)..(1307): Ceres Seq. ID no. 12414595
  misc_feature: MA Experiment ID: 108527 Result: Down-regulated in Transcription
  misc_feature: MA Experiment 108527 PARAMETER Experiment Name: Zm_5mM_NO_P Parameter: Age (day) Value: 8
  misc_feature: MA Experiment 108527 PARAMETER Experiment Name: Zm_5mM_NO_P Parameter: Organism Value: Zea mays
  misc_feature: MA Experiment 108527 PARAMETER Experiment Name: Zm_5mM_NO_P Parameter: Plant Line Value: 35A19
  misc_feature: MA Experiment 108527 PARAMETER Experiment Name: Zm_5mM_NO_P Parameter: Timepoint (hr) Value: 6
  misc_feature: MA Experiment 108527 PARAMETER Experiment Name: Zm_5mM_NO_P Parameter: Tissue Value: Aerial
  misc_feature: MA Experiment 108527 PARAMETER Experiment Name: Zm_5mM_NO_P Parameter: Treatment Value: 5mM NO vs. No Treatment
atagagtagattagtgggggaactggacgtaaccgtaatattcactctgcgccccaccctcttgttctccggttccccgcgacatactctttcctgctctctctctcggttctgccgtgtccctcgcgtgcgctctgtctccggtggcgccgcctccgccgcctccgtcgccctgcgccagatcagattcgtggatatggctgataatgagaaagaagcgggggagggaaccaccccccgaggggcggactgggaagttgtgactctcacagcatctgcctatgaagcggcgccaggacctgtcggaacagaagtaaagcctgttaatgaaaatcaagagcatagttcatccaatgcactgctcatgtctgaccactttgtgtttccgccgagtgagcacgagaacctgccaatacaaaccagtttcgatgagatacagcctgagaaggatgtgcagaaacctagtaccactgtggaggattatagtaataagaatgttgttgggtctgagagagttcagtttgatgatgaagggaaagacctcttagatgatgatgtggagatgagagatgacacacctgggtacggttcatcccacgctgaagatgatgcacatggttttgttgttcacgatgatggtgttgagtccggtgaagattttgatgaaaaatcaggccacccttcagatcctgcagacagcaggagctgtgatactggcgcctcatgcaaatgttggttgaagaagcatatgacatgcttgtataaccaagcaaaggaaacaaatgctatctggtctgtggtggttgcagctgcactagttggtattgtgattttgggacgttggcacaaagataaattgcaccttaaccagcttaagtggcgctctggctcagcagtgagaggatgatcaacaagtcgtttgtgctgctctgatgaatcaattcaattcaagccataaccaagacggtttccgcaatgttattgtgatgatgacgaaaaggggtatgttcaatgcaataatatgatgttcgactggaatttcacttaccgccctacaatgagtgcctcgtgggcttctaagatgtcaaatccacttctgccatacacattatcttacagctttacttgcgacctggcacatgatttttggttcctgctacttttgctgtggtatatcatatatgttgactaaatggctgtagaacgtagcattgtatactgcgaagtctgctaaaaatcttggtggttctgcgagagcaactcacatgcaattgtgaaaatggagaacaaggaaaatttgtttggct

SEQ ID NO: 12946 - protein, 236 aa, Zea mays subsp. mays
  peptide (1)..(236): Ceres Seq. ID no. 12414596
  misc_feature (1)..(236): Homolog of NCBI NO: 1808686 NR Description: hypothetical protein [Sporobolus stapfianus]
  misc_feature (37)..(236): Homolog of NCBI NO: 38346457 NR Description: OSJNBa0019G23.5 [Oryza sativa (japonica
  misc_feature (1)..(47): Homolog of NCBI NO: 38346457 NR Description: OSJNBa0019G23.5 [Oryza sativa (japonica
  misc_feature (37)..(138): Homolog of NCBI NO: 10241633 NR Description: hypothetical protein [Oryza sativa (indica
  misc_feature (1)..(47): Homolog of NCBI NO: 10241633 NR Description: hypothetical protein [Oryza sativa (indica
  misc_feature (1)..(230): Homolog of NCBI NO: 7486469 NR Description: hypothetical protein At2g45980 [imported] -
  misc_feature (1)..(230): Homolog of NCBI NO: 18406940 NR Description: expressed protein; protein id: At2g45980.1, by cDNA: 13925., supported by cDNA: gi_13877854, supported by gi_17065597 [Arabidopsis thaliana]
  misc_feature (1)..(230): Homolog of NCBI NO: 21553358 NR Description: unknown [Arabidopsis thaliana]
  misc_feature (1)..(230): Homolog of NCBI NO: 18411306 NR Description: Expressed protein; protein id: At4g00355.1, by cDNA: 39479., supported by cDNA: gi_18252216 [Arabidopsis >gi|18252217|gb|AAL61941.1| unknown protein [Arabidopsis
  misc_feature (1)..(230): Homolog of NCBI NO: 30678620 NR Description: expressed protein [Arabidopsis thaliana]
MADNEKEAGEGTTPRGADWEVVTLTASAYEAAPGPVGTEVKPVNENQEHSSSNALLMSDHFVFPPSEHENLPIQTSFDEIQPEKDVQKPSTTVEDYSNKNVVGSERVQFDDEGKDLLDDDVEMRDDTPGYGSSHAEDDAHGFVVHDDGVESGEDFDEKSGHPSDPADSRSCDTGASCKCWLKKHMTCLYNQAKETNAIWSVVVAAALVGIVILGRWHKDKLHLNQLKWRSGSAVRG

SEQ ID NO: 12947 - protein, 180 aa, Zea mays subsp. mays
  peptide (1)..(180): Ceres Seq. ID no. 12414597
  misc_feature (1)..(180): Homolog of NCBI NO: 1808686 NR Description: hypothetical protein [Sporobolus stapfianus]
  misc_feature (1)..(180): Homolog of NCBI NO: 38346457 NR Description: OSJNBa0019G23.5 [Oryza sativa (japonica
  misc_feature (1)..(82): Homolog of NCBI NO: 10241633 NR Description: hypothetical protein [Oryza sativa (indica
  misc_feature (1)..(174): Homolog of NCBI NO: 7486469 NR Description: hypothetical protein At2g45980 [imported] -
  misc_feature (1)..(174): Homolog of NCBI NO: 18406940 NR Description: expressed protein; protein id: At2g45980.1, by cDNA: 13925., supported by cDNA: gi_13877854, supported by gi_17065597 [Arabidopsis thaliana]
  misc_feature (1)..(174): Homolog of NCBI NO: 21553358 NR Description: unknown [Arabidopsis thaliana]
  misc_feature (1)..(174): Homolog of NCBI NO: 18411306 NR Description: Expressed protein; protein id: At4g00355.1, by cDNA: 39479., supported by cDNA: gi_18252216 [Arabidopsis >gi|18252217|gb|AAL61941.1| unknown protein [Arabidopsis
  misc_feature (1)..(174): Homolog of NCBI NO: 30678620 NR Description: expressed protein [Arabidopsis thaliana]
  misc_feature (1)..(49): Homolog of NCBI NO: 22324443 NR Description: contains ESTs
  misc_feature (115)..(176): Homolog of NCBI NO: 22324443 NR Description: contains ESTs
MSDHFVFPPSEHENLPIQTSFDEIQPEKDVQKPSTTVEDYSNKNVVGSERVQFDDEGKDLLDDDVEMRDDTPGYGSSHAEDDAHGFVVHDDGVESGEDFDEKSGHPSDPADSRSCDTGASCKCWLKKHMTCLYNQAKETNAIWSVVVAAALVGIVILGRWHKDKLHLNQLKWRSGSAVRG

SEQ ID NO: 12948 - DNA, 937 bp, Zea mays subsp. mays
  misc_feature (1)..(937): Ceres Seq. ID no. 12369109
  misc_feature: MA Experiment ID: 20000479 Result: Up-regulated in Transcription
  misc_feature: MA Experiment 20000479 PARAMETER Experiment Name: Zm_Drought_P Parameter: Age (day) Value: 10
  misc_feature: MA Experiment 20000479 PARAMETER Experiment Name: Zm_Drought_P Parameter: Organism Value: Zea mays
  misc_feature: MA Experiment 20000479 PARAMETER Experiment Name: Zm_Drought_P Parameter: Plant Line Value: 35A19
  misc_feature: MA Experiment 20000479 PARAMETER Experiment Name: Zm_Drought_P Parameter: Timepoint (hr) Value: 48
  misc_feature: MA Experiment 20000479 PARAMETER Experiment Name: Zm_Drought_P Parameter: Tissue Value: Aerial
  misc_feature: MA Experiment 20000479 PARAMETER Experiment Name: Zm_Drought_P Parameter: Treatment Value: Drought vs. No Drought
acaagtttgggtatacaccagataatctcatatacaagagtcttgactttggtgttgatcttgactctagaatcgcattggttggtcccaacggggcagggaagagcactcttctgaagcttatgactggtgaccttgttccattagatggcatggttcggcgccacaatcacctgcgcattgcgcagtaccatcagcatctggcggagaagctggatctggacatgtcagccctggcttacatgatgaaggaataccctgggactgaagaagaaaagatgcgagccgctgttggcaggttcggcctgtcaggaaaggcgcaggtgatgccgatgaagaatctttctgatgggcaaaggagccgcgtcatctttgcatggctggcatataggcagccgcaactgctactgcttgatgagccgacaaaccatctggatatcgagaccattgactcactggcagaggcgctgaatgagtgggatggtggtttggtcttggtgagccacgatttcaggctgatcaaccaggtcgctcaggagatctgggtgtgtgagaatcaagaggtgacaaggtgggaaggcgatatcatggatttcaaggcacacttgaagagcaaggctggtttatctgattagaatgcttgtctagtaaccatgaactttttaactctgtatgatgaagtccctgttttccagtagcgaactatcaaatatactgttagggatagtttgggaaacacaaatccggagtggattggaggggctagaatcccctttttattcaattttgaatcagaagggtattctatcccttccggttttctccggttttctggctcccaaactagcccttaatgtgtccgactccttaagacttccctcgcaaccatactaccttatactacctggaatttttatttatatatatttgaaatgtt

SEQ ID NO: 12949 - protein, 210 aa, Zea mays subsp. mays
  peptide (1)..(210): Ceres Seq. ID no. 12369110
  misc_feature (21)..(186): Pfam Name: ABC transporter Pfam Description: ABC transporter
  misc_feature (2)..(210): Homolog of NCBI NO: 28071305 NR Description: putative ABC transporter [Oryza sativa (japonica
  misc_feature (2)..(210): Homolog of NCBI NO: 15239436 NR Description: ABC transporter family protein; protein id: [Arabidopsis thaliana] >gi|10176907|dbj|BAB10100.1| ABC
  misc_feature (2)..(161): Homolog of NCBI NO: 7573600 NR Description: ABC transporter homolog [Populus nigra]
  misc_feature (2)..(205): Homolog of NCBI NO: 3005931 NR Description: ABC transporter [Homo sapiens]
  misc_feature (2)..(205): Homolog of NCBI NO: 10179834 NR Description: iron inhibited ABC transporter 2 [Homo sapiens]
  misc_feature (2)..(205): Homolog of NCBI NO: 10947137 NR Description: ATP-binding cassette, sub-family F, member 2 b; ABC- type transport protein; Iron inhibited ABC transporter 2
  misc_feature (2)..(205): Homolog of NCBI NO: 27707592 NR Description: similar to ATP-binding cassette, sub-family F,
  misc_feature (2)..(205): Homolog of NCBI NO: 27881506 NR Description: ATP-binding cassette, sub-family F, member 2 a; ABC- type transport protein; Iron inhibited ABC transporter 2
  misc_feature (2)..(205): Homolog of NCBI NO: 23956078 NR Description: ATP-binding cassette, sub-family F (GCN20),
  misc_feature (2)..(207): Homolog of NCBI NO: 28436765 NR Description: Similar to ATP-binding cassette, sub-family F
KFGYTPDNLIYKSLDFGVDLDSRIALVGPNGAGKSTLLKLMTGDLVPLDGMVRRHNHLRIAQYHQHLAEKLDLDMSALAYMMKEYPGTEEEKMRAAVGRFGLSGKAQVMPMKNLSDGQRSRVIFAWLAYRQPQLLLLDEPTNHLDIETIDSLAEALNEWDGGLVLVSHDFRLINQVAQEIWVCENQEVTRWEGDIMDFKAHLKSKAGLSD

SEQ ID NO: 12950 - protein, 170 aa, Zea mays subsp. mays
  peptide (1)..(170): Ceres Seq. ID no. 12369111
  misc_feature (1)..(146): Pfam Name: ABC transporter Pfam Description: ABC transporter
  misc_feature (1)..(170): Homolog of NCBI NO: 28071305 NR Description: putative ABC transporter [Oryza sativa (japonica
  misc_feature (1)..(170): Homolog of NCBI NO: 15239436 NR Description: ABC transporter family protein; protein id: [Arabidopsis thaliana] >gi|10176907|dbj|BAB10100.1| ABC
  misc_feature (1)..(121): Homolog of NCBI NO: 7573600 NR Description: ABC transporter homolog [Populus nigra]
  misc_feature (1)..(165): Homolog of NCBI NO: 3005931 NR Description: ABC transporter [Homo sapiens]
  misc_feature (1)..(165): Homolog of NCBI NO: 10179834 NR Description: iron inhibited ABC transporter 2 [Homo sapiens]
  misc_feature (1)..(165): Homolog of NCBI NO: 10947137 NR Description: ATP-binding cassette, sub-family F, member 2 b; ABC- type transport protein; Iron inhibited ABC transporter 2
  misc_feature (1)..(165): Homolog of NCBI NO: 27881506 NR Description: ATP-binding cassette, sub-family F, member 2 a; ABC- type transport protein; Iron inhibited ABC transporter 2
  misc_feature (1)..(165): Homolog of NCBI NO: 27707592 NR Description: similar to ATP-binding cassette, sub-family F,
  misc_feature (1)..(165): Homolog of NCBI NO: 23956078 NR Description: ATP-binding cassette, sub-family F (GCN20),
  misc_feature (1)..(167): Homolog of NCBI NO: 28436765 NR Description: Similar to ATP-binding cassette, sub-family F
MTGDLVPLDGMVRRHNHLRIAQYHQHLAEKLDLDMSALAYMMKEYPGTEEEKMRAAVGRFGLSGKAQVMPMKNLSDGQRSRVIFAWLAYRQPQLLLLDEPTNHLDIETIDSLAEALNEWDGGLVLVSHDFRLINQVAQEIWVCENQEVTRWEGDIMDFKAHLKSKAGLSD

SEQ ID NO: 12951 - protein, 160 aa, Zea mays subsp. mays
  peptide (1)..(160): Ceres Seq. ID no. 12369112
  misc_feature (1)..(136): Pfam Name: ABC transporter Pfam Description: ABC transporter
  misc_feature (1)..(160): Homolog of NCBI NO: 28071305 NR Description: putative ABC transporter [Oryza sativa (japonica
  misc_feature (1)..(160): Homolog of NCBI NO: 15239436 NR Description: ABC transporter family protein; protein id: [Arabidopsis thaliana] >gi|10176907|dbj|BAB10100.1| ABC
  misc_feature (1)..(111): Homolog of NCBI NO: 7573600 NR Description: ABC transporter homolog [Populus nigra]
  misc_feature (1)..(155): Homolog of NCBI NO: 3005931 NR Description: ABC transporter [Homo sapiens]
  misc_feature (1)..(155): Homolog of NCBI NO: 10179834 NR Description: iron inhibited ABC transporter 2 [Homo sapiens]
  misc_feature (1)..(155): Homolog of NCBI NO: 10947137 NR Description: ATP-binding cassette, sub-family F, member 2 b; ABC- type transport protein; Iron inhibited ABC transporter 2
  misc_feature (1)..(155): Homolog of NCBI NO: 27881506 NR Description: ATP-binding cassette, sub-family F, member 2 a; ABC- type transport protein; Iron inhibited ABC transporter 2
  misc_feature (1)..(155): Homolog of NCBI NO: 27707592 NR Description: similar to ATP-binding cassette, sub-family F,
  misc_feature (1)..(155): Homolog of NCBI NO: 23956078 NR Description: ATP-binding cassette, sub-family F (GCN20),
  misc_feature (1)..(157): Homolog of NCBI NO: 28436765 NR Description: Similar to ATP-binding cassette, sub-family F
MVRRHNHLRIAQYHQHLAEKLDLDMSALAYMMKEYPGTEEEKMRAAVGRFGLSGKAQVMPMKNLSDGQRSRVIFAWLAYRQPQLLLLDEPTNHLDIETIDSLAEALNEWDGGLVLVSHDFRLINQVAQEIWVCENQEVTRWEGDIMDFKAHLKSKAGLSD

SEQ ID NO: 12952 - DNA, 1747 bp, Zea mays subsp. mays
  misc_feature (1)..(1747): Ceres Seq. ID no. 13637284
  misc_feature: MA Experiment ID: 108543 Result: Down-regulated in Transcription
  misc_feature: MA Experiment ID: 20000534 Result: Down-regulated in Transcription
  misc_feature: MA Experiment 20000534 PARAMETER Experiment Name: Zm_Hybrid_Pollen_P Parameter: Age (day) Value: 8
  misc_feature: MA Experiment 20000534 PARAMETER Experiment Name: Zm_Hybrid_Pollen_P Parameter: Organism Value: Zea mays
  misc_feature: MA Experiment 20000534 PARAMETER Experiment Name: Zm_Hybrid_Pollen_P Parameter: Plant Line Value: 35A19
  misc_feature: MA Experiment 20000534 PARAMETER Experiment Name: Zm_Hybrid_Pollen_P Parameter: Tissue Value: Pollen vs. Aerial
ggattgggctttcccctccgcctccctcccctcacaaaaaggcggcagcacagcgccacccctcctgtcccgccgagttcggagcgcagcgcaaggcggggggaggagcaagaagccgccggcctccctcctccggctcaccaccaggcttactccgcaccgcgctgccacgggtaggagcggcgtcaaattcgggattcccaagcggcttcagcccggaggttgagccaaagctattttctaagaaaaatggcggcaatgatggtggcgatgactgcgaggagcaagaacagcatattaaccgtggagaagaagcagggctggtctattcagctaccagagctccggttcccttgggattcacatgaagacaagggtttctctctaagtctgcaaggctctggaccttctcatggcggcctgtttgctagtgtgggtcttaaagtgtcgacaggtgcgccagcagtggcgcccggaccggggtgacaaggatattaagattccattcactgatcattgtatgaagtacgtgtccgaggcagttgggtaccaggttattagcactgaagctgagccagtggaggaggtggtggatgctaaggcaaagaaggcagccaagaaacgtgggctgcagctgaaaattaagattgggaacccacatttgaggaggctggttagtggagctattgcaggtgctgtttccaggacttgtgtggcaccactggagacgatcaggactcacttgatggttgggagcaacggtgactccatgacagaggtgttccagtcaatcatgaacactgaggggtggactgggcttttccgtgggaattttgtcaatgttatccgagttgcgccaagcaaagcaattgagctttttgcttttgatactgccaagaaattcttgactccaaaggctgatgagtctccaaagaccttcctacctccatcacttattgctggagcacttgcaggagtcagctcaaccctgtgcacatatcctttggagttgattaagaccagattgacgatagagaaagatgtctataacaacttcctccatgctttcgtcaagattttacgagaagaaggtccatcagagctctaccgtggtctgacaccaagtctgataggagtggtgccatatgccgcgactaattactacgcctatgacaccctaaagaagctctataggaagacgttcaagcaggaggagatcagcaacatcgcaactctcctaattggttcagccgctggcgccatctccagcactgccacattccctctcgaggtggcccgcaagcaaatgcaggtaggagcagtaggagggaggcaggtctacaagaatgtgttccatgcgctctactgcataatggagaaggaaggggttggcggcctgtacaaggggctcggaccgagctgcatcaagttgatgcctgcagcaggcatctcgttcatgtgctacgaggcctgtaagaagatcctggtcgaagacaatgaggatagtgagtgaagctgaagcatgtatgcccctgaggaggggtatgactgatgtgccaggctagaagaggtttgggttgggttgggttggggagtataccctagtattatcaactgatgaaaatgtagatccaagatatttgaacgccctttagatcataatttggttcagttttgtgctgaaatccataaacaatacactcacttgatggtgcatgttgcaaaggggcaattttgtcatgtggcc

SEQ ID NO: 12953 - protein, 366 aa, Zea mays subsp. mays
  peptide (1)..(366): Ceres Seq. ID no. 13637285
  misc_feature (139)..(362): Homolog of NCBI NO: 15231083 NR Description: mitochondrial carrier protein family [Arabidopsis >gi|9293980|dbj|BAB01883.1| contains similarity to membrane [Arabidopsis thaliana] >gi|29029108|gb|AAO64933.1| At3g20240
  misc_feature (139)..(362): Homolog of NCBI NO: 21537282 NR Description: mitochondrial carrier protein, putative
  misc_feature (85)..(166): Homolog of NCBI NO: 15231083 NR Description: mitochondrial carrier protein family [Arabidopsis >gi|9293980|dbj|BAB01883.1| contains similarity to membrane [Arabidopsis thaliana] >gi|29029108|gb|AAO64933.1| At3g20240
  misc_feature (85)..(166): Homolog of NCBI NO: 21537282 NR Description: mitochondrial carrier protein, putative
  misc_feature (84)..(358): Homolog of NCBI NO: 20864410 NR Description: RIKEN cDNA 2900084M01 [Mus musculus]
  misc_feature (84)..(358): Homolog of NCBI NO: 34877651 NR Description: similar to CG4241-PA [Rattus norvegicus]
  misc_feature (84)..(358): Homolog of NCBI NO: 29742699 NR Description: similar to CG4241-PA [Homo sapiens]
  misc_feature (29)..(364): Homolog of NCBI NO: 4138581 NR Description: mitochondrial energy transfer protein [Solanum
  misc_feature (82)..(366): Homolog of NCBI NO: 231654 NR Description: Brittle-1 protein, chloroplast precursor
  misc_feature (54)..(365): Homolog of NCBI NO: 15236783 NR Description: mitochondrial carrier protein family [Arabidopsis
  misc_feature (29)..(364): Homolog of NCBI NO: 4138581 NR Description: mitochondrial energy transfer protein [Solanum
  misc_feature (82)..(366): Homolog of NCBI NO: 231654 NR Description: Brittle-1 protein, chloroplast precursor
  misc_feature (54)..(365): Homolog of NCBI NO: 15236783 NR Description: mitochondrial carrier protein family [Arabidopsis
  misc_feature (139)..(362): Homolog of NCBI NO: 15231083 NR Description: mitochondrial carrier protein family [Arabidopsis >gi|9293980|dbj|BAB01883.1| contains similarity to membrane [Arabidopsis thaliana] >gi|29029108|gb|AAO64933.1| At3g20240
  misc_feature (139)..(362): Homolog of NCBI NO: 21537282 NR Description: mitochondrial carrier protein, putative
  misc_feature (85)..(166): Homolog of NCBI NO: 15231083 NR Description: mitochondrial carrier protein family [Arabidopsis >gi|9293980|dbj|BAB01883.1| contains similarity to membrane [Arabidopsis thaliana] >gi|29029108|gb|AAO64933.1| At3g20240
  misc_feature (85)..(166): Homolog of NCBI NO: 21537282 NR Description: mitochondrial carrier protein, putative
  misc_feature (84)..(358): Homolog of NCBI NO: 20864410 NR Description: RIKEN cDNA 2900084M01 [Mus musculus]
  misc_feature (84)..(358): Homolog of NCBI NO: 34877651 NR Description: similar to CG4241-PA [Rattus norvegicus]
  misc_feature (84)..(358): Homolog of NCBI NO: 29742699 NR Description: similar to CG4241-PA [Homo sapiens]
MAACLLVWVLKCRQVRQQWRPDRGDKDIKIPFTDHCMKYVSEAVGYQVISTEAEPVEEVVDAKAKKAAKKRGLQLKIKIGNPHLRRLVSGAIAGAVSRTCVAPLETIRTHLMVGSNGDSMTEVFQSIMNTEGWTGLFRGNFVNVIRVAPSKAIELFAFDTAKKFLTPKADESPKTFLPPSLIAGALAGVSSTLCTYPLELIKTRLTIEKDVYNNFLHAFVKILREEGPSELYRGLTPSLIGVVPYAATNYYAYDTLKKLYRKTFKQEEISNIATLLIGSAAGAISSTATFPLEVARKQMQVGAVGGRQVYKNVFHALYCIMEKEGVGGLYKGLGPSCIKLMPAAGISFMCYEACKKILVEDNEDSE

SEQ ID NO: 12954 - protein, 330 aa, Zea mays subsp. mays
  peptide (1)..(330): Ceres Seq. ID no. 13637286
  misc_feature (1)..(328): Homolog of NCBI NO: 4138581 NR Description: mitochondrial energy transfer protein [Solanum
  misc_feature (46)..(330): Homolog of NCBI NO: 231654 NR Description: Brittle-1 protein, chloroplast precursor
  misc_feature (18)..(329): Homolog of NCBI NO: 15236783 NR Description: mitochondrial carrier protein family [Arabidopsis
  misc_feature (103)..(326): Homolog of NCBI NO: 15231083 NR Description: mitochondrial carrier protein family [Arabidopsis >gi|9293980|dbj|BAB01883.1| contains similarity to membrane [Arabidopsis thaliana] >gi|29029108|gb|AAO64933.1| At3g20240
  misc_feature (103)..(326): Homolog of NCBI NO: 21537282 NR Description: mitochondrial carrier protein, putative
  misc_feature (49)..(130): Homolog of NCBI NO: 15231083 NR Description: mitochondrial carrier protein family [Arabidopsis >gi|9293980|dbj|BAB01883.1| contains similarity to membrane [Arabidopsis thaliana] >gi|29029108|gb|AAO64933.1| At3g20240
  misc_feature (49)..(130): Homolog of NCBI NO: 21537282 NR Description: mitochondrial carrier protein, putative
  misc_feature (48)..(322): Homolog of NCBI NO: 20864410 NR Description: RIKEN cDNA 2900084M01 [Mus musculus]
  misc_feature (48)..(322): Homolog of NCBI NO: 34877651 NR Description: similar to CG4241-PA [Rattus norvegicus]
  misc_feature (48)..(322): Homolog of NCBI NO: 29742699 NR Description: similar to CG4241-PA [Homo sapiens]
  misc_feature (1)..(328): Homolog of NCBI NO: 4138581 NR Description: mitochondrial energy transfer protein [Solanum
  misc_feature (46)..(330): Homolog of NCBI NO: 231654 NR Description: Brittle-1 protein, chloroplast precursor
  misc_feature (18)..(329): Homolog of NCBI NO: 15236783 NR Description: mitochondrial carrier protein family [Arabidopsis
  misc_feature (103)..(326): Homolog of NCBI NO: 15231083 NR Description: mitochondrial carrier protein family [Arabidopsis >gi|9293980|dbj|BAB01883.1| contains similarity to membrane [Arabidopsis thaliana] >gi|29029108|gb|AAO64933.1| At3g20240
  misc_feature (103)..(326): Homolog of NCBI NO: 21537282 NR Description: mitochondrial carrier protein, putative
  misc_feature (49)..(130): Homolog of NCBI NO: 15231083 NR Description: mitochondrial carrier protein family [Arabidopsis >gi|9293980|dbj|BAB01883.1| contains similarity to membrane [Arabidopsis thaliana] >gi|29029108|gb|AAO64933.1| At3g20240
  misc_feature (49)..(130): Homolog of NCBI NO: 21537282 NR Description: mitochondrial carrier protein, putative
  misc_feature (48)..(322): Homolog of NCBI NO: 20864410 NR Description: RIKEN cDNA 2900084M01 [Mus musculus]
  misc_feature (48)..(322): Homolog of NCBI NO: 34877651 NR Description: similar to CG4241-PA [Rattus norvegicus]
  misc_feature (48)..(322): Homolog of NCBI NO: 29742699 NR Description: similar to CG4241-PA [Homo sapiens]
MKYVSEAVGYQVISTEAEPVEEVVDAKAKKAAKKRGLQLKIKIGNPHLRRLVSGAIAGAVSRTCVAPLETIRTHLMVGSNGDSMTEVFQSIMNTEGWTGLFRGNFVNVIRVAPSKAIELFAFDTAKKFLTPKADESPKTFLPPSLIAGALAGVSSTLCTYPLELIKTRLTIEKDVYNNFLHAFVKILREEGPSELYRGLTPSLIGVVPYAATNYYAYDTLKKLYRKTFKQEEISNIATLLIGSAAGAISSTATFPLEVARKQMQVGAVGGRQVYKNVFHALYCIMEKEGVGGLYKGLGPSCIKLMPAAGISFMCYEACKKILVEDNEDSE

SEQ ID NO: 12955 - protein, 255 aa, Zea mays subsp. mays
  peptide (1)..(255): Ceres Seq. ID no. 13637287
  misc_feature (1)..(253): Homolog of NCBI NO: 4138581 NR Description: mitochondrial energy transfer protein [Solanum
  misc_feature (1)..(255): Homolog of NCBI NO: 231654 NR Description: Brittle-1 protein, chloroplast precursor
  misc_feature (1)..(254): Homolog of NCBI NO: 15236783 NR Description: mitochondrial carrier protein family [Arabidopsis
  misc_feature (28)..(251): Homolog of NCBI NO: 15231083 NR Description: mitochondrial carrier protein family [Arabidopsis >gi|9293980|dbj|BAB01883.1| contains similarity to membrane [Arabidopsis thaliana] >gi|29029108|gb|AAO64933.1| At3g20240
  misc_feature (28)..(251): Homolog of NCBI NO: 21537282 NR Description: mitochondrial carrier protein, putative
  misc_feature (1)..(55): Homolog of NCBI NO: 15231083 NR Description: mitochondrial carrier protein family [Arabidopsis >gi|9293980|dbj|BAB01883.1| contains similarity to membrane [Arabidopsis thaliana] >gi|29029108|gb|AAO64933.1| At3g20240
  misc_feature (1)..(55): Homolog of NCBI NO: 21537282 NR Description: mitochondrial carrier protein, putative
  misc_feature (1)..(247): Homolog of NCBI NO: 20864410 NR Description: RIKEN cDNA 2900084M01 [Mus musculus]
  misc_feature (1)..(247): Homolog of NCBI NO: 34877651 NR Description: similar to CG4241-PA [Rattus norvegicus]
  misc_feature (1)..(247): Homolog of NCBI NO: 29742699 NR Description: similar to CG4241-PA [Homo sapiens]
  misc_feature (1)..(253): Homolog of NCBI NO: 4138581 NR Description: mitochondrial energy transfer protein [Solanum
  misc_feature (1)..(255): Homolog of NCBI NO: 231654 NR Description: Brittle-1 protein, chloroplast precursor
  misc_feature (1)..(254): Homolog of NCBI NO: 15236783 NR Description: mitochondrial carrier protein family [Arabidopsis
  misc_feature (28)..(251): Homolog of NCBI NO: 15231083 NR Description: mitochondrial carrier protein family [Arabidopsis >gi|9293980|dbj|BAB01883.1| contains similarity to membrane [Arabidopsis thaliana] >gi|29029108|gb|AAO64933.1| At3g20240
  misc_feature (28)..(251): Homolog of NCBI NO: 21537282 NR Description: mitochondrial carrier protein, putative
  misc_feature (1)..(55): Homolog of NCBI NO: 15231083 NR Description: mitochondrial carrier protein family [Arabidopsis >gi|9293980|dbj|BAB01883.1| contains similarity to membrane [Arabidopsis thaliana] >gi|29029108|gb|AAO64933.1| At3g20240
  misc_feature (1)..(55): Homolog of NCBI NO: 21537282 NR Description: mitochondrial carrier protein, putative
  misc_feature (1)..(247): Homolog of NCBI NO: 20864410 NR Description: RIKEN cDNA 2900084M01 [Mus musculus]
  misc_feature (1)..(247): Homolog of NCBI NO: 34877651 NR Description: similar to CG4241-PA [Rattus norvegicus]
  misc_feature (1)..(247): Homolog of NCBI NO: 29742699 NR Description: similar to CG4241-PA [Homo sapiens]
MVGSNGDSMTEVFQSIMNTEGWTGLFRGNFVNVIRVAPSKAIELFAFDTAKKFLTPKADESPKTFLPPSLIAGALAGVSSTLCTYPLELIKTRLTIEKDVYNNFLHAFVKILREEGPSELYRGLTPSLIGVVPYAATNYYAYDTLKKLYRKTFKQEEISNIATLLIGSAAGAISSTATFPLEVARKQMQVGAVGGRQVYKNVFHALYCIMEKEGVGGLYKGLGPSCIKLMPAAGISFMCYEACKKILVEDNEDSE

SEQ ID NO: 12956 - DNA, 2245 bp, Zea mays subsp. mays
  misc_feature (1)..(2245): Ceres Seq. ID no. 12358579
  misc_feature: MA Experiment ID: 20000492 Result: Up-regulated in Transcription
  misc_feature: MA Experiment 20000492 PARAMETER Experiment Name: Zm_Hybrid_Seed_Dev_P Parameter: DAP Value: 12
  misc_feature: MA Experiment 20000492 PARAMETER Experiment Name: Zm_Hybrid_Seed_Dev_P Parameter: Organism Value: Zea mays
  misc_feature: MA Experiment 20000492 PARAMETER Experiment Name: Zm_Hybrid_Seed_Dev_P Parameter: Plant Line Value: 35A19
  misc_feature: MA Experiment 20000492 PARAMETER Experiment Name: Zm_Hybrid_Seed_Dev_P Parameter: Tissue Value: Fert Kernel vs. Unfert Floret
atccaattcctatgccctgcacccgcagacggggagctcgcgtcttccttcggatggtggatgcatgcatgcatggtagacacgccggcccaaccagaattgacaagtggaagcgtatgggtattaccagcaacgacgcggcccctcgtgccgtcctcctccgcttcttgtttctgctctgcataggctgcaaatgcctggcatcagaggtagaggccacccagacggcgaccctcgcggtggacgcctcgccgcagcttgctcggaagatccctgatacactgttcgggatcttctttgaggagatcaaccatgcaggggctggtggcatatgggctgaacttgttagtaacagagggtttgaagctggaggcctccatactccatcaaacattgacccatggtccatcattggagacgactcctctgtatttgtggagaccgatcgcacatcatgtttcagtcgaaacatcgttgctctcaggatggaggtcctttgcgataactgtcctactggtggtgttggtgtttacaacccagggttctggggcatgaacatagaagaaggaaaggtctacaatcttgttatgtttgttaagtcaccagaaacaactgacttgacagtttcactaacaagctctaacgggttgcaaaatctggcttcagctacagtaacagtttccggcgaatcaaactggataaaagtggagcaaaagttggttgctaaaggaaccaatagaacctcaaggcttcaaataacaactaacaagaaaggagttgtctggtttgatcaagtatcactcatgcctgaagacacatacaagggacatggctttcgcacagaacttatatccatgattttggatttaaaaccacgattcttgagatttcctggaggctgctttgtagaaggtggctggttaagaaatgcctttaggtggagagaatctattggtccatgggaagagagacctggacacttcggggatgtttggcattactggactgatgatggccttggatactatgaatttcttcagcttgcggaggacctgggtactgaaccaatctgggtattcaacaatggagtcagccacaatgatgaagttgatactgttgctattgctccttttgtaaaggatgtattggacagtatagaatttgcaagggggagtgcaaattcaacatggggctctgttagggctgcaatgggccaccctgaaccattcccagtgaaatatgttgcaataggaaatgaagattgtgggaaaaaattttaccgcggtaactacctcaagttctacaatgctataagacaggcctatccagacattcaaatgatttcaaactgcgatggttcatctacaccacttgatcatcctgctgatttatacgacttccatgtctataatgattctaagactttgttcaacatgaagagcacatttgacagaacatctcgtagtggacccaaggcttttgtaagtgagtacgctgtttggagaggtgatgcaggtagaggaagtcttcttgcttcattggcagaagctgttttccttactggactggagaagaatagtgacattgtttccatggcaagttacgcgccactattcgtaaacgacaatgaccagacgtggaacccagacgcaatcgtcttcaactcctggcagcattacggcactcccagttactggatgcagacgcttttccgcgagtctagtggtgctatgttccatccaacgacaatcagctccagctactcaggttcacttgcagcgtctgcgattacctggcaggactccgagaacagcttcctaagagtaaaggtcataaacttcgggtcagatgctgtgaccctgacaatctccacaagtgggctccaggccagtatcaacgctctgggatcaaccgccactgttctcacatcagcagatgtgatggatgaaaactccttcagcaacccaaccaaggttgtgccggtaaagagcgatctgagcaatgctgcagagcagatgcaggtcacgctggctcctcgctccttcagctcgttcgatctcgccctggctcagtccaagcttgtagcggagatgtgagctaggctggtacactagtatacaatacaacgtgtgaagtgtggtacacaaataccagcaaccacaggggttgccaagctgttgttagcatcttgaacacatggctttgtattgtgtataatgacatgatgctgatactaatctctatt

SEQ ID NO: 12957 - protein, 697 aa, Zea mays subsp. mays
  peptide (1)..(697): Ceres Seq. ID no. 12358580
  misc_feature (112)..(269): Pfam Name: Carbohydrate binding domain Pfam Description: Carbohydrate binding domain
  misc_feature (56)..(697): Homolog of NCBI NO: 13398414 NR Description: arabinoxylan arabinofuranohydrolase isoenzyme
  misc_feature (39)..(697): Homolog of NCBI NO: 13398412 NR Description: arabinoxylan arabinofuranohydrolase isoenzyme
  misc_feature (49)..(695): Homolog of NCBI NO: 38347003 NR Description: OSJNBb0058J09.4 [Oryza sativa (japonica
  misc_feature (47)..(694): Homolog of NCBI NO: 33151175 NR Description: alpha-L-arabinofuranosidase [Malus x domestica]
  misc_feature (51)..(691): Homolog of NCBI NO: 16417958 NR Description: arabinosidase ARA-1 [Lycopersicon esculentum]
  misc_feature (49)..(693): Homolog of NCBI NO: 15228368 NR Description: glycosyl hydrolase family 51; protein id:
  misc_feature (49)..(693): Homolog of NCBI NO: 13937191 NR Description: AT3g10740/T7M13_18 [Arabidopsis thaliana]
  misc_feature (49)..(693): Homolog of NCBI NO: 29825623 NR Description: alpha-L-arabinofuranosidase [Arabidopsis thaliana]
  misc_feature (39)..(692): Homolog of NCBI NO: 22324432 NR Description: putative arabinoxylan narabinofuranohydrolase
  misc_feature (65)..(697): Homolog of NCBI NO: 22327075 NR Description: glycosyl hydrolase family 51; protein id: supported by cDNA: gi_17380937 [Arabidopsis thaliana]
PIPMPCTRRRGARVFLRMVDACMHGRHAGPTRIDKWKRMGITSNDAAPRAVLLRFLFLLCIGCKCLASEVEATQTATLAVDASPQLARKIPDTLFGIFFEEINHAGAGGIWAELVSNRGFEAGGLHTPSNIDPWSIIGDDSSVFVETDRTSCFSRNIVALRMEVLCDNCPTGGVGVYNPGFWGMNIEEGKVYNLVMFVKSPETTDLTVSLTSSNGLQNLASATVTVSGESNWIKVEQKLVAKGTNRTSRLQITTNKKGVVWFDQVSLMPEDTYKGHGFRTELISMILDLKPRFLRFPGGCFVEGGWLRNAFRWRESIGPWEERPGHFGDVWHYWTDDGLGYYEFLQLAEDLGTEPIWVFNNGVSHNDEVDTVAIAPFVKDVLDSIEFARGSANSTWGSVRAAMGHPEPFPVKYVAIGNEDCGKKFYRGNYLKFYNAIRQAYPDIQMISNCDGSSTPLDHPADLYDFHVYNDSKTLFNMKSTFDRTSRSGPKAFVSEYAVWRGDAGRGSLLASLAEAVFLTGLEKNSDIVSMASYAPLFVNDNDQTWNPDAIVFNSWQHYGTPSYWMQTLFRESSGAMFHPTTISSSYSGSLAASAITWQDSENSFLRVKVINFGSDAVTLTISTSGLQASINALGSTATVLTSADVMDENSFSNPTKVVPVKSDLSNAAEQMQVTLAPRSFSSFDLALAQSKLVAEM

SEQ ID NO: 12958 - protein, 694 aa, Zea mays subsp. mays
  peptide (1)..(694): Ceres Seq. ID no. 12358581
  misc_feature (109)..(266): Pfam Name: Carbohydrate binding domain Pfam Description: Carbohydrate binding domain
  misc_feature (53)..(694): Homolog of NCBI NO: 13398414 NR Description: arabinoxylan arabinofuranohydrolase isoenzyme
  misc_feature (36)..(694): Homolog of NCBI NO: 13398412 NR Description: arabinoxylan arabinofuranohydrolase isoenzyme
  misc_feature (46)..(692): Homolog of NCBI NO: 38347003 NR Description: OSJNBb0058J09.4 [Oryza sativa (japonica
  misc_feature (44)..(691): Homolog of NCBI NO: 33151175 NR Description: alpha-L-arabinofuranosidase [Malus x domestica]
  misc_feature (48)..(688): Homolog of NCBI NO: 16417958 NR Description: arabinosidase ARA-1 [Lycopersicon esculentum]
  misc_feature (46)..(690): Homolog of NCBI NO: 15228368 NR Description: glycosyl hydrolase family 51; protein id:
  misc_feature (46)..(690): Homolog of NCBI NO: 13937191 NR Description: AT3g10740/T7M13_18 [Arabidopsis thaliana]
  misc_feature (46)..(690): Homolog of NCBI NO: 29825623 NR Description: alpha-L-arabinofuranosidase [Arabidopsis thaliana]
  misc_feature (36)..(689): Homolog of NCBI NO: 22324432 NR Description: putative arabinoxylan narabinofuranohydrolase
  misc_feature (62)..(694): Homolog of NCBI NO: 22327075 NR Description: glycosyl hydrolase family 51; protein id: supported by cDNA: gi_17380937 [Arabidopsis thaliana]
MPCTRRRGARVFLRMVDACMHGRHAGPTRIDKWKRMGITSNDAAPRAVLLRFLFLLCIGCKCLASEVEATQTATLAVDASPQLARKIPDTLFGIFFEEINHAGAGGIWAELVSNRGFEAGGLHTPSNIDPWSIIGDDSSVFVETDRTSCFSRNIVALRMEVLCDNCPTGGVGVYNPGFWGMNIEEGKVYNLVMFVKSPETTDLTVSLTSSNGLQNLASATVTVSGESNWIKVEQKLVAKGTNRTSRLQITTNKKGVVWFDQVSLMPEDTYKGHGFRTELISMILDLKPRFLRFPGGCFVEGGWLRNAFRWRESIGPWEERPGHFGDVWHYWTDDGLGYYEFLQLAEDLGTEPIWVFNNGVSHNDEVDTVAIAPFVKDVLDSIEFARGSANSTWGSVRAAMGHPEPFPVKYVAIGNEDCGKKFYRGNYLKFYNAIRQAYPDIQMISNCDGSSTPLDHPADLYDFHVYNDSKTLFNMKSTFDRTSRSGPKAFVSEYAVWRGDAGRGSLLASLAEAVFLTGLEKNSDIVSMASYAPLFVNDNDQTWNPDAIVFNSWQHYGTPSYWMQTLFRESSGAMFHPTTISSSYSGSLAASAITWQDSENSFLRVKVINFGSDAVTLTISTSGLQASINALGSTATVLTSADVMDENSFSNPTKVVPVKSDLSNAAEQMQVTLAPRSFSSFDLALAQSKLVAEM

SEQ ID NO: 12959 - protein, 680 aa, Zea mays subsp. mays
  peptide (1)..(680): Ceres Seq. ID no. 12358582
  misc_feature (95)..(252): Pfam Name: Carbohydrate binding domain Pfam Description: Carbohydrate binding domain
  misc_feature (48)..(680): Homolog of NCBI NO: 22327075 NR Description: glycosyl hydrolase family 51; protein id: supported by cDNA: gi_17380937 [Arabidopsis thaliana]
  misc_feature (39)..(680): Homolog of NCBI NO: 13398414 NR Description: arabinoxylan arabinofuranohydrolase isoenzyme
  misc_feature (22)..(680): Homolog of NCBI NO: 13398412 NR Description: arabinoxylan arabinofuranohydrolase isoenzyme
  misc_feature (32)..(678): Homolog of NCBI NO: 38347003 NR Description: OSJNBb0058J09.4 [Oryza sativa (japonica
  misc_feature (30)..(677): Homolog of NCBI NO: 33151175 NR Description: alpha-L-arabinofuranosidase [Malus x domestica]
  misc_feature (34)..(674): Homolog of NCBI NO: 16417958 NR Description: arabinosidase ARA-1 [Lycopersicon esculentum]
  misc_feature (32)..(676): Homolog of NCBI NO: 15228368 NR Description: glycosyl hydrolase family 51; protein id:
  misc_feature (32)..(676): Homolog of NCBI NO: 13937191 NR Description: AT3g10740/T7M13_18 [Arabidopsis thaliana]
  misc_feature (32)..(676): Homolog of NCBI NO: 29825623 NR Description: alpha-L-arabinofuranosidase [Arabidopsis thaliana]
  misc_feature (22)..(675): Homolog of NCBI NO: 22324432 NR Description: putative arabinoxylan narabinofuranohydrolase
MVDACMHGRHAGPTRIDKWKRMGITSNDAAPRAVLLRFLFLLCIGCKCLASEVEATQTATLAVDASPQLARKIPDTLFGIFFEEINHAGAGGIWAELVSNRGFEAGGLHTPSNIDPWSIIGDDSSVFVETDRTSCFSRNIVALRMEVLCDNCPTGGVGVYNPGFWGMNIEEGKVYNLVMFVKSPETTDLTVSLTSSNGLQNLASATVTVSGESNWIKVEQKLVAKGTNRTSRLQITTNKKGVVWFDQVSLMPEDTYKGHGFRTELISMILDLKPRFLRFPGGCFVEGGWLRNAFRWRESIGPWEERPGHFGDVWHYWTDDGLGYYEFLQLAEDLGTEPIWVFNNGVSHNDEVDTVAIAPFVKDVLDSIEFARGSANSTWGSVRAAMGHPEPFPVKYVAIGNEDCGKKFYRGNYLKFYNAIRQAYPDIQMISNCDGSSTPLDHPADLYDFHVYNDSKTLFNMKSTFDRTSRSGPKAFVSEYAVWRGDAGRGSLLASLAEAVFLTGLEKNSDIVSMASYAPLFVNDNDQTWNPDAIVFNSWQHYGTPSYWMQTLFRESSGAMFHPTTISSSYSGSLAASAITWQDSENSFLRVKVINFGSDAVTLTISTSGLQASINALGSTATVLTSADVMDENSFSNPTKVVPVKSDLSNAAEQMQVTLAPRSFSSFDLALAQSKLVAEM

SEQ ID NO: 12960 - DNA, 1415 bp, Zea mays subsp. mays
  misc_feature (1)..(1415): Ceres Seq. ID no. 12411473
  misc_feature: MA Experiment ID: 108504 Result: Up-regulated in Transcription
  misc_feature: MA Experiment 108504 PARAMETER Experiment Name: Zm_Drought_P Parameter: Age (day) Value: 8
  misc_feature: MA Experiment 108504 PARAMETER Experiment Name: Zm_Drought_P Parameter: Organism Value: Zea mays
  misc_feature: MA Experiment 108504 PARAMETER Experiment Name: Zm_Drought_P Parameter: Plant Line Value: 35A19
  misc_feature: MA Experiment 108504 PARAMETER Experiment Name: Zm_Drought_P Parameter: Timepoint (hr) Value: 12
  misc_feature: MA Experiment 108504 PARAMETER Experiment Name: Zm_Drought_P Parameter: Tissue Value: Aerial
  misc_feature: MA Experiment 108504 PARAMETER Experiment Name: Zm_Drought_P Parameter: Treatment Value: Drought vs. No Drought
  misc_feature: MA Experiment ID: 108540 Result: Up-regulated in Transcription
  misc_feature: MA Experiment 108540 PARAMETER Experiment Name: Zm_20percent_PEG_P Parameter: Age (day) Value: 8
  misc_feature: MA Experiment 108540 PARAMETER Experiment Name: Zm_20percent_PEG_P Parameter: Organism Value: Zea mays
  misc_feature: MA Experiment 108540 PARAMETER Experiment Name: Zm_20percent_PEG_P Parameter: Plant Line Value: 35A19
  misc_feature: MA Experiment 108540 PARAMETER Experiment Name: Zm_20percent_PEG_P Parameter: Timepoint (hr) Value: 6
  misc_feature: MA Experiment 108540 PARAMETER Experiment Name: Zm_20percent_PEG_P Parameter: Tissue Value: Aerial
  misc_feature: MA Experiment 108540 PARAMETER Experiment Name: Zm_20percent_PEG_P Parameter: Treatment Value: 20percent PEG vs. No Treatment
  misc_feature: MA Experiment ID: 108556 Result: Up-regulated in Transcription
  misc_feature: MA Experiment 108556 PARAMETER Experiment Name: Zm_Drought_P Parameter: Age (day) Value: 9
  misc_feature: MA Experiment 108556 PARAMETER Experiment Name: Zm_Drought_P Parameter: Organism Value: Zea mays
  misc_feature: MA Experiment 108556 PARAMETER Experiment Name: Zm_Drought_P Parameter: Plant Line Value: 35A19
  misc_feature: MA Experiment 108556 PARAMETER Experiment Name: Zm_Drought_P Parameter: Timepoint (hr) Value: 24
  misc_feature: MA Experiment 108556 PARAMETER Experiment Name: Zm_Drought_P Parameter: Tissue Value: Aerial
  misc_feature: MA Experiment 108556 PARAMETER Experiment Name: Zm_Drought_P Parameter: Treatment Value: Drought vs. No Drought
  misc_feature: MA Experiment ID: 20000480 Result: Up-regulated in Transcription
  misc_feature: MA Experiment 20000480 PARAMETER Experiment Name: Zm_Drought_P Parameter: Age (day) Value: 11
  misc_feature: MA Experiment 20000480 PARAMETER Experiment Name: Zm_Drought_P Parameter: Organism Value: Zea mays
  misc_feature: MA Experiment 20000480 PARAMETER Experiment Name: Zm_Drought_P Parameter: Plant Line Value: 35A19
  misc_feature: MA Experiment 20000480 PARAMETER Experiment Name: Zm_Drought_P Parameter: Timepoint (hr) Value: 72
  misc_feature: MA Experiment 20000480 PARAMETER Experiment Name: Zm_Drought_P Parameter: Tissue Value: Aerial
  misc_feature: MA Experiment 20000480 PARAMETER Experiment Name: Zm_Drought_P Parameter: Treatment Value: Drought vs. No Drought
  misc_feature: MA Experiment ID: 20000488 Result: Down-regulated in Transcription
  misc_feature: MA Experiment 20000488 PARAMETER Experiment Name: Zm_50mM_NH4NO3_L_to_H_P Parameter: Organism Value: Zea mays
  misc_feature: MA Experiment 20000488 PARAMETER Experiment Name: Zm_50mM_NH4NO3_L_to_H_P Parameter: Timepoint (hr) Value: 8
  misc_feature: MA Experiment 20000488 PARAMETER Experiment Name: Zm_50mM_NH4NO3_L_to_H_P Parameter: Tissue Value: Leaves
  misc_feature: MA Experiment 20000488 PARAMETER Experiment Name: Zm_50mM_NH4NO3_L_to_H_P Parameter: Treatment Value: 50mM NH4NO3 vs. 100mM Mannitol
  misc_feature: MA Experiment ID: 20000534 Result: Down-regulated in Transcription
  misc_feature: MA Experiment 20000534 PARAMETER Experiment Name: Zm_Hybrid_Pollen_P Parameter: Age (day) Value: 8
  misc_feature: MA Experiment 20000534 PARAMETER Experiment Name: Zm_Hybrid_Pollen_P Parameter: Organism Value: Zea mays
  misc_feature: MA Experiment 20000534 PARAMETER Experiment Name: Zm_Hybrid_Pollen_P Parameter: Plant Line Value: 35A19
  misc_feature: MA Experiment 20000534 PARAMETER Experiment Name: Zm_Hybrid_Pollen_P Parameter: Tissue Value: Pollen vs. Aerial
  misc_feature: MA Experiment ID: 20001608 Result: Down-regulated in Transcription
  misc_feature: MA Experiment 20001608 PARAMETER Experiment Name: Zm_50ppm_KNO3_L-to-H_P Parameter: Age (day) Value: 21
  misc_feature: MA Experiment 20001608 PARAMETER Experiment Name: Zm_50ppm_KNO3_L-to-H_P Parameter: Organism Value: Zea mays
  misc_feature: MA Experiment 20001608 PARAMETER Experiment Name: Zm_50ppm_KNO3_L-to-H_P Parameter: Plant Line Value: 35A19
  misc_feature: MA Experiment 20001608 PARAMETER Experiment Name: Zm_50ppm_KNO3_L-to-H_P Parameter: Timepoint (hr) Value: 48
  misc_feature: MA Experiment 20001608 PARAMETER Experiment Name: Zm_50ppm_KNO3_L-to-H_P Parameter: Tissue Value: Shoots
  misc_feature: MA Experiment 20001608 PARAMETER Experiment Name: Zm_50ppm_KNO3_L-to-H_P Parameter: Treatment Value: 50ppm KNO3 vs. 50ppm KCl
tctctctgtctcctcacccgacgcccaaagaagcagagcaggcaacggcacagttagagagagagagagagaggcgcagagccaaggaagcggagcagagcaacagcagcaggtcgaggaagaggagaagagaaggtccaggagacagcacagcagccaggaagagcaagagcaagatgctgcgcgggggcacgggcatgctgggggtggtgaacttcataaccttcctgatctcgatcccgatccttggcggcggcatctggctggcgtcgcgggccaactccaccgactgcatccgcttcctgcagtggcccatcatcgtggtggggctcgtcctcatggtcgtctccctcatgggcttcgccggcgcctgctaccgccagacttggctgctccgcctctacctcttcgccatgttcttcgtcgtcctcgcgctcctcttcttcgtcgtcttcgccttcgccgtcaccgaccgcggcgccggccaggtcgtcatgagccgccgcttccccgagtaccagctctccgactacggcggatggctccgcgaccgcgtcgccgacccgcagtactgggccaccatcagcgcctgcctccgcgacggccacgcctgcgccggcatgaggcgcctcgcgcgggaccccaacacgggcatgctcgtgccggagacgcccgccatgttctacggccgcaacctctccccgattcagtctggatgctgcaagccaccgacgtcatgcgcattcacctacatgaacgagacgtactgggaacaaaaccccggtgtcccgaccgtgcccaatgaccctgactgcagcaggtggagcaacgaccagcagatgctgtgcttccagtgcgactcgtgcaaggccggcgtcctcgcgggcatcaagaagagctggcgcaaggtggccgtcctgaacatcgtggtgttgatcatccttgtgattgtctatgtcgcgggctgcgccgcgttccgcaacgccaagaggatcgacaacgacgagccggtgggcatggcgcggatgaccaagtcccatccaagcaggttccagttctaggcaggcagctgctgccgtcgcgggttcggaagcttctgccttgtacagatgatgaccagaccagtgggtggtgctaaggcctgggctttgctatatcttactgagatgtggattgtactgcatttgggggtgaaaaggggaagttcagtgtggtttgagttcgtgtttgatttagtgtttagggtaggtatgttatgtggtagggggtacaatatgggatctgcaagaaacaagagaagatcaatcatctaggaactgttctgtattggagatttttttttaaaaaaaaatctgggggatatttgtatgatggtgcttggtgccagccatgatggaatattttctgaatttctc

SEQ ID NO: 12961 - protein, 352 aa, Zea mays subsp. mays
  peptide (1)..(352): Ceres Seq. ID no. 12411474
  misc_feature (64)..(314): Pfam Name: Tetraspanin family Pfam Description: Tetraspanin family
  misc_feature (60)..(350): Homolog of NCBI NO: 15231187 NR Description: putative protein; protein id: At3g45600.1, by cDNA: 11427., supported by cDNA: gi_14423445 [Arabidopsis
  misc_feature (60)..(343): Homolog of NCBI NO: 15238641 NR Description: senescence-associated protein - like; protein id:
  misc_feature (59)..(333): Homolog of NCBI NO: 3551954 NR Description: senescence-associated protein 5 [Hemerocallis
  misc_feature (61)..(333): Homolog of NCBI NO: 29367553 NR Description: senescence-associated protein-like protein [Oryza
  misc_feature (59)..(333): Homolog of NCBI NO: 20197174 NR Description: hypothetical protein [Arabidopsis thaliana]
  misc_feature (59)..(330): Homolog of NCBI NO: 15234374 NR Description: senescence-associated protein -like; protein id: supported by cDNA: 39831., supported by cDNA: gi_17065395, by cDNA: gi_20148628 [Arabidopsis thaliana]
  misc_feature (59)..(248): Homolog of NCBI NO: 9294106 NR Description: senescence-associated protein-like [Arabidopsis
  misc_feature (227)..(347): Homolog of NCBI NO: 9294106 NR Description: senescence-associated protein-like [Arabidopsis
  misc_feature (59)..(248): Homolog of NCBI NO: 30682045 NR Description: senescence-associated protein family [Arabidopsis
  misc_feature (227)..(347): Homolog of NCBI NO: 30682045 NR Description: senescence-associated protein family [Arabidopsis
SLSPHPTPKEAEQATAQLERERERRRAKEAEQSNSSRSRKRRREGPGDSTAARKSKSKMLRGGTGMLGVVNFITFLISIPILGGGIWLASRANSTDCIRFLQWPIIVVGLVLMVVSLMGFAGACYRQTWLLRLYLFAMFFVVLALLFFVVFAFAVTDRGAGQVVMSRRFPEYQLSDYGGWLRDRVADPQYWATISACLRDGHACAGMRRLARDPNTGMLVPETPAMFYGRNLSPIQSGCCKPPTSCAFTYMNETYWEQNPGVPTVPNDPDCSRWSNDQQMLCFQCDSCKAGVLAGIKKSWRKVAVLNIVVLIILVIVYVAGCAAFRNAKRIDNDEPVGMARMTKSHPSRFQF

SEQ ID NO: 12962 - protein, 294 aa, Zea mays subsp. mays
  peptide (1)..(294): Ceres Seq. ID no. 12411475
  misc_feature (6)..(256): Pfam Name: Tetraspanin family Pfam Description: Tetraspanin family
  misc_feature (2)..(292): Homolog of NCBI NO: 15231187 NR Description: putative protein; protein id: At3g45600.1, by cDNA: 11427., supported by cDNA: gi_14423445 [Arabidopsis
  misc_feature (2)..(285): Homolog of NCBI NO: 15238641 NR Description: senescence-associated protein - like; protein id:
  misc_feature (1)..(275): Homolog of NCBI NO: 3551954 NR Description: senescence-associated protein 5 [Hemerocallis
  misc_feature (3)..(275): Homolog of NCBI NO: 29367553 NR Description: senescence-associated protein-like protein [Oryza
  misc_feature (1)..(275): Homolog of NCBI NO: 20197174 NR Description: hypothetical protein [Arabidopsis thaliana]
  misc_feature (1)..(272): Homolog of NCBI NO: 15234374 NR Description: senescence-associated protein -like; protein id: supported by cDNA: 39831., supported by cDNA: gi_17065395, by cDNA: gi_20148628 [Arabidopsis thaliana]
  misc_feature (1)..(190): Homolog of NCBI NO: 9294106 NR Description: senescence-associated protein-like [Arabidopsis
  misc_feature (169)..(289): Homolog of NCBI NO: 9294106 NR Description: senescence-associated protein-like [Arabidopsis
  misc_feature (1)..(190): Homolog of NCBI NO: 30682045 NR Description: senescence-associated protein family [Arabidopsis
  misc_feature (169)..(289): Homolog of NCBI NO: 30682045 NR Description: senescence-associated protein family [Arabidopsis
MLRGGTGMLGVVNFITFLISIPILGGGIWLASRANSTDCIRFLQWPIIVVGLVLMVVSLMGFAGACYRQTWLLRLYLFAMFFVVLALLFFVVFAFAVTDRGAGQVVMSRRFPEYQLSDYGGWLRDRVADPQYWATISACLRDGHACAGMRRLARDPNTGMLVPETPAMFYGRNLSPIQSGCCKPPTSCAFTYMNETYWEQNPGVPTVPNDPDCSRWSNDQQMLCFQCDSCKAGVLAGIKKSWRKVAVLNIVVLIILVIVYVAGCAAFRNAKRIDNDEPVGMARMTKSHPSRFQF

SEQ ID NO: 12963 - protein, 287 aa, Zea mays subsp. mays
  peptide (1)..(287): Ceres Seq. ID no. 12411476
  misc_feature (1)..(249): Pfam Name: Tetraspanin family Pfam Description: Tetraspanin family
  misc_feature (1)..(285): Homolog of NCBI NO: 15231187 NR Description: putative protein; protein id: At3g45600.1, by cDNA: 11427., supported by cDNA: gi_14423445 [Arabidopsis
  misc_feature (1)..(278): Homolog of NCBI NO: 15238641 NR Description: senescence-associated protein - like; protein id:
  misc_feature (1)..(268): Homolog of NCBI NO: 3551954 NR Description: senescence-associated protein 5 [Hemerocallis
  misc_feature (1)..(268): Homolog of NCBI NO: 29367553 NR Description: senescence-associated protein-like protein [Oryza
  misc_feature (1)..(268): Homolog of NCBI NO: 20197174 NR Description: hypothetical protein [Arabidopsis thaliana]
  misc_feature (1)..(265): Homolog of NCBI NO: 15234374 NR Description: senescence-associated protein -like; protein id: supported by cDNA: 39831., supported by cDNA: gi_17065395, by cDNA: gi_20148628 [Arabidopsis thaliana]
  misc_feature (1)..(183): Homolog of NCBI NO: 9294106 NR Description: senescence-associated protein-like [Arabidopsis
  misc_feature (162)..(282): Homolog of NCBI NO: 9294106 NR Description: senescence-associated protein-like [Arabidopsis
  misc_feature (1)..(183): Homolog of NCBI NO: 30682045 NR Description: senescence-associated protein family [Arabidopsis
  misc_feature (162)..(282): Homolog of NCBI NO: 30682045 NR Description: senescence-associated protein family [Arabidopsis
MLGVVNFITFLISIPILGGGIWLASRANSTDCIRFLQWPIIVVGLVLMVVSLMGFAGACYRQTWLLRLYLFAMFFVVLALLFFVVFAFAVTDRGAGQVVMSRRFPEYQLSDYGGWLRDRVADPQYWATISACLRDGHACAGMRRLARDPNTGMLVPETPAMFYGRNLSPIQSGCCKPPTSCAFTYMNETYWEQNPGVPTVPNDPDCSRWSNDQQMLCFQCDSCKAGVLAGIKKSWRKVAVLNIVVLIILVIVYVAGCAAFRNAKRIDNDEPVGMARMTKSHPSRFQF

SEQ ID NO: 12964 - DNA, 470 bp, Zea mays subsp. mays
  misc_feature (1)..(470): Ceres Seq. ID no. 1341899
  misc_feature: MA Experiment ID: 108527 Result: Down-regulated in Transcription
  misc_feature: MA Experiment 108527 PARAMETER Experiment Name: Zm_5mM_NO_P Parameter: Age (day) Value: 8
  misc_feature: MA Experiment 108527 PARAMETER Experiment Name: Zm_5mM_NO_P Parameter: Organism Value: Zea mays
  misc_feature: MA Experiment 108527 PARAMETER Experiment Name: Zm_5mM_NO_P Parameter: Plant Line Value: 35A19
  misc_feature: MA Experiment 108527 PARAMETER Experiment Name: Zm_5mM_NO_P Parameter: Timepoint (hr) Value: 6
  misc_feature: MA Experiment 108527 PARAMETER Experiment Name: Zm_5mM_NO_P Parameter: Tissue Value: Aerial
  misc_feature: MA Experiment 108527 PARAMETER Experiment Name: Zm_5mM_NO_P Parameter: Treatment Value: 5mM NO vs. No Treatment
  misc_feature: MA Experiment ID: 108543 Result: Up-regulated in Transcription
  misc_feature: MA Experiment ID: 108556 Result: Down-regulated in Transcription
  misc_feature: MA Experiment 108556 PARAMETER Experiment Name: Zm_Drought_P Parameter: Age (day) Value: 9
  misc_feature: MA Experiment 108556 PARAMETER Experiment Name: Zm_Drought_P Parameter: Organism Value: Zea mays
  misc_feature: MA Experiment 108556 PARAMETER Experiment Name: Zm_Drought_P Parameter: Plant Line Value: 35A19
  misc_feature: MA Experiment 108556 PARAMETER Experiment Name: Zm_Drought_P Parameter: Timepoint (hr) Value: 24
  misc_feature: MA Experiment 108556 PARAMETER Experiment Name: Zm_Drought_P Parameter: Tissue Value: Aerial
  misc_feature: MA Experiment 108556 PARAMETER Experiment Name: Zm_Drought_P Parameter: Treatment Value: Drought vs. No Drought
  misc_feature: MA Experiment ID: 20000477 Result: Down-regulated in Transcription
  misc_feature: MA Experiment 20000477 PARAMETER Experiment Name: Zm_5mM_SA_P Parameter: Age (day) Value: 10
  misc_feature: MA Experiment 20000477 PARAMETER Experiment Name: Zm_5mM_SA_P Parameter: Organism Value: Zea mays
  misc_feature: MA Experiment 20000477 PARAMETER Experiment Name: Zm_5mM_SA_P Parameter: Plant Line Value: 35A19
  misc_feature: MA Experiment 20000477 PARAMETER Experiment Name: Zm_5mM_SA_P Parameter: Timepoint (hr) Value: 48
  misc_feature: MA Experiment 20000477 PARAMETER Experiment Name: Zm_5mM_SA_P Parameter: Tissue Value: Aerial
  misc_feature: MA Experiment 20000477 PARAMETER Experiment Name: Zm_5mM_SA_P Parameter: Treatment Value: 5mM SA vs. No Treatment
  misc_feature: MA Experiment ID: 20000478 Result: Down-regulated in Transcription
  misc_feature: MA Experiment 20000478 PARAMETER Experiment Name: Zm_5mM_SA_P Parameter: Age (day) Value: 11
  misc_feature: MA Experiment 20000478 PARAMETER Experiment Name: Zm_5mM_SA_P Parameter: Organism Value: Zea mays
  misc_feature: MA Experiment 20000478 PARAMETER Experiment Name: Zm_5mM_SA_P Parameter: Plant Line Value: 35A19
  misc_feature: MA Experiment 20000478 PARAMETER Experiment Name: Zm_5mM_SA_P Parameter: Timepoint (hr) Value: 72
  misc_feature: MA Experiment 20000478 PARAMETER Experiment Name: Zm_5mM_SA_P Parameter: Tissue Value: Aerial
  misc_feature: MA Experiment 20000478 PARAMETER Experiment Name: Zm_5mM_SA_P Parameter: Treatment Value: 5mM SA vs. No Treatment
  misc_feature: MA Experiment ID: 20000479 Result: Down-regulated in Transcription
  misc_feature: MA Experiment 20000479 PARAMETER Experiment Name: Zm_Drought_P Parameter: Age (day) Value: 10
  misc_feature: MA Experiment 20000479 PARAMETER Experiment Name: Zm_Drought_P Parameter: Organism Value: Zea mays
  misc_feature: MA Experiment 20000479 PARAMETER Experiment Name: Zm_Drought_P Parameter: Plant Line Value: 35A19
  misc_feature: MA Experiment 20000479 PARAMETER Experiment Name: Zm_Drought_P Parameter: Timepoint (hr) Value: 48
  misc_feature: MA Experiment 20000479 PARAMETER Experiment Name: Zm_Drought_P Parameter: Tissue Value: Aerial
  misc_feature: MA Experiment 20000479 PARAMETER Experiment Name: Zm_Drought_P Parameter: Treatment Value: Drought vs. No Drought
  misc_feature: MA Experiment ID: 20000480 Result: Down-regulated in Transcription
  misc_feature: MA Experiment 20000480 PARAMETER Experiment Name: Zm_Drought_P Parameter: Age (day) Value: 11
  misc_feature: MA Experiment 20000480 PARAMETER Experiment Name: Zm_Drought_P Parameter: Organism Value: Zea mays
  misc_feature: MA Experiment 20000480 PARAMETER Experiment Name: Zm_Drought_P Parameter: Plant Line Value: 35A19
  misc_feature: MA Experiment 20000480 PARAMETER Experiment Name: Zm_Drought_P Parameter: Timepoint (hr) Value: 72
  misc_feature: MA Experiment 20000480 PARAMETER Experiment Name: Zm_Drought_P Parameter: Tissue Value: Aerial
  misc_feature: MA Experiment 20000480 PARAMETER Experiment Name: Zm_Drought_P Parameter: Treatment Value: Drought vs. No Drought
  misc_feature: MA Experiment ID: 20000492 Result: Down-regulated in Transcription
  misc_feature: MA Experiment 20000492 PARAMETER Experiment Name: Zm_Hybrid_Seed_Dev_P Parameter: DAP Value: 12
  misc_feature: MA Experiment 20000492 PARAMETER Experiment Name: Zm_Hybrid_Seed_Dev_P Parameter: Organism Value: Zea mays
  misc_feature: MA Experiment 20000492 PARAMETER Experiment Name: Zm_Hybrid_Seed_Dev_P Parameter: Plant Line Value: 35A19
  misc_feature: MA Experiment 20000492 PARAMETER Experiment Name: Zm_Hybrid_Seed_Dev_P Parameter: Tissue Value: Fert Kernel vs. Unfert Floret
atcggttgtcattctcgtgattgtttcagtggaaacacgcgtgcaaattgagtgactgtctgggtgaataatctgaattggggtttttattctgtgtgttcttggtcgcaggtttattgatatggcagagtccttgtgtcagaaacgtgctttgraggctttccgtttagacccggcgaaatggggagtgaatgtgcaacctctatccggttcgcccgccaacttccatgtatacactgcactcttgaagccacatgaaaggatcatggctttggatcttcctcacggtggacatctttctcatggttaccagactgacactaagaagatatctgcaacttcaatattttttgagacaatgccttacagattggatgaaagcactggattgattgattacgatcagttggagaaaagcgctgttctttttaggccaaagttgatcattgctggtgcagtgcatatgctcg

SEQ ID NO: 12965 - protein, 116 aa, Zea mays subsp. mays
  peptide (1)..(116): Ceres Seq. ID no. 1341900
  misc_feature (1)..(112): Pfam Name: Serine hydroxymethyltransferase Pfam Description: Serine hydroxymethyltransferase
  misc_feature (1)..(112): Homolog of NCBI NO: 17017273 NR Description: serine hydroxymethyltransferase [Zea mays]
  misc_feature (1)..(112): Homolog of NCBI NO: 31126793 NR Description: putative glycine hydroxymethyltransferase [Oryza
  misc_feature (1)..(112): Homolog of NCBI NO: 38000003 NR Description: putative glycine hydroxymethyltransferase [Oryza
  misc_feature (1)..(112): Homolog of NCBI NO: 7433553 NR Description: glycine hydroxymethyltransferase (EC 2.1.2.1)
  misc_feature (1)..(112): Homolog of NCBI NO: 15235745 NR Description: glycine hydroxymethyltransferase like protein; id: At4g37930.1, supported by cDNA: 33799., supported by cDNA: supported by cDNA: gi_16226392, supported by cDNA:
  misc_feature (1)..(112): Homolog of NCBI NO: 1707998 NR Description: SERINE HYDROXYMETHYLTRANSFERASE, MITOCHONDRIAL
  misc_feature (1)..(112): Homolog of NCBI NO: 15809972 NR Description: AT4g37930/F20D10_50 [Arabidopsis thaliana]
  misc_feature (1)..(112): Homolog of NCBI NO: 462187 NR Description: SERINE HYDROXYMETHYLTRANSFERASE, MITOCHONDRIAL
  misc_feature (1)..(112): Homolog of NCBI NO: 1346155 NR Description: Serine hydroxymethyltransferase 1, mitochondrial (Serine methylase) (Glycine hydroxymethyltransferase) (SHMT) glycine hydroxymethyltransferase (EC glycine
  misc_feature (1)..(112): Homolog of NCBI NO: 14334888 NR Description: putative glycine hydroxymethyltransferase
  misc_feature (12)..(12): Xaa is any aa, unknown or other
MAESLCQKRALXAFRLDPAKWGVNVQPLSGSPANFHVYTALLKPHERIMALDLPHGGHLSHGYQTDTKKISATSIFFETMPYRLDESTGLIDYDQLEKSAVLFRPKLIIAGAVHML

SEQ ID NO: 12966 - protein, 68 aa, Zea mays subsp. mays
  peptide (1)..(68): Ceres Seq. ID no. 1341901
  misc_feature (1)..(64): Pfam Name: Serine hydroxymethyltransferase Pfam Description: Serine hydroxymethyltransferase
  misc_feature (1)..(64): Homolog of NCBI NO: 17017273 NR Description: serine hydroxymethyltransferase [Zea mays]
  misc_feature (1)..(64): Homolog of NCBI NO: 31126793 NR Description: putative glycine hydroxymethyltransferase [Oryza
  misc_feature (1)..(64): Homolog of NCBI NO: 38000003 NR Description: putative glycine hydroxymethyltransferase [Oryza
  misc_feature (1)..(64): Homolog of NCBI NO: 7433553 NR Description: glycine hydroxymethyltransferase (EC 2.1.2.1)
  misc_feature (1)..(64): Homolog of NCBI NO: 15235745 NR Description: glycine hydroxymethyltransferase like protein; id: At4g37930.1, supported by cDNA: 33799., supported by cDNA: supported by cDNA: gi_16226392, supported by cDNA:
  misc_feature (1)..(64): Homolog of NCBI NO: 1707998 NR Description: SERINE HYDROXYMETHYLTRANSFERASE, MITOCHONDRIAL
  misc_feature (1)..(64): Homolog of NCBI NO: 15809972 NR Description: AT4g37930/F20D10_50 [Arabidopsis thaliana]
  misc_feature (1)..(64): Homolog of NCBI NO: 462187 NR Description: SERINE HYDROXYMETHYLTRANSFERASE, MITOCHONDRIAL
  misc_feature (1)..(64): Homolog of NCBI NO: 1346155 NR Description: Serine hydroxymethyltransferase 1, mitochondrial (Serine methylase) (Glycine hydroxymethyltransferase) (SHMT) glycine hydroxymethyltransferase (EC glycine
  misc_feature (1)..(64): Homolog of NCBI NO: 14334888 NR Description: putative glycine hydroxymethyltransferase
MALDLPHGGHLSHGYQTDTKKISATSIFFETMPYRLDESTGLIDYDQLEKSAVLFRPKLIIAGAVHML

SEQ ID NO: 12967 - DNA, 1815 bp, Zea mays subsp. mays
  misc_feature (1)..(1815): Ceres Seq. ID no. 12355748
  misc_feature: MA Experiment ID: 108534 Result: Up-regulated in Transcription
  misc_feature: MA Experiment 108534 PARAMETER Experiment Name: Zm_4deg_Cold_P Parameter: Age (hr) Value: 8
  misc_feature: MA Experiment 108534 PARAMETER Experiment Name: Zm_4deg_Cold_P Parameter: Organism Value: Zea mays
  misc_feature: MA Experiment 108534 PARAMETER Experiment Name: Zm_4deg_Cold_P Parameter: Plant Line Value: 35A19
  misc_feature: MA Experiment 108534 PARAMETER Experiment Name: Zm_4deg_Cold_P Parameter: Temperature (deg C) Value: 4 vs. 22
  misc_feature: MA Experiment 108534 PARAMETER Experiment Name: Zm_4deg_Cold_P Parameter: Timepoint (hr) Value: 6
  misc_feature: MA Experiment 108534 PARAMETER Experiment Name: Zm_4deg_Cold_P Parameter: Tissue Value: Aerial
  misc_feature: MA Experiment ID: 20000535 Result: Down-regulated in Transcription
  misc_feature: MA Experiment 20000535 PARAMETER Experiment Name: Zm_Hybrid_Seed_Dev_P Parameter: DAP Value: 30 vs. 12
  misc_feature: MA Experiment 20000535 PARAMETER Experiment Name: Zm_Hybrid_Seed_Dev_P Parameter: Organism Value: Zea mays
  misc_feature: MA Experiment 20000535 PARAMETER Experiment Name: Zm_Hybrid_Seed_Dev_P Parameter: Plant Line Value: 35A19
  misc_feature: MA Experiment 20000535 PARAMETER Experiment Name: Zm_Hybrid_Seed_Dev_P Parameter: Tissue Value: Embryo vs. Unfert Floret
aaagtcaattcataaactcacaatggcggcaacggcataccccactgtggtgctcatcccactatgcgtcccaggccacctcgcgtccatgatcgaagccggcaagcggctgctcggcagaagccgctgccccatgtccctcaccgtgctcatcacgcagatgaccatgtccgccaacctgatgtccgacgtcgacgacatcatgcggcgggaagccgactccggcctggacatccgcttcgtccacctccccgccgtggagctccccaccgtccaccacggcctcgaggacttcatgatgcgcttcatacagctccacgcgacgcacgtcaaggaggccgtctccggcatgtcgtccccggtcgccgcggtcgtggtggactacttctgcaccaccctgttcgacgtcgcgcgcgagctcgcgctgccggcgtacgcctacatgccgtccggcgcgtcgatggtcgcgctcatgctgcggttaccggcgctggacggggaggtgtccggggacttcgaggcgatggaaggaacggtcgacctgcccgggatgccgccggtgccggctcgtctcatgccgtctccgctgatgaggaaggacccgaacttcgcgtggctggtgtaccatggcaaccgcttcatggaggccgacggcgtcatcgtcaacacggtagccgagctggagccgtccatcctcgcggccatcgccgacggcctctgcgtgtcaagacgccgcgctccggccgtctacccgatcggcccggtcctgcctctcaagccgccgtccgcgcccggcgacggcgagcaggtagtagcacagcggcacgagtgcgtgaggtggctcgacgcgcagcccccagcgtccgtcgtgctgctctgctttgggagcatgggcggcagcttcccgtcgccccaggtccgcgagatcgccgacggcctcgagcgcagcgggcaccgcttcctgtgggtgctccgtggcccgccaccgccggacggttccaagtacccgacggacgccaacgtccacgagctgctcccggaagggttcctggagaggacgaagggccgaggcctcgtgtggcccacgtgggcgccgcagaaggacatcctcgccaaccccgccgtcggcggcttcgtcacccactgcggctggaactccatcctcgagagcctgtggcacggcgtgccgatggtgcccttgccgcagttcgcggagcagcacctgaacgcgttcgagctcgtgtccgtcatgggcgtcgccgttgccatgcaggtggacaggaagcgcggcaacttcgtcgaggcggcggagctggagcgcgcggtccggtgcctgatgggcgggtcggaggaggaggggaggaaggcgcgggagaaggcgacggaggcgaaggccctgagccagaacggcgtggccagcggcgggtcgtcggacgcgtcggtgcagaaactggcgcgagagattttgcacaagcacgacgacaaggggtgtgccaccgcaagcggggagagcatgggcagcgtcgtcgttcccgcatctccggccagaataatatgatcccccgaacacggagaaatcgccgtcgtccacgaataaatcggaggccgccatgcgatccgtctggcactgctcacgttgtttgacattgttcagaatcgccgtgtgcactgtagtttcttatccgcagtagcttttaccattcgaaataatgtagcatagcaagcgctgcttcttcctaagtccgtgcagcgtagcccgcgtgttcgagctagtttgtgttaagttgaatgagttaatggatgctagttgtagtc

SEQ ID NO: 12968 - protein, 526 aa, Zea mays subsp. mays
  peptide (1)..(526): Ceres Seq. ID no. 12355749
  misc_feature (1)..(430): Homolog of NCBI NO: 29247944 NR Description: GLP_26_54603_52153 [Giardia lamblia ATCC 50803]
  misc_feature (215)..(523): Homolog of NCBI NO: 29247944 NR Description: GLP_26_54603_52153 [Giardia lamblia ATCC 50803]
MRPRPPRVHDRSRQAAARQKPLPHVPHRAHHADDHVRQPDVRRRRHHAAGSRLRPGHPLRPPPRRGAPHRPPRPRGLHDALHTAPRDARQGGRLRHVVPGRRGRGGLLLHHPVRRRARARAAGVRLHAVRRVDGRAHAAVTGAGRGGVRGLRGDGRNGRPARDAAGAGSSHAVSADEEGPELRVAGVPWQPLHGGRRRHRQHGSRAGAVHPRGHRRRPLRVKTPRSGRLPDRPGPASQAAVRARRRRAGSSTAARVREVARRAAPSVRRAALLWEHGRQLPVAPGPRDRRRPRAQRAPLPVGAPWPATAGRFQVPDGRQRPRAAPGRVPGEDEGPRPRVAHVGAAEGHPRQPRRRRLRHPLRLELHPREPVARRADGALAAVRGAAPERVRARVRHGRRRCHAGGQEARQLRRGGGAGARGPVPDGRVGGGGEEGAGEGDGGEGPEPERRGQRRVVGRVGAETGARDFAQARRQGVCHRKRGEHGQRRRSRISGQNNMIPRTRRNRRRPRINRRPPCDPSGTAHVV

SEQ ID NO: 12969 - protein, 518 aa, Zea mays subsp. mays
  peptide (1)..(518): Ceres Seq. ID no. 12355750
  misc_feature (15)..(489): Pfam Name: UDP-glucoronosyl and UDP-glucosyl transferase Pfam Description: UDP-glucoronosyl and UDP-glucosyl transferase
  misc_feature (8)..(490): Homolog of NCBI NO: 34394688 NR Description: putative glucosyltransferase [Oryza sativa
  misc_feature (12)..(488): Homolog of NCBI NO: 34394683 NR Description: putative flavonol 3-O-glucosyltransferase [Oryza
  misc_feature (10)..(491): Homolog of NCBI NO: 34394680 NR Description: putative glucosyltransferase [Oryza sativa
  misc_feature (12)..(491): Homolog of NCBI NO: 34394651 NR Description: putative glucosyltransferase [Oryza sativa
  misc_feature (10)..(484): Homolog of NCBI NO: 34394676 NR Description: putative glucosyltransferase [Oryza sativa
  misc_feature (12)..(488): Homolog of NCBI NO: 34394653 NR Description: putative glucosyltransferase-3 [Oryza sativa
  misc_feature (12)..(489): Homolog of NCBI NO: 34898742 NR Description: putative betanidin 6-O-glucosyltransferase [Oryza
  misc_feature (9)..(484): Homolog of NCBI NO: 22535568 NR Description: putative glucosyltransferase [Oryza sativa
  misc_feature (16)..(477): Homolog of NCBI NO: 14349251 NR Description: glucosyltransferase [Nicotiana tabacum]
  misc_feature (16)..(489): Homolog of NCBI NO: 18033791 NR Description: betanidin 6-O-glucosyltransferase [Dorotheanthus
KSIHKLTMAATAYPTVVLIPLCVPGHLASMIEAGKRLLGRSRCPMSLTVLITQMTMSANLMSDVDDIMRREADSGLDIRFVHLPAVELPTVHHGLEDFMMRFIQLHATHVKEAVSGMSSPVAAVVVDYFCTTLFDVARELALPAYAYMPSGASMVALMLRLPALDGEVSGDFEAMEGTVDLPGMPPVPARLMPSPLMRKDPNFAWLVYHGNRFMEADGVIVNTVAELEPSILAAIADGLCVSRRRAPAVYPIGPVLPLKPPSAPGDGEQVVAQRHECVRWLDAQPPASVVLLCFGSMGGSFPSPQVREIADGLERSGHRFLWVLRGPPPPDGSKYPTDANVHELLPEGFLERTKGRGLVWPTWAPQKDILANPAVGGFVTHCGWNSILESLWHGVPMVPLPQFAEQHLNAFELVSVMGVAVAMQVDRKRGNFVEAAELERAVRCLMGGSEEEGRKAREKATEAKALSQNGVASGGSSDASVQKLAREILHKHDDKGCATASGESMGSVVVPASPARII

SEQ ID NO: 12970 - protein, 511 aa, Zea mays subsp. mays
  peptide (1)..(511): Ceres Seq. ID no. 12355751
  misc_feature (8)..(482): Pfam Name: UDP-glucoronosyl and UDP-glucosyl transferase Pfam Description: UDP-glucoronosyl and UDP-glucosyl transferase
  misc_feature (1)..(483): Homolog of NCBI NO: 34394688 NR Description: putative glucosyltransferase [Oryza sativa
  misc_feature (5)..(481): Homolog of NCBI NO: 34394683 NR Description: putative flavonol 3-O-glucosyltransferase [Oryza
  misc_feature (3)..(484): Homolog of NCBI NO: 34394680 NR Description: putative glucosyltransferase [Oryza sativa
  misc_feature (5)..(484): Homolog of NCBI NO: 34394651 NR Description: putative glucosyltransferase [Oryza sativa
  misc_feature (3)..(477): Homolog of NCBI NO: 34394676 NR Description: putative glucosyltransferase [Oryza sativa
  misc_feature (5)..(481): Homolog of NCBI NO: 34394653 NR Description: putative glucosyltransferase-3 [Oryza sativa
  misc_feature (5)..(482): Homolog of NCBI NO: 34898742 NR Description: putative betanidin 6-O-glucosyltransferase [Oryza
  misc_feature (2)..(477): Homolog of NCBI NO: 22535568 NR Description: putative glucosyltransferase [Oryza sativa
  misc_feature (9)..(470): Homolog of NCBI NO: 14349251 NR Description: glucosyltransferase [Nicotiana tabacum]
  misc_feature (9)..(482): Homolog of NCBI NO: 18033791 NR Description: betanidin 6-O-glucosyltransferase [Dorotheanthus
MAATAYPTVVLIPLCVPGHLASMIEAGKRLLGRSRCPMSLTVLITQMTMSANLMSDVDDIMRREADSGLDIRFVHLPAVELPTVHHGLEDFMMRFIQLHATHVKEAVSGMSSPVAAVVVDYFCTTLFDVARELALPAYAYMPSGASMVALMLRLPALDGEVSGDFEAMEGTVDLPGMPPVPARLMPSPLMRKDPNFAWLVYHGNRFMEADGVIVNTVAELEPSILAAIADGLCVSRRRAPAVYPIGPVLPLKPPSAPGDGEQVVAQRHECVRWLDAQPPASVVLLCFGSMGGSFPSPQVREIADGLERSGHRFLWVLRGPPPPDGSKYPTDANVHELLPEGFLERTKGRGLVWPTWAPQKDILANPAVGGFVTHCGWNSILESLWHGVPMVPLPQFAEQHLNAFELVSVMGVAVAMQVDRKRGNFVEAAELERAVRCLMGGSEEEGRKAREKATEAKALSQNGVASGGSSDASVQKLAREILHKHDDKGCATASGESMGSVVVPASPARII

SEQ ID NO: 12971 - DNA, 1060 bp, Zea mays subsp. mays
  misc_feature (1)..(1060): Ceres Seq. ID no. 12340681
  misc_feature: MA Experiment ID: 108504 Result: Down-regulated in Transcription
  misc_feature: MA Experiment 108504 PARAMETER Experiment Name: Zm_Drought_P Parameter: Age (day) Value: 8
  misc_feature: MA Experiment 108504 PARAMETER Experiment Name: Zm_Drought_P Parameter: Organism Value: Zea mays
  misc_feature: MA Experiment 108504 PARAMETER Experiment Name: Zm_Drought_P Parameter: Plant Line Value: 35A19
  misc_feature: MA Experiment 108504 PARAMETER Experiment Name: Zm_Drought_P Parameter: Timepoint (hr) Value: 12
  misc_feature: MA Experiment 108504 PARAMETER Experiment Name: Zm_Drought_P Parameter: Tissue Value: Aerial
  misc_feature: MA Experiment 108504 PARAMETER Experiment Name: Zm_Drought_P Parameter: Treatment Value: Drought vs. No Drought
  misc_feature: MA Experiment ID: 108527 Result: Down-regulated in Transcription
  misc_feature: MA Experiment 108527 PARAMETER Experiment Name: Zm_5mM_NO_P Parameter: Age (day) Value: 8
  misc_feature: MA Experiment 108527 PARAMETER Experiment Name: Zm_5mM_NO_P Parameter: Organism Value: Zea mays
  misc_feature: MA Experiment 108527 PARAMETER Experiment Name: Zm_5mM_NO_P Parameter: Plant Line Value: 35A19
  misc_feature: MA Experiment 108527 PARAMETER Experiment Name: Zm_5mM_NO_P Parameter: Timepoint (hr) Value: 6
  misc_feature: MA Experiment 108527 PARAMETER Experiment Name: Zm_5mM_NO_P Parameter: Tissue Value: Aerial
  misc_feature: MA Experiment 108527 PARAMETER Experiment Name: Zm_5mM_NO_P Parameter: Treatment Value: 5mM NO vs. No Treatment
  misc_feature: MA Experiment ID: 108529 Result: Up-regulated in Transcription
  misc_feature: MA Experiment 108529 PARAMETER Experiment Name: Zm_Imbibed_Seeds_P Parameter: Age (day) Value: 5 vs. 2
  misc_feature: MA Experiment 108529 PARAMETER Experiment Name: Zm_Imbibed_Seeds_P Parameter: Organism Value: Zea mays
  misc_feature: MA Experiment 108529 PARAMETER Experiment Name: Zm_Imbibed_Seeds_P Parameter: Plant Line Value: 35A19
  misc_feature: MA Experiment 108529 PARAMETER Experiment Name: Zm_Imbibed_Seeds_P Parameter: Tissue Value: Roots vs. Embryo
  misc_feature: MA Experiment ID: 108535 Result: Down-regulated in Transcription
  misc_feature: MA Experiment 108535 PARAMETER Experiment Name: Zm_Meristem_P Parameter: Age (day) Value: 8
  misc_feature: MA Experiment 108535 PARAMETER Experiment Name: Zm_Meristem_P Parameter: Organism Value: Zea mays
  misc_feature: MA Experiment 108535 PARAMETER Experiment Name: Zm_Meristem_P Parameter: Plant Line Value: 35A19
  misc_feature: MA Experiment 108535 PARAMETER Experiment Name: Zm_Meristem_P Parameter: Tissue Value: Root Meristem vs. Above Root Meristem
  misc_feature: MA Experiment ID: 108546 Result: Up-regulated in Transcription
  misc_feature: MA Experiment 108546 PARAMETER Experiment Name: Zm_Imbibed_Seeds_P Parameter: Age (day) Value: 3 vs. 2
  misc_feature: MA Experiment 108546 PARAMETER Experiment Name: Zm_Imbibed_Seeds_P Parameter: Organism Value: Zea mays
  misc_feature: MA Experiment 108546 PARAMETER Experiment Name: Zm_Imbibed_Seeds_P Parameter: Plant Line Value: 35A19
  misc_feature: MA Experiment 108546 PARAMETER Experiment Name: Zm_Imbibed_Seeds_P Parameter: Tissue Value: Roots vs. Embryo
  misc_feature: MA Experiment ID: 108556 Result: Down-regulated in Transcription
  misc_feature: MA Experiment 108556 PARAMETER Experiment Name: Zm_Drought_P Parameter: Age (day) Value: 9
  misc_feature: MA Experiment 108556 PARAMETER Experiment Name: Zm_Drought_P Parameter: Organism Value: Zea mays
  misc_feature: MA Experiment 108556 PARAMETER Experiment Name: Zm_Drought_P Parameter: Plant Line Value: 35A19
  misc_feature: MA Experiment 108556 PARAMETER Experiment Name: Zm_Drought_P Parameter: Timepoint (hr) Value: 24
  misc_feature: MA Experiment 108556 PARAMETER Experiment Name: Zm_Drought_P Parameter: Tissue Value: Aerial
  misc_feature: MA Experiment 108556 PARAMETER Experiment Name: Zm_Drought_P Parameter: Treatment Value: Drought vs. No Drought
  misc_feature: MA Experiment ID: 108597 Result: Down-regulated in Transcription
  misc_feature: MA Experiment 108597 PARAMETER Experiment Name: Zm_100uM_ABA_P Parameter: Age (day) Value: 9
  misc_feature: MA Experiment 108597 PARAMETER Experiment Name: Zm_100uM_ABA_P Parameter: Organism Value: Zea mays
  misc_feature: MA Experiment 108597 PARAMETER Experiment Name: Zm_100uM_ABA_P Parameter: Plant Line Value: 35A19
  misc_feature: MA Experiment 108597 PARAMETER Experiment Name: Zm_100uM_ABA_P Parameter: Timepoint (hr) Value: 24
  misc_feature: MA Experiment 108597 PARAMETER Experiment Name: Zm_100uM_ABA_P Parameter: Tissue Value: Aerial
  misc_feature: MA Experiment 108597 PARAMETER Experiment Name: Zm_100uM_ABA_P Parameter: Treatment Value: 100uM ABA vs. No Treatment
  misc_feature: MA Experiment ID: 108689 Result: Down-regulated in Transcription
  misc_feature: MA Experiment 108689 PARAMETER Experiment Name: Zm_Drought_Roots_P Parameter: Age (day) Value: 9
  misc_feature: MA Experiment 108689 PARAMETER Experiment Name: Zm_Drought_Roots_P Parameter: Organism Value: Zea mays
  misc_feature: MA Experiment 108689 PARAMETER Experiment Name: Zm_Drought_Roots_P Parameter: Plant Line Value: 35A19
  misc_feature: MA Experiment 108689 PARAMETER Experiment Name: Zm_Drought_Roots_P Parameter: Timepoint (hr) Value: 24
  misc_feature: MA Experiment 108689 PARAMETER Experiment Name: Zm_Drought_Roots_P Parameter: Tissue Value: Roots
  misc_feature: MA Experiment 108689 PARAMETER Experiment Name: Zm_Drought_Roots_P Parameter: Treatment Value: Drought vs. No Drought
  misc_feature: MA Experiment ID: 20000478 Result: Down-regulated in Transcription
  misc_feature: MA Experiment 20000478 PARAMETER Experiment Name: Zm_5mM_SA_P Parameter: Age (day) Value: 11
  misc_feature: MA Experiment 20000478 PARAMETER Experiment Name: Zm_5mM_SA_P Parameter: Organism Value: Zea mays
  misc_feature: MA Experiment 20000478 PARAMETER Experiment Name: Zm_5mM_SA_P Parameter: Plant Line Value: 35A19
  misc_feature: MA Experiment 20000478 PARAMETER Experiment Name: Zm_5mM_SA_P Parameter: Timepoint (hr) Value: 72
  misc_feature: MA Experiment 20000478 PARAMETER Experiment Name: Zm_5mM_SA_P Parameter: Tissue Value: Aerial
  misc_feature: MA Experiment 20000478 PARAMETER Experiment Name: Zm_5mM_SA_P Parameter: Treatment Value: 5mM SA vs. No Treatment
  misc_feature: MA Experiment ID: 20000535 Result: Down-regulated in Transcription
  misc_feature: MA Experiment 20000535 PARAMETER Experiment Name: Zm_Hybrid_Seed_Dev_P Parameter: DAP Value: 30 vs. 12
  misc_feature: MA Experiment 20000535 PARAMETER Experiment Name: Zm_Hybrid_Seed_Dev_P Parameter: Organism Value: Zea mays
  misc_feature: MA Experiment 20000535 PARAMETER Experiment Name: Zm_Hybrid_Seed_Dev_P Parameter: Plant Line Value: 35A19
  misc_feature: MA Experiment 20000535 PARAMETER Experiment Name: Zm_Hybrid_Seed_Dev_P Parameter: Tissue Value: Embryo vs. Unfert Floret
  misc_feature: MA Experiment ID: 20001610 Result: Down-regulated in Transcription
  misc_feature: MA Experiment 20001610 PARAMETER Experiment Name: Zm_50ppm_KNO3_L-to-H_P Parameter: Age (day) Value: 19
  misc_feature: MA Experiment 20001610 PARAMETER Experiment Name: Zm_50ppm_KNO3_L-to-H_P Parameter: Organism Value: Zea mays
  misc_feature: MA Experiment 20001610 PARAMETER Experiment Name: Zm_50ppm_KNO3_L-to-H_P Parameter: Plant Line Value: 35A19
  misc_feature: MA Experiment 20001610 PARAMETER Experiment Name: Zm_50ppm_KNO3_L-to-H_P Parameter: Timepoint (hr) Value: 2
  misc_feature: MA Experiment 20001610 PARAMETER Experiment Name: Zm_50ppm_KNO3_L-to-H_P Parameter: Tissue Value: Roots
  misc_feature: MA Experiment 20001610 PARAMETER Experiment Name: Zm_50ppm_KNO3_L-to-H_P Parameter: Treatment Value: 50ppm KNO3 vs. 50ppm KCl
  misc_feature: MA Experiment ID: 20001614 Result: Down-regulated in Transcription
  misc_feature: MA Experiment 20001614 PARAMETER Experiment Name: Zm_50ppm_KNO3_L-to-H_P Parameter: Age (day) Value: 21
  misc_feature: MA Experiment 20001614 PARAMETER Experiment Name: Zm_50ppm_KNO3_L-to-H_P Parameter: Organism Value: Zea mays
  misc_feature: MA Experiment 20001614 PARAMETER Experiment Name: Zm_50ppm_KNO3_L-to-H_P Parameter: Plant Line Value: 35A19
  misc_feature: MA Experiment 20001614 PARAMETER Experiment Name: Zm_50ppm_KNO3_L-to-H_P Parameter: Timepoint (hr) Value: 48
  misc_feature: MA Experiment 20001614 PARAMETER Experiment Name: Zm_50ppm_KNO3_L-to-H_P Parameter: Tissue Value: Roots
  misc_feature: MA Experiment 20001614 PARAMETER Experiment Name: Zm_50ppm_KNO3_L-to-H_P Parameter: Treatment Value: 50ppm KNO3 vs. 50ppm KCl
agagaagatgttcgacgagatgcacgctctgttccacgagctgaagagcgggcatgcgcctgtccagcgtgctcttcccctacgcccccacgccgacgaaccgccggcgcgacagggcgcgcgccaagctgttaaagatattcagcgaggtcgtgcggtcccggaggaggcggggcgaggaggagaaggagaaggaggaggacgtgctgcagagcctgatcgattccaggtacaaggacgggcgggccacgaccgaggaggaggtcaccggcatgatcatcctcctggtcttcggcgggatggacacgagcacgctcgccagcacctggaccggcgcgcgcctgctcagcaccccggcggccatggcagccgcggtcgaggagcagaggcggatcctcaccgaccacgggcacggggcaccgcgtcggctacagtgaattcatgcagatgaccaccctccactggagcatcaaggaggcgctgaggatgcaccctccgtcggcggtgttcttccgcaaggcgcggaggagcttcggcgtgcggacgagagacggccgcgagtacgaggtcccgggtgggcatacggtggcgagccccgtgctgttcaacagccacctgcctagcgtgtacaaggaccccgacgtgtacgacccgacccggtttgggcctgggagggaggaggacagggccggcggtaagttcacctacgaggcgtttagctgcgggcggcacagctgcgtcggcgaggcgtacgcgtatctgcagatcaaggtgatgctcagccatttgctgaggaacttccagctcgagctcgtgtcccctttccctcagacagattgggggaagctggtgcctgagcctaaagggaaagtgatggtcaggtacaagaggcagcgcctgctctcagtgcctagctagtagaagatggctagtacaagaagaaactagtgtggacaaagctggggatgtgtgtgtttatcggcctgtactgtagcatgtgtaattatgtttgcctgtttaatctctatggcgatcggcttagaaaacctgttgacacttg

SEQ ID NO: 12972 - protein, 158 aa, Zea mays subsp. mays
  peptide (1)..(158): Ceres Seq. ID no. 12340682
  misc_feature (1)..(153): Homolog of NCBI NO: 34901524 NR Description: putative cytochrome P450(Obtusifoliol 14-alpha
  misc_feature (1)..(153): Homolog of NCBI NO: 18000074 NR Description: obtusifoliol-14-demethylase [Nicotiana tabacum]
  misc_feature (1)..(153): Homolog of NCBI NO: 15221075 NR Description: putative obtusifoliol 14-alpha demethylase; id: At1g11680.1, supported by cDNA: 110306., supported by cDNA: supported by cDNA: gi_15292852, supported by cDNA:
  misc_feature (1)..(153): Homolog of NCBI NO: 27461067 NR Description: obtusifoliol-14-demethylase [Nicotiana tabacum]
  misc_feature (1)..(154): Homolog of NCBI NO: 27542762 NR Description: cytochrome P450-like protein [Sorghum bicolor]
  misc_feature (1)..(154): Homolog of NCBI NO: 5921924 NR Description: Cytochrome P450 51 (CYPL1) (P450-L1A1)
  misc_feature (1)..(154): Homolog of NCBI NO: 7489685 NR Description: probable obtusifoliol 14-alpha-demethylase CYP51
  misc_feature (1)..(154): Homolog of NCBI NO: 6166036 NR Description: Cytochrome P450 51 (CYPL1) (P450-L1A1)
  misc_feature (1)..(155): Homolog of NCBI NO: 34899804 NR Description: putative cytochrome P450(Obtusifoliol 14-alpha
  misc_feature (1)..(154): Homolog of NCBI NO: 4586676 NR Description: sterol 14-demethylase [Oryza sativa (japonica
MQMTTLHWSIKEALRMHPPSAVFFRKARRSFGVRTRDGREYEVPGGHTVASPVLFNSHLPSVYKDPDVYDPTRFGPGREEDRAGGKFTYEAFSCGRHSCVGEAYAYLQIKVMLSHLLRNFQLELVSPFPQTDWGKLVPEPKGKVMVRYKRQRLLSVPS

SEQ ID NO: 12973 - protein, 156 aa, Zea mays subsp. mays
  peptide (1)..(156): Ceres Seq. ID no. 12340683
  misc_feature (1)..(151): Homolog of NCBI NO: 34901524 NR Description: putative cytochrome P450(Obtusifoliol 14-alpha
  misc_feature (1)..(151): Homolog of NCBI NO: 18000074 NR Description: obtusifoliol-14-demethylase [Nicotiana tabacum]
  misc_feature (1)..(151): Homolog of NCBI NO: 15221075 NR Description: putative obtusifoliol 14-alpha demethylase; id: At1g11680.1, supported by cDNA: 110306., supported by cDNA: supported by cDNA: gi_15292852, supported by cDNA:
  misc_feature (1)..(151): Homolog of NCBI NO: 27461067 NR Description: obtusifoliol-14-demethylase [Nicotiana tabacum]
  misc_feature (1)..(152): Homolog of NCBI NO: 27542762 NR Description: cytochrome P450-like protein [Sorghum bicolor]
  misc_feature (1)..(152): Homolog of NCBI NO: 5921924 NR Description: Cytochrome P450 51 (CYPL1) (P450-L1A1)
  misc_feature (1)..(152): Homolog of NCBI NO: 7489685 NR Description: probable obtusifoliol 14-alpha-demethylase CYP51
  misc_feature (1)..(152): Homolog of NCBI NO: 6166036 NR Description: Cytochrome P450 51 (CYPL1) (P450-L1A1)
  misc_feature (1)..(153): Homolog of NCBI NO: 34899804 NR Description: putative cytochrome P450(Obtusifoliol 14-alpha
  misc_feature (1)..(152): Homolog of NCBI NO: 4586676 NR Description: sterol 14-demethylase [Oryza sativa (japonica
MTTLHWSIKEALRMHPPSAVFFRKARRSFGVRTRDGREYEVPGGHTVASPVLFNSHLPSVYKDPDVYDPTRFGPGREEDRAGGKFTYEAFSCGRHSCVGEAYAYLQIKVMLSHLLRNFQLELVSPFPQTDWGKLVPEPKGKVMVRYKRQRLLSVPS

SEQ ID NO: 12974 - protein, 149 aa, Zea mays subsp. mays
  peptide (1)..(149): Ceres Seq. ID no. 12340684
  misc_feature (1)..(29): Homolog of NCBI NO: 27542762 NR Description: cytochrome P450-like protein [Sorghum bicolor]
  misc_feature (1)..(29): Homolog of NCBI NO: 6166036 NR Description: Cytochrome P450 51 (CYPL1) (P450-L1A1)
  misc_feature (1)..(29): Homolog of NCBI NO: 7489685 NR Description: probable obtusifoliol 14-alpha-demethylase CYP51
EKMFDEMHALFHELKSGHAPVQRALPLRPHADEPPARQGARQAVKDIQRGRAVPEEAGRGGEGEGGGRAAEPDRFQVQGRAGHDRGGGHRHDHPPGLRRDGHEHARQHLDRRAPAQHPGGHGSRGRGAEADPHRPRARGTASATVNSCR

SEQ ID NO: 12975 - DNA, 1845 bp, Zea mays subsp. mays
  misc_feature (1)..(1845): Ceres Seq. ID no. 12423896
  misc_feature: MA Experiment ID: 108523 Result: Up-regulated in Transcription
  misc_feature: MA Experiment 108523 PARAMETER Experiment Name: Zm_42deg_Heat_P Parameter: Age (day) Value: 8
  misc_feature: MA Experiment 108523 PARAMETER Experiment Name: Zm_42deg_Heat_P Parameter: Organism Value: Zea mays
  misc_feature: MA Experiment 108523 PARAMETER Experiment Name: Zm_42deg_Heat_P Parameter: Plant Line Value: 35A19
  misc_feature: MA Experiment 108523 PARAMETER Experiment Name: Zm_42deg_Heat_P Parameter: Temperature (deg C) Value: 42 vs. 22
  misc_feature: MA Experiment 108523 PARAMETER Experiment Name: Zm_42deg_Heat_P Parameter: Timepoint (hr) Value: 6
  misc_feature: MA Experiment 108523 PARAMETER Experiment Name: Zm_42deg_Heat_P Parameter: Tissue Value: Aerial
  misc_feature: MA Experiment ID: 108544 Result: Down-regulated in Transcription
  misc_feature: MA Experiment ID: 108556 Result: Down-regulated in Transcription
  misc_feature: MA Experiment 108556 PARAMETER Experiment Name: Zm_Drought_P Parameter: Age (day) Value: 9
  misc_feature: MA Experiment 108556 PARAMETER Experiment Name: Zm_Drought_P Parameter: Organism Value: Zea mays
  misc_feature: MA Experiment 108556 PARAMETER Experiment Name: Zm_Drought_P Parameter: Plant Line Value: 35A19
  misc_feature: MA Experiment 108556 PARAMETER Experiment Name: Zm_Drought_P Parameter: Timepoint (hr) Value: 24
  misc_feature: MA Experiment 108556 PARAMETER Experiment Name: Zm_Drought_P Parameter: Tissue Value: Aerial
  misc_feature: MA Experiment 108556 PARAMETER Experiment Name: Zm_Drought_P Parameter: Treatment Value: Drought vs. No Drought
  misc_feature: MA Experiment ID: 20000535 Result: Down-regulated in Transcription
  misc_feature: MA Experiment 20000535 PARAMETER Experiment Name: Zm_Hybrid_Seed_Dev_P Parameter: DAP Value: 30 vs. 12
  misc_feature: MA Experiment 20000535 PARAMETER Experiment Name: Zm_Hybrid_Seed_Dev_P Parameter: Organism Value: Zea mays
  misc_feature: MA Experiment 20000535 PARAMETER Experiment Name: Zm_Hybrid_Seed_Dev_P Parameter: Plant Line Value: 35A19
  misc_feature: MA Experiment 20000535 PARAMETER Experiment Name: Zm_Hybrid_Seed_Dev_P Parameter: Tissue Value: Embryo vs. Unfert Floret
gagtgtctcgtgctgctgcttccgctgcagtaaaatacggggaagaggaggggagggagacgcggccgctgcctgccgcacatgctttaagtcccactccccacctccccagatctccgccctcctccccaccgcccccattcctcccctcggccgcaaccgtagccgccgcactacggagcaagatcgtcgggtagacggacgggcgggcgggcgggcgcggctctgtatctatctgtcggtgggagaccgcgtgtgtcggttaggcggcgggtggcaaggaagaatggcggcgagcggcagatccgtcgcgtgctgtgccgccgcgctgctcgcggccgcgttgctcctctccgcaccgactgcaacagaggcttatgattcgctggatccaaatggcaacatcaccataaaatgggatatcatgcagtggactcctgatggatatgtcgctgttgtcacaatgtttaattatcaacaatttcggcatatcggcgcacctggttggcagcttgggtggacatgggcaaagaaggaggttatatggtcaatggttggggctcagaccactgaacagggcgactgctcaaagttcaagagcagcccaccccattgctgcaagaaagatccaacaattgtcgatttacttccaggcactccatacaacatgcaaattgccaattgctgcaaggcaggagttgtaaatacctttaaccaggacccagcaaatgctgcttcctccttccagatcagtgttggtcttgctggaactaccaataaaactgttaaggtgcccaggaacttcactcttaagactccaggccctgggtacacatgtgggcgtgccattgttggcaggcctacgaagtttttcaccgcggacgggcgcagggcaacccaagctctaatgacatggaatgtgacctgcacatattcccaatttcttgctcagaagactccatcctgctgtgtatctctatcatcgttttataatgacacaattgtgaactgcccaacatgctcatgtggctgccagaacccaagtgggtcaaactgtgtgaatgaggattcacctaatctacaagctgcaattgatggccctggcaaatgcactggtcagccccttgtacaatgcacttcccacatgtgcccgataagaatccactggcatgtgaagctcaactacaaggattactggagagtgaaaatcactatcacaaacttcaacttccgcatgaattacacgcagtggaacttagtagcccagcatccaaactttgataatatcactcagttgttcagcttcaactacaaaccacttactccatatggtggtggcataaatgatacggcaatgttctggggtgtaaaattctacaatgatctgctgatgcaagccggcaaacttgggaatgtgcaatcagagctgcttctccgcaaggactcccggactttcactttcgaaaagggatgggccttcccacgccgagtttacttcaatggtgataattgtgtcatgccatctcctgaaaattatccatggctgccgaatgcaagccctctaacaaaaccattggcactcccattcttggtattctgggttgccttggctgctctgttggcttatgcatgattagtgggatcaagaggtttagcaagtttcaagttgatgtcagattccatgaggtgcactgcaacaagtcatttgttcattcaattccatggttgcacagaaaagatgaggcgatgccaagaaaaagtcgatatgtctatgtgtttaagttaaagggccaaaatgtatttcttgtttggtatataacagccctacaacactttggtgaactg

SEQ ID NO: 12976 - protein, 543 aa, Zea mays subsp. mays
  peptide (1)..(543): Ceres Seq. ID no. 12423897
  misc_feature (96)..(543): Homolog of NCBI NO: 30090026 NR Description: phytochelatin synthetase-like protein 2 [Sorghum
  misc_feature (94)..(542): Homolog of NCBI NO: 30090032 NR Description: phytochelatin synthetase [Triticum monococcum]
  misc_feature (96)..(516): Homolog of NCBI NO: 30090025 NR Description: phytochelatin synthetase-like protein 1 [Sorghum
  misc_feature (184)..(543): Homolog of NCBI NO: 6690554 NR Description: phytochelatin synthetase-like protein [Zea mays]
  misc_feature (109)..(533): Homolog of NCBI NO: 21553837 NR Description: phytochelatin synthetase-like protein
  misc_feature (109)..(533): Homolog of NCBI NO: 18424412 NR Description: phytochelatin synthetase - like protein; protein At5g60920.1, supported by cDNA: 17250., supported by cDNA: [Arabidopsis thaliana] >gi|14193657|gb|AAK56072.1|AF319663_1
  misc_feature (123)..(532): Homolog of NCBI NO: 13477083 NR Description: phytochelatin synthetase-like protein
  misc_feature (118)..(517): Homolog of NCBI NO: 15232863 NR Description: unknown protein; protein id: At3g02210.1 thaliana] >gi|6041808|gb|AAF02128.1|AC009755_21 unknown protein
  misc_feature (121)..(532): Homolog of NCBI NO: 21618129 NR Description: phytochelatin synthetase-like protein
  misc_feature (121)..(532): Homolog of NCBI NO: 18406342 NR Description: phytochelatin synthetase-like protein; protein
SVSCCCFRCSKIRGRGGEGDAAAACRTCFKSHSPPPQISALLPTAPIPPLGRNRSRRTTEQDRRVDGRAGGRARLCIYLSVGDRVCRLGGGWQGRMAASGRSVACCAAALLAAALLLSAPTATEAYDSLDPNGNITIKWDIMQWTPDGYVAVVTMFNYQQFRHIGAPGWQLGWTWAKKEVIWSMVGAQTTEQGDCSKFKSSPPHCCKKDPTIVDLLPGTPYNMQIANCCKAGVVNTFNQDPANAASSFQISVGLAGTTNKTVKVPRNFTLKTPGPGYTCGRAIVGRPTKFFTADGRRATQALMTWNVTCTYSQFLAQKTPSCCVSLSSFYNDTIVNCPTCSCGCQNPSGSNCVNEDSPNLQAAIDGPGKCTGQPLVQCTSHMCPIRIHWHVKLNYKDYWRVKITITNFNFRMNYTQWNLVAQHPNFDNITQLFSFNYKPLTPYGGGINDTAMFWGVKFYNDLLMQAGKLGNVQSELLLRKDSRTFTFEKGWAFPRRVYFNGDNCVMPSPENYPWLPNASPLTKPLALPFLVFWVALAALLAYA

SEQ ID NO: 12977 - protein, 448 aa, Zea mays subsp. mays
  peptide (1)..(448): Ceres Seq. ID no. 12423898
  misc_feature (1)..(448): Homolog of NCBI NO: 30090026 NR Description: phytochelatin synthetase-like protein 2 [Sorghum
  misc_feature (1)..(447): Homolog of NCBI NO: 30090032 NR Description: phytochelatin synthetase [Triticum monococcum]
  misc_feature (1)..(421): Homolog of NCBI NO: 30090025 NR Description: phytochelatin synthetase-like protein 1 [Sorghum
  misc_feature (89)..(448): Homolog of NCBI NO: 6690554 NR Description: phytochelatin synthetase-like protein [Zea mays]
  misc_feature (14)..(438): Homolog of NCBI NO: 21553837 NR Description: phytochelatin synthetase-like protein
  misc_feature (14)..(438): Homolog of NCBI NO: 18424412 NR Description: phytochelatin synthetase - like protein; protein At5g60920.1, supported by cDNA: 17250., supported by cDNA: [Arabidopsis thaliana] >gi|14193657|gb|AAK56072.1|AF319663_1
  misc_feature (28)..(437): Homolog of NCBI NO: 13477083 NR Description: phytochelatin synthetase-like protein
  misc_feature (23)..(422): Homolog of NCBI NO: 15232863 NR Description: unknown protein; protein id: At3g02210.1 thaliana] >gi|6041808|gb|AAF02128.1|AC009755_21 unknown protein
  misc_feature (26)..(437): Homolog of NCBI NO: 21618129 NR Description: phytochelatin synthetase-like protein
  misc_feature (26)..(437): Homolog of NCBI NO: 18406342 NR Description: phytochelatin synthetase-like protein; protein
MAASGRSVACCAAALLAAALLLSAPTATEAYDSLDPNGNITIKWDIMQWTPDGYVAVVTMFNYQQFRHIGAPGWQLGWTWAKKEVIWSMVGAQTTEQGDCSKFKSSPPHCCKKDPTIVDLLPGTPYNMQIANCCKAGVVNTFNQDPANAASSFQISVGLAGTTNKTVKVPRNFTLKTPGPGYTCGRAIVGRPTKFFTADGRRATQALMTWNVTCTYSQFLAQKTPSCCVSLSSFYNDTIVNCPTCSCGCQNPSGSNCVNEDSPNLQAAIDGPGKCTGQPLVQCTSHMCPIRIHWHVKLNYKDYWRVKITITNFNFRMNYTQWNLVAQHPNFDNITQLFSFNYKPLTPYGGGINDTAMFWGVKFYNDLLMQAGKLGNVQSELLLRKDSRTFTFEKGWAFPRRVYFNGDNCVMPSPENYPWLPNASPLTKPLALPFLVFWVALAALLAYA

SEQ ID NO: 12978 - protein, 402 aa, Zea mays subsp. mays
  peptide (1)..(402): Ceres Seq. ID no. 12423899
  misc_feature (43)..(402): Homolog of NCBI NO: 6690554 NR Description: phytochelatin synthetase-like protein [Zea mays]
  misc_feature (1)..(392): Homolog of NCBI NO: 21553837 NR Description: phytochelatin synthetase-like protein
  misc_feature (1)..(392): Homolog of NCBI NO: 18424412 NR Description: phytochelatin synthetase - like protein; protein At5g60920.1, supported by cDNA: 17250., supported by cDNA: [Arabidopsis thaliana] >gi|14193657|gb|AAK56072.1|AF319663_1
  misc_feature (1)..(391): Homolog of NCBI NO: 13477083 NR Description: phytochelatin synthetase-like protein
  misc_feature (1)..(376): Homolog of NCBI NO: 15232863 NR Description: unknown protein; protein id: At3g02210.1 thaliana] >gi|6041808|gb|AAF02128.1|AC009755_21 unknown protein
  misc_feature (1)..(391): Homolog of NCBI NO: 21618129 NR Description: phytochelatin synthetase-like protein
  misc_feature (1)..(391): Homolog of NCBI NO: 18406342 NR Description: phytochelatin synthetase-like protein; protein
  misc_feature (1)..(402): Homolog of NCBI NO: 30090026 NR Description: phytochelatin synthetase-like protein 2 [Sorghum
  misc_feature (1)..(401): Homolog of NCBI NO: 30090032 NR Description: phytochelatin synthetase [Triticum monococcum]
  misc_feature (1)..(375): Homolog of NCBI NO: 30090025 NR Description: phytochelatin synthetase-like protein 1 [Sorghum
MQWTPDGYVAVVTMFNYQQFRHIGAPGWQLGWTWAKKEVIWSMVGAQTTEQGDCSKFKSSPPHCCKKDPTIVDLLPGTPYNMQIANCCKAGVVNTFNQDPANAASSFQISVGLAGTTNKTVKVPRNFTLKTPGPGYTCGRAIVGRPTKFFTADGRRATQALMTWNVTCTYSQFLAQKTPSCCVSLSSFYNDTIVNCPTCSCGCQNPSGSNCVNEDSPNLQAAIDGPGKCTGQPLVQCTSHMCPIRIHWHVKLNYKDYWRVKITITNFNFRMNYTQWNLVAQHPNFDNITQLFSFNYKPLTPYGGGINDTAMFWGVKFYNDLLMQAGKLGNVQSELLLRKDSRTFTFEKGWAFPRRVYFNGDNCVMPSPENYPWLPNASPLTKPLALPFLVFWVALAALLAYA

SEQ ID NO: 12979 - DNA, 610 bp, Zea mays subsp. mays
  misc_feature (1)..(610): Ceres Seq. ID no. 12341320
  misc_feature: MA Experiment ID: 108535 Result: Down-regulated in Transcription
  misc_feature: MA Experiment 108535 PARAMETER Experiment Name: Zm_Meristem_P Parameter: Age (day) Value: 8
  misc_feature: MA Experiment 108535 PARAMETER Experiment Name: Zm_Meristem_P Parameter: Organism Value: Zea mays
  misc_feature: MA Experiment 108535 PARAMETER Experiment Name: Zm_Meristem_P Parameter: Plant Line Value: 35A19
  misc_feature: MA Experiment 108535 PARAMETER Experiment Name: Zm_Meristem_P Parameter: Tissue Value: Root Meristem vs. Above Root Meristem
  misc_feature: MA Experiment ID: 20000487 Result: Down-regulated in Transcription
  misc_feature: MA Experiment 20000487 PARAMETER Experiment Name: Zm_50mM_NH4NO3_L_to_H_P Parameter: Organism Value: Zea mays
  misc_feature: MA Experiment 20000487 PARAMETER Experiment Name: Zm_50mM_NH4NO3_L_to_H_P Parameter: Timepoint (hr) Value: 4
  misc_feature: MA Experiment 20000487 PARAMETER Experiment Name: Zm_50mM_NH4NO3_L_to_H_P Parameter: Tissue Value: Leaves
  misc_feature: MA Experiment 20000487 PARAMETER Experiment Name: Zm_50mM_NH4NO3_L_to_H_P Parameter: Treatment Value: 50mM NH4NO3 vs. 100mM Mannitol
  misc_feature: MA Experiment ID: 20001608 Result: Down-regulated in Transcription
  misc_feature: MA Experiment 20001608 PARAMETER Experiment Name: Zm_50ppm_KNO3_L-to-H_P Parameter: Age (day) Value: 21
  misc_feature: MA Experiment 20001608 PARAMETER Experiment Name: Zm_50ppm_KNO3_L-to-H_P Parameter: Organism Value: Zea mays
  misc_feature: MA Experiment 20001608 PARAMETER Experiment Name: Zm_50ppm_KNO3_L-to-H_P Parameter: Plant Line Value: 35A19
  misc_feature: MA Experiment 20001608 PARAMETER Experiment Name: Zm_50ppm_KNO3_L-to-H_P Parameter: Timepoint (hr) Value: 48
  misc_feature: MA Experiment 20001608 PARAMETER Experiment Name: Zm_50ppm_KNO3_L-to-H_P Parameter: Tissue Value: Shoots
  misc_feature: MA Experiment 20001608 PARAMETER Experiment Name: Zm_50ppm_KNO3_L-to-H_P Parameter: Treatment Value: 50ppm KNO3 vs. 50ppm KCl
aatcttgccgctccaaccaattcgtcttggttgccgacacggcacctcgtcggaatcaggtggcgcgacctcctcgccggccggcgcgacaccaccatgggcccggaagcagtgcggaaaagcctggagcccaccgcaaccgccgaggaaatcactggctccacccctgcgcggctccacttctacgaccccttcgtcctcagcggcgtccgtatcgaagccgccgagcacggccgcctcctctgctctttcgtcgtcacccctcgcctcgcgagtcccgtgggatacctccgcagcggtgtcacagcgacgctcgccgaccagctgggatcggctgtgttcttctgcagtgggatccccagcagcggggtctccatcgagatcagcgtctcctttgtcgactcggctgccgtcggggaggaaatagaggttgagggaaagttattgcgtgctggaaaatcagtcggtgtcgtctccgtagatttcaggaagaaaaagacagggaatgaataaggattgggtggattttttaagttgggttatagaggtctatactttgttcgttgtgcaggcatggtgacagaataaaagcatgaaggcattgcactgc

SEQ ID NO: 12980 - protein, 170 aa, Zea mays subsp. mays
  peptide (1)..(170): Ceres Seq. ID no. 12341321
  misc_feature (33)..(168): Homolog of NCBI NO: 21740488 NR Description: OSJNBa0006B20.3 [Oryza sativa (japonica
  misc_feature (33)..(168): Homolog of NCBI NO: 13605902 NR Description: At1g04290/F19P19_27 [Arabidopsis thaliana]
  misc_feature (33)..(168): Homolog of NCBI NO: 18379308 NR Description: expressed protein; protein id: At1g04290.1, by cDNA: 8374., supported by cDNA: gi_13605901, supported by gi_18491134 [Arabidopsis thaliana] >gi|25406767|pir||D86174
  misc_feature (61)..(168): Homolog of NCBI NO: 18402093 NR Description: expressed protein; protein id: At2g29590.1, by cDNA: 39038. [Arabidopsis thaliana] expressed protein [Arabidopsis thaliana]
  misc_feature (61)..(168): Homolog of NCBI NO: 25408036 NR Description: hypothetical protein At2g29590 [imported] - thaliana >gi|21593450|gb|AAM65417.1| unknown [Arabidopsis
  misc_feature (97)..(168): Homolog of NCBI NO: 20161439 NR Description: B1065E10.13 [Oryza sativa (japonica
  misc_feature (49)..(168): Homolog of NCBI NO: 8923812 NR Description: uncharacterized hypothalamus protein HT012 [Homo
  misc_feature (66)..(168): Homolog of NCBI NO: 13385260 NR Description: RIKEN cDNA 0610006O17 [Mus musculus]
  misc_feature (66)..(168): Homolog of NCBI NO: 27685797 NR Description: similar to RIKEN cDNA 0610006O17 [Mus musculus]
  misc_feature (62)..(170): Homolog of NCBI NO: 34904288 NR Description: unnamed protein product [Oryza sativa (japonica group)] >gi|7630244|dbj|BAA94777.1| unnamed protein product
NLAAPTNSSWLPTRHLVGIRWRDLLAGRRDTTMGPEAVRKSLEPTATAEEITGSTPARLHFYDPFVLSGVRIEAAEHGRLLCSFVVTPRLASPVGYLRSGVTATLADQLGSAVFFCSGIPSSGVSIEISVSFVDSAAVGEEIEVEGKLLRAGKSVGVVSVDFRKKKTGNE

SEQ ID NO: 12981 - protein, 143 aa, Zea mays subsp. mays
  peptide (1)..(143): Ceres Seq. ID no. 12341322
SCRSNQFVLVADTAPRRNQVARPPRRPARHHHGPGSSAEKPGAHRNRRGNHWLHPCAAPLLRPLRPQRRPYRSRRARPPPLLFRRHPSPRESRGIPPQRCHSDARRPAGIGCVLLQWDPQQRGLHRDQRLLCRLGCRRGGNRG

SEQ ID NO: 12982 - protein, 141 aa, Zea mays subsp. mays
  peptide (1)..(141): Ceres Seq. ID no. 12341323
ILPLQPIRLGCRHGTSSESGGATSSPAGATPPWARKQCGKAWSPPQPPRKSLAPPLRGSTSTTPSSSAASVSKPPSTAASSALSSSPLASRVPWDTSAAVSQRRSPTSWDRLCSSAVGSPAAGSPSRSASPLSTRLPSGRK

SEQ ID NO: 12983 - protein, 138 aa, Zea mays subsp. mays
  peptide (1)..(138): Ceres Seq. ID no. 12341324
  misc_feature (1)..(136): Homolog of NCBI NO: 21740488 NR Description: OSJNBa0006B20.3 [Oryza sativa (japonica
  misc_feature (1)..(136): Homolog of NCBI NO: 13605902 NR Description: At1g04290/F19P19_27 [Arabidopsis thaliana]
  misc_feature (1)..(136): Homolog of NCBI NO: 18379308 NR Description: expressed protein; protein id: At1g04290.1, by cDNA: 8374., supported by cDNA: gi_13605901, supported by gi_18491134 [Arabidopsis thaliana] >gi|25406767|pir||D86174
  misc_feature (29)..(136): Homolog of NCBI NO: 18402093 NR Description: expressed protein; protein id: At2g29590.1, by cDNA: 39038. [Arabidopsis thaliana] expressed protein [Arabidopsis thaliana]
  misc_feature (29)..(136): Homolog of NCBI NO: 25408036 NR Description: hypothetical protein At2g29590 [imported] - thaliana >gi|21593450|gb|AAM65417.1| unknown [Arabidopsis
  misc_feature (65)..(136): Homolog of NCBI NO: 20161439 NR Description: B1065E10.13 [Oryza sativa (japonica
  misc_feature (17)..(136): Homolog of NCBI NO: 8923812 NR Description: uncharacterized hypothalamus protein HT012 [Homo
  misc_feature (34)..(136): Homolog of NCBI NO: 13385260 NR Description: RIKEN cDNA 0610006O17 [Mus musculus]
  misc_feature (34)..(136): Homolog of NCBI NO: 27685797 NR Description: similar to RIKEN cDNA 0610006O17 [Mus musculus]
  misc_feature (30)..(138): Homolog of NCBI NO: 34904288 NR Description: unnamed protein product [Oryza sativa (japonica group)] >gi|7630244|dbj|BAA94777.1| unnamed protein product
MGPEAVRKSLEPTATAEEITGSTPARLHFYDPFVLSGVRIEAAEHGRLLCSFVVTPRLASPVGYLRSGVTATLADQLGSAVFFCSGIPSSGVSIEISVSFVDSAAVGEEIEVEGKLLRAGKSVGVVSVDFRKKKTGNE

SEQ ID NO: 12984 - DNA, 1918 bp, Zea mays subsp. mays
  misc_feature (1)..(1918): Ceres Seq. ID no. 12345175
  misc_feature: MA Experiment ID: 108523 Result: Down-regulated in Transcription
  misc_feature: MA Experiment 108523 PARAMETER Experiment Name: Zm_42deg_Heat_P Parameter: Age (day) Value: 8
  misc_feature: MA Experiment 108523 PARAMETER Experiment Name: Zm_42deg_Heat_P Parameter: Organism Value: Zea mays
  misc_feature: MA Experiment 108523 PARAMETER Experiment Name: Zm_42deg_Heat_P Parameter: Plant Line Value: 35A19
  misc_feature: MA Experiment 108523 PARAMETER Experiment Name: Zm_42deg_Heat_P Parameter: Temperature (deg C) Value: 42 vs. 22
  misc_feature: MA Experiment 108523 PARAMETER Experiment Name: Zm_42deg_Heat_P Parameter: Timepoint (hr) Value: 6
  misc_feature: MA Experiment 108523 PARAMETER Experiment Name: Zm_42deg_Heat_P Parameter: Tissue Value: Aerial
  misc_feature: MA Experiment ID: 108527 Result: Down-regulated in Transcription
  misc_feature: MA Experiment 108527 PARAMETER Experiment Name: Zm_5mM_NO_P Parameter: Age (day) Value: 8
  misc_feature: MA Experiment 108527 PARAMETER Experiment Name: Zm_5mM_NO_P Parameter: Organism Value: Zea mays
  misc_feature: MA Experiment 108527 PARAMETER Experiment Name: Zm_5mM_NO_P Parameter: Plant Line Value: 35A19
  misc_feature: MA Experiment 108527 PARAMETER Experiment Name: Zm_5mM_NO_P Parameter: Timepoint (hr) Value: 6
  misc_feature: MA Experiment 108527 PARAMETER Experiment Name: Zm_5mM_NO_P Parameter: Tissue Value: Aerial
  misc_feature: MA Experiment 108527 PARAMETER Experiment Name: Zm_5mM_NO_P Parameter: Treatment Value: 5mM NO vs. No Treatment
  misc_feature: MA Experiment ID: 108543 Result: Up-regulated in Transcription
  misc_feature: MA Experiment ID: 108547 Result: Down-regulated in Transcription
  misc_feature: MA Experiment 108547 PARAMETER Experiment Name: Zm_Imbibed_Seeds_P Parameter: Age (day) Value: 4 vs. 2
  misc_feature: MA Experiment 108547 PARAMETER Experiment Name: Zm_Imbibed_Seeds_P Parameter: Organism Value: Zea mays
  misc_feature: MA Experiment 108547 PARAMETER Experiment Name: Zm_Imbibed_Seeds_P Parameter: Plant Line Value: 35A19
  misc_feature: MA Experiment 108547 PARAMETER Experiment Name: Zm_Imbibed_Seeds_P Parameter: Tissue Value: Aerial vs. Embryo
  misc_feature: MA Experiment ID: 108556 Result: Down-regulated in Transcription
  misc_feature: MA Experiment 108556 PARAMETER Experiment Name: Zm_Drought_P Parameter: Age (day) Value: 9
  misc_feature: MA Experiment 108556 PARAMETER Experiment Name: Zm_Drought_P Parameter: Organism Value: Zea mays
  misc_feature: MA Experiment 108556 PARAMETER Experiment Name: Zm_Drought_P Parameter: Plant Line Value: 35A19
  misc_feature: MA Experiment 108556 PARAMETER Experiment Name: Zm_Drought_P Parameter: Timepoint (hr) Value: 24
  misc_feature: MA Experiment 108556 PARAMETER Experiment Name: Zm_Drought_P Parameter: Tissue Value: Aerial
  misc_feature: MA Experiment 108556 PARAMETER Experiment Name: Zm_Drought_P Parameter: Treatment Value: Drought vs. No Drought
  misc_feature: MA Experiment ID: 108597 Result: Down-regulated in Transcription
  misc_feature: MA Experiment 108597 PARAMETER Experiment Name: Zm_100uM_ABA_P Parameter: Age (day) Value: 9
  misc_feature: MA Experiment 108597 PARAMETER Experiment Name: Zm_100uM_ABA_P Parameter: Organism Value: Zea mays
  misc_feature: MA Experiment 108597 PARAMETER Experiment Name: Zm_100uM_ABA_P Parameter: Plant Line Value: 35A19
  misc_feature: MA Experiment 108597 PARAMETER Experiment Name: Zm_100uM_ABA_P Parameter: Timepoint (hr) Value: 24
  misc_feature: MA Experiment 108597 PARAMETER Experiment Name: Zm_100uM_ABA_P Parameter: Tissue Value: Aerial
  misc_feature: MA Experiment 108597 PARAMETER Experiment Name: Zm_100uM_ABA_P Parameter: Treatment Value: 100uM ABA vs. No Treatment
  misc_feature: MA Experiment ID: 20000477 Result: Down-regulated in Transcription
  misc_feature: MA Experiment 20000477 PARAMETER Experiment Name: Zm_5mM_SA_P Parameter: Age (day) Value: 10
  misc_feature: MA Experiment 20000477 PARAMETER Experiment Name: Zm_5mM_SA_P Parameter: Organism Value: Zea mays
  misc_feature: MA Experiment 20000477 PARAMETER Experiment Name: Zm_5mM_SA_P Parameter: Plant Line Value: 35A19
  misc_feature: MA Experiment 20000477 PARAMETER Experiment Name: Zm_5mM_SA_P Parameter: Timepoint (hr) Value: 48
  misc_feature: MA Experiment 20000477 PARAMETER Experiment Name: Zm_5mM_SA_P Parameter: Tissue Value: Aerial
  misc_feature: MA Experiment 20000477 PARAMETER Experiment Name: Zm_5mM_SA_P Parameter: Treatment Value: 5mM SA vs. No Treatment
  misc_feature: MA Experiment ID: 20000478 Result: Down-regulated in Transcription
  misc_feature: MA Experiment 20000478 PARAMETER Experiment Name: Zm_5mM_SA_P Parameter: Age (day) Value: 11
  misc_feature: MA Experiment 20000478 PARAMETER Experiment Name: Zm_5mM_SA_P Parameter: Organism Value: Zea mays
  misc_feature: MA Experiment 20000478 PARAMETER Experiment Name: Zm_5mM_SA_P Parameter: Plant Line Value: 35A19
  misc_feature: MA Experiment 20000478 PARAMETER Experiment Name: Zm_5mM_SA_P Parameter: Timepoint (hr) Value: 72
  misc_feature: MA Experiment 20000478 PARAMETER Experiment Name: Zm_5mM_SA_P Parameter: Tissue Value: Aerial
  misc_feature: MA Experiment 20000478 PARAMETER Experiment Name: Zm_5mM_SA_P Parameter: Treatment Value: 5mM SA vs. No Treatment
  misc_feature: MA Experiment ID: 20000479 Result: Down-regulated in Transcription
  misc_feature: MA Experiment 20000479 PARAMETER Experiment Name: Zm_Drought_P Parameter: Age (day) Value: 10
  misc_feature: MA Experiment 20000479 PARAMETER Experiment Name: Zm_Drought_P Parameter: Organism Value: Zea mays
  misc_feature: MA Experiment 20000479 PARAMETER Experiment Name: Zm_Drought_P Parameter: Plant Line Value: 35A19
  misc_feature: MA Experiment 20000479 PARAMETER Experiment Name: Zm_Drought_P Parameter: Timepoint (hr) Value: 48
  misc_feature: MA Experiment 20000479 PARAMETER Experiment Name: Zm_Drought_P Parameter: Tissue Value: Aerial
  misc_feature: MA Experiment 20000479 PARAMETER Experiment Name: Zm_Drought_P Parameter: Treatment Value: Drought vs. No Drought
  misc_feature: MA Experiment ID: 20000480 Result: Down-regulated in Transcription
  misc_feature: MA Experiment 20000480 PARAMETER Experiment Name: Zm_Drought_P Parameter: Age (day) Value: 11
  misc_feature: MA Experiment 20000480 PARAMETER Experiment Name: Zm_Drought_P Parameter: Organism Value: Zea mays
  misc_feature: MA Experiment 20000480 PARAMETER Experiment Name: Zm_Drought_P Parameter: Plant Line Value: 35A19
  misc_feature: MA Experiment 20000480 PARAMETER Experiment Name: Zm_Drought_P Parameter: Timepoint (hr) Value: 72
  misc_feature: MA Experiment 20000480 PARAMETER Experiment Name: Zm_Drought_P Parameter: Tissue Value: Aerial
  misc_feature: MA Experiment 20000480 PARAMETER Experiment Name: Zm_Drought_P Parameter: Treatment Value: Drought vs. No Drought
  misc_feature: MA Experiment ID: 20000533 Result: Down-regulated in Transcription
  misc_feature: MA Experiment 20000533 PARAMETER Experiment Name: Zm_0.001percent_MeJA_P Parameter: Age (day) Value: 11
  misc_feature: MA Experiment 20000533 PARAMETER Experiment Name: Zm_0.001percent_MeJA_P Parameter: Organism Value: Zea mays
  misc_feature: MA Experiment 20000533 PARAMETER Experiment Name: Zm_0.001percent_MeJA_P Parameter: Plant Line Value: 35A19
  misc_feature: MA Experiment 20000533 PARAMETER Experiment Name: Zm_0.001percent_MeJA_P Parameter: Timepoint (hr) Value: 72
  misc_feature: MA Experiment 20000533 PARAMETER Experiment Name: Zm_0.001percent_MeJA_P Parameter: Tissue Value: Aerial
  misc_feature: MA Experiment 20000533 PARAMETER Experiment Name: Zm_0.001percent_MeJA_P Parameter: Treatment Value: 0.001percent MeJA vs. No Treatment
  misc_feature: MA Experiment ID: 20000535 Result: Down-regulated in Transcription
  misc_feature: MA Experiment 20000535 PARAMETER Experiment Name: Zm_Hybrid_Seed_Dev_P Parameter: DAP Value: 30 vs. 12
  misc_feature: MA Experiment 20000535 PARAMETER Experiment Name: Zm_Hybrid_Seed_Dev_P Parameter: Organism Value: Zea mays
  misc_feature: MA Experiment 20000535 PARAMETER Experiment Name: Zm_Hybrid_Seed_Dev_P Parameter: Plant Line Value: 35A19
  misc_feature: MA Experiment 20000535 PARAMETER Experiment Name: Zm_Hybrid_Seed_Dev_P Parameter: Tissue Value: Embryo vs. Unfert Floret
gttctatctccttctccactgggccaactccgctctactctccaatcccaggcgaatccctcgtcttcttcgaccgcgtgtcggagcttcatcttctctggcccccctgccctgatttgccgctccgctctcccccccttccgccggaaaggggggaaattgatggcgaggctagtggctctggcatcggcggtggcggttctggtactcggcctcgcctgtgcagaggcggagccacagtgcacgcggcgccgcccgcccgcgccgccgcggccgcacagcgtgacgatcaccgagttcggggccgttggtgacggcgtcaccctcaacaccgtgtccttccagaacgccgtcttctacctgcgctccttcgccgacaagggcggcgcgcagctgtacattcccaggggccggtggctcaccggcagtttcaatctcaccagccaccttaccctcttcctggagagtggcgctgtcatcgttggcacgcaggacgtttcacagtggcctgttgttgaacctttgccatcatatggacgaggaatggaccttccaggttcgaggcatcgaagcttaataaacgggcagaatctaattgatgttgtaattacgggaaacaatggaacaatcgatggccagggttctacatggtggaactggtttcgttcgaataagttgaactatagccgccctcatcttgtggagtttgtggactctgagcaaatcgtcatttcgaacataacatttttaaattcccctgcttggagtatacatccagtgtattgcagcaatgtagtggtccatagtgtcacaattcagacttcattggatgctccacttaatcatggaatcgttccagattcttgctcaaatatgtgcatcgaggacagcagtatcagtgttagccacgacgccatatcactaaaaagcgggtgggacaagcaaggcattgctttcgggaggccaacctcagacatccacataagcagactggatctgcagtcctcactgggcgccgctctcacgttcgggagcgagatgtcgggcgggatctcagacgtccatgcggaccgcctcctcatccactcttcgttcagaggcgtcttcttcaagaccgcgccgggacgcggaggctatatcagagacaccgtgatctcagacgtccagatggaagacgtcgacgtcgccatcgcattcactggtgactggccaagccacccagatgaccagttcgacccgaccgcgctcccggtggtcagccacatcaccctgaagaacatgactggaacaagaatctcggtcgctggcgttttgtcaggaatcgccggcgacccgttcaccgacatctgcctctccaacatcaacttctcactggccgattcggccagtcccacctcccactggtcttgctccaacgtctccggatactccgagctggtcttccctgagccttgcctggatctgcagacccaatcctcagatgcctccatctgctccaccctccctagcttccacgccgccgccattgcagcagcgtaaatgcacagagtacaaagtgtccatcctttttcctgttcccggtcccctgcacacttcagaggatctctcaagccgccttttcctcccccgacaattctttgaagctataggcgcgctcccgtcgttgaagaaaagaatcgttcaccgtttttctccggccgtcggcttcgagggctcagctgcatcgcctttcttgcgggaggcaagcctggcggcggacggtcgacatcgagctgttaatttgcttgtacagttatgatttcttcattcaatctgtaagaaggaatttttgtggtagtagagggttgagtcgagtccagagagttgcttcatacgattgtcgatttggtgaataaaacacatgatggattcatgatcc

SEQ ID NO: 12985 - protein, 512 aa, Zea mays subsp. mays
  peptide (1)..(512): Ceres Seq. ID no. 12345176
  misc_feature (127)..(485): Pfam Name: Glycosyl hydrolases family 28 Pfam Description: Glycosyl hydrolases family 28
  misc_feature (59)..(493): Homolog of NCBI NO: 7939578 NR Description: polygalacturonase-like protein [Arabidopsis
  misc_feature (59)..(493): Homolog of NCBI NO: 15228881 NR Description: polygalacturonase, putative; protein id: supported by cDNA: 17203., supported by cDNA: gi_14334801, by cDNA: gi_21280834 [Arabidopsis thaliana]
  misc_feature (59)..(493): Homolog of NCBI NO: 21553827 NR Description: polygalacturonase, putative [Arabidopsis thaliana]
  misc_feature (91)..(512): Homolog of NCBI NO: 40714685 NR Description: putative polygalacturonase [Oryza sativa
  misc_feature (58)..(493): Homolog of NCBI NO: 22327662 NR Description: Expressed protein; protein id: At5g49215.1, by cDNA: gi_20258820 [Arabidopsis thaliana] unknown protein [Arabidopsis thaliana]
  misc_feature (91)..(495): Homolog of NCBI NO: 30679999 NR Description: polygalacturonase, putative [Arabidopsis >gi|20260262|gb|AAM13029.1| unknown protein [Arabidopsis >gi|22136514|gb|AAM91335.1| unknown protein [Arabidopsis
  misc_feature (71)..(492): Homolog of NCBI NO: 18412253 NR Description: polygalacturonase, putative; protein id: supported by cDNA: gi_13358184 [Arabidopsis thaliana] AT3g62110 [Arabidopsis thaliana] >gi|23397166|gb|AAN31866.1|
  misc_feature (71)..(492): Homolog of NCBI NO: 11263971 NR Description: hypothetical protein T17J13.70 - Arabidopsis >gi|6899921|emb|CAB71871.1| putative protein [Arabidopsis
  misc_feature (123)..(495): Homolog of NCBI NO: 18397713 NR Description: polygalacturonase, putative; protein id: supported by cDNA: 38575. [Arabidopsis thaliana]
  misc_feature (123)..(495): Homolog of NCBI NO: 21593399 NR Description: polygalacturonase-like protein [Arabidopsis
VLSPSPLGQLRSTLQSQANPSSSSTACRSFIFSGPPALICRSALPPFRRKGGKLMARLVALASAVAVLVLGLACAEAEPQCTRRRPPAPPRPHSVTITEFGAVGDGVTLNTVSFQNAVFYLRSFADKGGAQLYIPRGRWLTGSFNLTSHLTLFLESGAVIVGTQDVSQWPVVEPLPSYGRGMDLPGSRHRSLINGQNLIDVVITGNNGTIDGQGSTWWNWFRSNKLNYSRPHLVEFVDSEQIVISNITFLNSPAWSIHPVYCSNVVVHSVTIQTSLDAPLNHGIVPDSCSNMCIEDSSISVSHDAISLKSGWDKQGIAFGRPTSDIHISRLDLQSSLGAALTFGSEMSGGISDVHADRLLIHSSFRGVFFKTAPGRGGYIRDTVISDVQMEDVDVAIAFTGDWPSHPDDQFDPTALPVVSHITLKNMTGTRISVAGVLSGIAGDPFTDICLSNINFSLADSASPTSHWSCSNVSGYSELVFPEPCLDLQTQSSDASICSTLPSFHAAAIAAA

SEQ ID NO: 12986 - protein, 458 aa, Zea mays subsp. mays
  peptide (1)..(458): Ceres Seq. ID no. 12345177
  misc_feature (73)..(431): Pfam Name: Glycosyl hydrolases family 28 Pfam Description: Glycosyl hydrolases family 28
  misc_feature (5)..(439): Homolog of NCBI NO: 7939578 NR Description: polygalacturonase-like protein [Arabidopsis
  misc_feature (5)..(439): Homolog of NCBI NO: 15228881 NR Description: polygalacturonase, putative; protein id: supported by cDNA: 17203., supported by cDNA: gi_14334801, by cDNA: gi_21280834 [Arabidopsis thaliana]
  misc_feature (5)..(439): Homolog of NCBI NO: 21553827 NR Description: polygalacturonase, putative [Arabidopsis thaliana]
  misc_feature (37)..(458): Homolog of NCBI NO: 40714685 NR Description: putative polygalacturonase [Oryza sativa
  misc_feature (4)..(439): Homolog of NCBI NO: 22327662 NR Description: Expressed protein; protein id: At5g49215.1, by cDNA: gi_20258820 [Arabidopsis thaliana] unknown protein [Arabidopsis thaliana]
  misc_feature (37)..(441): Homolog of NCBI NO: 30679999 NR Description: polygalacturonase, putative [Arabidopsis >gi|20260262|gb|AAM13029.1| unknown protein [Arabidopsis >gi|22136514|gb|AAM91335.1| unknown protein [Arabidopsis
  misc_feature (17)..(438): Homolog of NCBI NO: 18412253 NR Description: polygalacturonase, putative; protein id: supported by cDNA: gi_13358184 [Arabidopsis thaliana] AT3g62110 [Arabidopsis thaliana] >gi|23397166|gb|AAN31866.1|
  misc_feature (17)..(438): Homolog of NCBI NO: 11263971 NR Description: hypothetical protein T17J13.70 - Arabidopsis >gi|6899921|emb|CAB71871.1| putative protein [Arabidopsis
  misc_feature (69)..(441): Homolog of NCBI NO: 18397713 NR Description: polygalacturonase, putative; protein id: supported by cDNA: 38575. [Arabidopsis thaliana]
  misc_feature (69)..(441): Homolog of NCBI NO: 21593399 NR Description: polygalacturonase-like protein [Arabidopsis
MARLVALASAVAVLVLGLACAEAEPQCTRRRPPAPPRPHSVTITEFGAVGDGVTLNTVSFQNAVFYLRSFADKGGAQLYIPRGRWLTGSFNLTSHLTLFLESGAVIVGTQDVSQWPVVEPLPSYGRGMDLPGSRHRSLINGQNLIDVVITGNNGTIDGQGSTWWNWFRSNKLNYSRPHLVEFVDSEQIVISNITFLNSPAWSIHPVYCSNVVVHSVTIQTSLDAPLNHGIVPDSCSNMCIEDSSISVSHDAISLKSGWDKQGIAFGRPTSDIHISRLDLQSSLGAALTFGSEMSGGISDVHADRLLIHSSFRGVFFKTAPGRGGYIRDTVISDVQMEDVDVAIAFTGDWPSHPDDQFDPTALPVVSHITLKNMTGTRISVAGVLSGIAGDPFTDICLSNINFSLADSASPTSHWSCSNVSGYSELVFPEPCLDLQTQSSDASICSTLPSFHAAAIAAA

SEQ ID NO: 12987 - protein, 331 aa, Zea mays subsp. mays
  peptide (1)..(331): Ceres Seq. ID no. 12345178
  misc_feature (1)..(304): Pfam Name: Glycosyl hydrolases family 28 Pfam Description: Glycosyl hydrolases family 28
  misc_feature (1)..(312): Homolog of NCBI NO: 7939578 NR Description: polygalacturonase-like protein [Arabidopsis
  misc_feature (1)..(312): Homolog of NCBI NO: 21553827 NR Description: polygalacturonase, putative [Arabidopsis thaliana]
  misc_feature (1)..(312): Homolog of NCBI NO: 15228881 NR Description: polygalacturonase, putative; protein id: supported by cDNA: 17203., supported by cDNA: gi_14334801, by cDNA: gi_21280834 [Arabidopsis thaliana]
  misc_feature (1)..(331): Homolog of NCBI NO: 40714685 NR Description: putative polygalacturonase [Oryza sativa
  misc_feature (1)..(312): Homolog of NCBI NO: 22327662 NR Description: Expressed protein; protein id: At5g49215.1, by cDNA: gi_20258820 [Arabidopsis thaliana] unknown protein [Arabidopsis thaliana]
  misc_feature (1)..(314): Homolog of NCBI NO: 30679999 NR Description: polygalacturonase, putative [Arabidopsis >gi|20260262|gb|AAM13029.1| unknown protein [Arabidopsis >gi|22136514|gb|AAM91335.1| unknown protein [Arabidopsis
  misc_feature (1)..(311): Homolog of NCBI NO: 18412253 NR Description: polygalacturonase, putative; protein id: supported by cDNA: gi_13358184 [Arabidopsis thaliana] AT3g62110 [Arabidopsis thaliana] >gi|23397166|gb|AAN31866.1|
  misc_feature (1)..(311): Homolog of NCBI NO: 11263971 NR Description: hypothetical protein T17J13.70 - Arabidopsis >gi|6899921|emb|CAB71871.1| putative protein [Arabidopsis
  misc_feature (1)..(314): Homolog of NCBI NO: 18397713 NR Description: polygalacturonase, putative; protein id: supported by cDNA: 38575. [Arabidopsis thaliana]
  misc_feature (1)..(314): Homolog of NCBI NO: 21593399 NR Description: polygalacturonase-like protein [Arabidopsis
MDLPGSRHRSLINGQNLIDVVITGNNGTIDGQGSTWWNWFRSNKLNYSRPHLVEFVDSEQIVISNITFLNSPAWSIHPVYCSNVVVHSVTIQTSLDAPLNHGIVPDSCSNMCIEDSSISVSHDAISLKSGWDKQGIAFGRPTSDIHISRLDLQSSLGAALTFGSEMSGGISDVHADRLLIHSSFRGVFFKTAPGRGGYIRDTVISDVQMEDVDVAIAFTGDWPSHPDDQFDPTALPVVSHITLKNMTGTRISVAGVLSGIAGDPFTDICLSNINFSLADSASPTSHWSCSNVSGYSELVFPEPCLDLQTQSSDASICSTLPSFHAAAIAAA

SEQ ID NO: 12988 - DNA, 1534 bp, Zea mays subsp. mays
  misc_feature (1)..(1534): Ceres Seq. ID no. 12411463
  misc_feature: MA Experiment ID: 108528 Result: Up-regulated in Transcription
  misc_feature: MA Experiment 108528 PARAMETER Experiment Name: Zm_Imbibed_Seeds_P Parameter: Age (day) Value: 5 vs. 2
  misc_feature: MA Experiment 108528 PARAMETER Experiment Name: Zm_Imbibed_Seeds_P Parameter: Organism Value: Zea mays
  misc_feature: MA Experiment 108528 PARAMETER Experiment Name: Zm_Imbibed_Seeds_P Parameter: Plant Line Value: 35A19
  misc_feature: MA Experiment 108528 PARAMETER Experiment Name: Zm_Imbibed_Seeds_P Parameter: Tissue Value: Aerial vs. Embryo
  misc_feature: MA Experiment ID: 108530 Result: Up-regulated in Transcription
  misc_feature: MA Experiment 108530 PARAMETER Experiment Name: Zm_Imbibed_Seeds_P Parameter: Age (day) Value: 6 vs. 2
  misc_feature: MA Experiment 108530 PARAMETER Experiment Name: Zm_Imbibed_Seeds_P Parameter: Organism Value: Zea mays
  misc_feature: MA Experiment 108530 PARAMETER Experiment Name: Zm_Imbibed_Seeds_P Parameter: Plant Line Value: 35A19
  misc_feature: MA Experiment 108530 PARAMETER Experiment Name: Zm_Imbibed_Seeds_P Parameter: Tissue Value: Aerial vs. Embryo
  misc_feature: MA Experiment ID: 108535 Result: Down-regulated in Transcription
  misc_feature: MA Experiment 108535 PARAMETER Experiment Name: Zm_Meristem_P Parameter: Age (day) Value: 8
  misc_feature: MA Experiment 108535 PARAMETER Experiment Name: Zm_Meristem_P Parameter: Organism Value: Zea mays
  misc_feature: MA Experiment 108535 PARAMETER Experiment Name: Zm_Meristem_P Parameter: Plant Line Value: 35A19
  misc_feature: MA Experiment 108535 PARAMETER Experiment Name: Zm_Meristem_P Parameter: Tissue Value: Root Meristem vs. Above Root Meristem
  misc_feature: MA Experiment ID: 20000477 Result: Down-regulated in Transcription
  misc_feature: MA Experiment 20000477 PARAMETER Experiment Name: Zm_5mM_SA_P Parameter: Age (day) Value: 10
  misc_feature: MA Experiment 20000477 PARAMETER Experiment Name: Zm_5mM_SA_P Parameter: Organism Value: Zea mays
  misc_feature: MA Experiment 20000477 PARAMETER Experiment Name: Zm_5mM_SA_P Parameter: Plant Line Value: 35A19
  misc_feature: MA Experiment 20000477 PARAMETER Experiment Name: Zm_5mM_SA_P Parameter: Timepoint (hr) Value: 48
  misc_feature: MA Experiment 20000477 PARAMETER Experiment Name: Zm_5mM_SA_P Parameter: Tissue Value: Aerial
  misc_feature: MA Experiment 20000477 PARAMETER Experiment Name: Zm_5mM_SA_P Parameter: Treatment Value: 5mM SA vs. No Treatment
agacagaatgttcccttccaagaaggccactagtagcgcagccgcagccgttgccgccgtgagctcaaatgatagcaggcagcaggcgatgtgcgtgcaggccgactcggggtcgggcctcgtcctcaccaccaccccaagccccgcctccgctggaccgtcgagctccacgagcgcttcgtcgacgccgtcacgcagctcggtggccccgacaaggcgactcccaagaccatcatgagggtcatgggagtcaaggggcttaccctctaccacctcaagagccatcttcagaaattcaggttagggaagcagccgcacaaggagttcaacgagcactcggttaaggacgcggccgcagcaatggagatgcaacggaacgccgcctcttcttcaggcatgatgggaagaagcatgaacgaccgcagcgtgcacatgaacgaggctatcaggatgcaaatggaagtccagagaaggctacatgaacagctagaggtgcaaaggcatctccagatgaggatcgaagcccagggcaagtacatgcagtccatcctggagaaagcctaccagaccatcgccaccggcgacctggctgcgtgcagcccggtggctgcagggtacaaatccctgctaggtaacccgcaggcgatgctggacgtctgctcgctcaaggacatggccccgtccatgggcttcccttcgctgcaagacctgcacatgtacggcggcggcggcggccactgcctggacctgcagcagcagatggagcggccgatggaggccttcttcgccagctgcgacatcgggtcgctggccaagaagaggcccgtcagcccttacgccgacgacgacggcggcaagagcccgatgctgtggggcgaggacgacgagggcaagggcatcgtcgaccatttccagatggcgccgccgatgatggacgccgccggcatcgacgtcatggactccatcgccgacgtgtacggcgacgccaagcacatgaccatgtccagcgactccacggggagcaagggcggcggcttcgacgtcaggctcgagcggccatcgctgcggcggccgcacatgggcggcagcccgtcggtgctcggcggaggccagacgaggaacctgtcctacgggtaactagctcgtcgctctgatgatgattaaccatccgatccggcgtgcttaattaattaactcgcagtgaaactaaaattaattaaagcaggcgattattattaaccggtgcaaaacggctacaaataaataagtaaagctagcgctgtagcaggcatgcataatataatggcggagatacatatatatatttatagcataagtgtcattaattcatgatcacgagattgatgatcttaccgtggcgcatcacttgctggatgatgctccaagataatctattttgagcgagaggagatgtatgttccatgtaattgtagtgctgttgatgggtgtaaatgcatgtgcaacttattaattggtaattttgcatgctgaggaaacaatctttctttggtct

SEQ ID NO: 12989 - protein, 300 aa, Zea mays subsp. mays
  peptide (1)..(300): Ceres Seq. ID no. 12411464
  misc_feature (1)..(300): Homolog of NCBI NO: 25406584 NR Description: hypothetical protein T8K14.15 [imported] - thaliana >gi|4835766|gb|AAD30233.1|AC007202_15 Contains
  misc_feature (1)..(300): Homolog of NCBI NO: 30699418 NR Description: transfactor -related [Arabidopsis thaliana]
  misc_feature (1)..(300): Homolog of NCBI NO: 18412370 NR Description: transfactor, putative; protein id: At1g79430.1, by cDNA: gi_15010721 [Arabidopsis thaliana] At1g79430/T8K14_15 [Arabidopsis thaliana]
  misc_feature (1)..(109): Homolog of NCBI NO: 18404044 NR Description: transfactor, putative; protein id: At3g24120.1, by cDNA: 6626., supported by cDNA: gi_15215653, supported by gi_20334891 [Arabidopsis thaliana] >gi|15215654|gb|AAK91372.1|
  misc_feature (1)..(159): Homolog of NCBI NO: 18414049 NR Description: putative protein; protein id: At4g13640.1, by cDNA: 38327. [Arabidopsis thaliana]
  misc_feature (1)..(139): Homolog of NCBI NO: 34394528 NR Description: transfactor-like protein [Oryza sativa (japonica
  misc_feature (1)..(112): Homolog of NCBI NO: 22331031 NR Description: regulatory protein of P-starvation acclimation Psr1, putative; protein id: At3g12730.1, supported by cDNA: [Arabidopsis thaliana] >gi|17979533|gb|AAL50101.1|
  misc_feature (1)..(112): Homolog of NCBI NO: 11994415 NR Description: contains similarity to
  misc_feature (1)..(109): Homolog of NCBI NO: 11994231 NR Description: contains similarity to transfactor~gene_id:MUJ8.2
  misc_feature (1)..(124): Homolog of NCBI NO: 32470629 NR Description: putative phosphate starvation response regulator
MRVMGVKGLTLYHLKSHLQKFRLGKQPHKEFNEHSVKDAAAAMEMQRNAASSSGMMGRSMNDRSVHMNEAIRMQMEVQRRLHEQLEVQRHLQMRIEAQGKYMQSILEKAYQTIATGDLAACSPVAAGYKSLLGNPQAMLDVCSLKDMAPSMGFPSLQDLHMYGGGGGHCLDLQQQMERPMEAFFASCDIGSLAKKRPVSPYADDDGGKSPMLWGEDDEGKGIVDHFQMAPPMMDAAGIDVMDSIADVYGDAKHMTMSSDSTGSKGGGFDVRLERPSLRRPHMGGSPSVLGGGQTRNLSYG

SEQ ID NO: 12990 - protein, 297 aa, Zea mays subsp. mays
  peptide (1)..(297): Ceres Seq. ID no. 12411465
  misc_feature (1)..(297): Homolog of NCBI NO: 25406584 NR Description: hypothetical protein T8K14.15 [imported] - thaliana >gi|4835766|gb|AAD30233.1|AC007202_15 Contains
  misc_feature (1)..(297): Homolog of NCBI NO: 30699418 NR Description: transfactor -related [Arabidopsis thaliana]
  misc_feature (1)..(297): Homolog of NCBI NO: 18412370 NR Description: transfactor, putative; protein id: At1g79430.1, by cDNA: gi_15010721 [Arabidopsis thaliana] At1g79430/T8K14_15 [Arabidopsis thaliana]
  misc_feature (1)..(106): Homolog of NCBI NO: 18404044 NR Description: transfactor, putative; protein id: At3g24120.1, by cDNA: 6626., supported by cDNA: gi_15215653, supported by gi_20334891 [Arabidopsis thaliana] >gi|15215654|gb|AAK91372.1|
  misc_feature (1)..(156): Homolog of NCBI NO: 18414049 NR Description: putative protein; protein id: At4g13640.1, by cDNA: 38327. [Arabidopsis thaliana]
  misc_feature (1)..(136): Homolog of NCBI NO: 34394528 NR Description: transfactor-like protein [Oryza sativa (japonica
  misc_feature (1)..(109): Homolog of NCBI NO: 22331031 NR Description: regulatory protein of P-starvation acclimation Psr1, putative; protein id: At3g12730.1, supported by cDNA: [Arabidopsis thaliana] >gi|17979533|gb|AAL50101.1|
  misc_feature (1)..(109): Homolog of NCBI NO: 11994415 NR Description: contains similarity to
  misc_feature (1)..(106): Homolog of NCBI NO: 11994231 NR Description: contains similarity to transfactor~gene_id:MUJ8.2
  misc_feature (1)..(121): Homolog of NCBI NO: 32470629 NR Description: putative phosphate starvation response regulator
MGVKGLTLYHLKSHLQKFRLGKQPHKEFNEHSVKDAAAAMEMQRNAASSSGMMGRSMNDRSVHMNEAIRMQMEVQRRLHEQLEVQRHLQMRIEAQGKYMQSILEKAYQTIATGDLAACSPVAAGYKSLLGNPQAMLDVCSLKDMAPSMGFPSLQDLHMYGGGGGHCLDLQQQMERPMEAFFASCDIGSLAKKRPVSPYADDDGGKSPMLWGEDDEGKGIVDHFQMAPPMMDAAGIDVMDSIADVYGDAKHMTMSSDSTGSKGGGFDVRLERPSLRRPHMGGSPSVLGGGQTRNLSYG

SEQ ID NO: 12991 - protein, 258 aa, Zea mays subsp. mays
  peptide (1)..(258): Ceres Seq. ID no. 12411466
  misc_feature (1)..(258): Homolog of NCBI NO: 25406584 NR Description: hypothetical protein T8K14.15 [imported] - thaliana >gi|4835766|gb|AAD30233.1|AC007202_15 Contains
  misc_feature (1)..(258): Homolog of NCBI NO: 30699418 NR Description: transfactor -related [Arabidopsis thaliana]
  misc_feature (1)..(258): Homolog of NCBI NO: 18412370 NR Description: transfactor, putative; protein id: At1g79430.1, by cDNA: gi_15010721 [Arabidopsis thaliana] At1g79430/T8K14_15 [Arabidopsis thaliana]
  misc_feature (1)..(67): Homolog of NCBI NO: 18404044 NR Description: transfactor, putative; protein id: At3g24120.1, by cDNA: 6626., supported by cDNA: gi_15215653, supported by gi_20334891 [Arabidopsis thaliana] >gi|15215654|gb|AAK91372.1|
  misc_feature (1)..(117): Homolog of NCBI NO: 18414049 NR Description: putative protein; protein id: At4g13640.1, by cDNA: 38327. [Arabidopsis thaliana]
  misc_feature (1)..(97): Homolog of NCBI NO: 34394528 NR Description: transfactor-like protein [Oryza sativa (japonica
  misc_feature (1)..(70): Homolog of NCBI NO: 22331031 NR Description: regulatory protein of P-starvation acclimation Psr1, putative; protein id: At3g12730.1, supported by cDNA: [Arabidopsis thaliana] >gi|17979533|gb|AAL50101.1|
  misc_feature (1)..(70): Homolog of NCBI NO: 11994415 NR Description: contains similarity to
  misc_feature (1)..(67): Homolog of NCBI NO: 11994231 NR Description: contains similarity to transfactor~gene_id:MUJ8.2
  misc_feature (1)..(82): Homolog of NCBI NO: 32470629 NR Description: putative phosphate starvation response regulator
MEMQRNAASSSGMMGRSMNDRSVHMNEAIRMQMEVQRRLHEQLEVQRHLQMRIEAQGKYMQSILEKAYQTIATGDLAACSPVAAGYKSLLGNPQAMLDVCSLKDMAPSMGFPSLQDLHMYGGGGGHCLDLQQQMERPMEAFFASCDIGSLAKKRPVSPYADDDGGKSPMLWGEDDEGKGIVDHFQMAPPMMDAAGIDVMDSIADVYGDAKHMTMSSDSTGSKGGGFDVRLERPSLRRPHMGGSPSVLGGGQTRNLSYG

SEQ ID NO: 12992 - DNA, 1292 bp, Zea mays subsp. mays
  misc_feature (1)..(1292): Ceres Seq. ID no. 12411459
  misc_feature: MA Experiment ID: 20000626 Result: Down-regulated in Transcription
  misc_feature: MA Experiment 20000626 PARAMETER Experiment Name: Zm_Herbicide-Treatments_P Parameter: Timepoint (hr) Value: 12
  misc_feature: MA Experiment 20000626 PARAMETER Experiment Name: Zm_Herbicide-Treatments_P Parameter: Tissue Value: Aerial
  misc_feature: MA Experiment 20000626 PARAMETER Experiment Name: Zm_Herbicide-Treatments_P Parameter: Treatment Value: Roundup vs. No Treatment
aatctacgcaacacaaggtaggatcaatcaatcaagtccatcatgctgccaagttctctcctccagaggctggcaagttggtgcccgtggttgctgagagatgagccgaagcagcctgttaaggttctcgtcaccggcgctgcggggcagattgggtacgccatagtcgccatgatcgcgaggggtctgatgcttgggccagaccagccggtggttctccacatgctggacctccctaagtcaacggacgccctgagcggcgtcaggatggagctgatcgatgccgcgttgcctcttctcagaggtgtcgtggctacgagtgacgaggccgaagcgttccgaggcgtcagcttcgccgtcctgatcggcggatggccgagaaaagaggggatgcagaggaaagacctcatcgccaagaacgtccccatataccagtcccaggcctctgcgctgcagcagcacgctgccccaaactgcaaggttcttgtcgtggcaaaccctgcgaacacgaacgcgctcgtgctgaaggagttggcgcccgcggtgcccgccaagaacatcacctgcctcacgcgtctcgaccacaaccgcgccctgggccagatctccgagaagctgggcgtgcacatcggcgacgtcaggaacgccatagtgtgggggaaccactcctccacgcagttccccgacgccagccacgccatcgccaggacgcagcacggggagaagcccgtcagggagctcatcgccgacgagaaatggtttaaggaggagttcgtcagcgtcgtgcagcagcgcggcgaggcggtgatcaaggcgcgcaagcagtccagctcgctgtccgccgccagtgcggcctgtgatcacatgagagactggatccttggcaccccgaagggcacgtgggtgtctatgggtgtgtgctctgacgggagctatggcgttcccaagggcatcttctactcatttccggtgacatgcgagaagggagagtggtctatcgtgcagggtgagttcttatcattataccagattagtagcaacagcagcaccaccgttcttgacatgatttgtttattgttcgaggtcttgaggttgatgacttcgcacgatccaagatggagctttcggcgaatgaactcgatgaagagaggtccatggcgtatgagttcgtcgccagctctgaaagccatcagtagatcacttgtgtatacatgagtcatatgtaaacgaaaaaaatgggtgaacaacagacagttgcttcacaacaaccaataaagcagaaatattgcttg

SEQ ID NO: 12993 - protein, 390 aa, Zea mays subsp. mays
  peptide (1)..(390): Ceres Seq. ID no. 12411460
  misc_feature (177)..(322): Pfam Name: lactate/malate dehydrogenase, alpha/beta Pfam Description: lactate/malate dehydrogenase, alpha/beta
  misc_feature (1)..(322): Homolog of NCBI NO: 38345463 NR Description: OSJNBa0010H02.1 [Oryza sativa (japonica
  misc_feature (1)..(284): Homolog of NCBI NO: 38605860 NR Description: OSJNBb0034G17.18 [Oryza sativa (japonica
  misc_feature (284)..(322): Homolog of NCBI NO: 38605860 NR Description: OSJNBb0034G17.18 [Oryza sativa (japonica
  misc_feature (23)..(322): Homolog of NCBI NO: 37535388 NR Description: cytoplasmic malate dehydrogenase [Oryza sativa
  misc_feature (23)..(322): Homolog of NCBI NO: 10798652 NR Description: malate dehydrogenase [Nicotiana tabacum]
  misc_feature (23)..(322): Homolog of NCBI NO: 18202485 NR Description: Malate dehydrogenase, cytoplasmic
  misc_feature (23)..(331): Homolog of NCBI NO: 10334493 NR Description: cytosolic malate dehydrogenase [Cicer arietinum]
  misc_feature (23)..(322): Homolog of NCBI NO: 21593565 NR Description: cytosolic malate dehydrogenase [Arabidopsis
  misc_feature (23)..(322): Homolog of NCBI NO: 15239843 NR Description: cytosolic malate dehydrogenase; protein id: supported by cDNA: 40174., supported by cDNA: gi_18175962, by cDNA: gi_20259604 [Arabidopsis thaliana]
  misc_feature (24)..(322): Homolog of NCBI NO: 12229778 NR Description: Malate dehydrogenase, cytoplasmic
MLPSSLLQRLASWCPWLLRDEPKQPVKVLVTGAAGQIGYAIVAMIARGLMLGPDQPVVLHMLDLPKSTDALSGVRMELIDAALPLLRGVVATSDEAEAFRGVSFAVLIGGWPRKEGMQRKDLIAKNVPIYQSQASALQQHAAPNCKVLVVANPANTNALVLKELAPAVPAKNITCLTRLDHNRALGQISEKLGVHIGDVRNAIVWGNHSSTQFPDASHAIARTQHGEKPVRELIADEKWFKEEFVSVVQQRGEAVIKARKQSSSLSAASAACDHMRDWILGTPKGTWVSMGVCSDGSYGVPKGIFYSFPVTCEKGEWSIVQGEFLSLYQISSNSSTTVLDMICLLFEVLRLMTSHDPRWSFRRMNSMKRGPWRMSSSPALKAISRSLVYT

SEQ ID NO: 12994 - protein, 347 aa, Zea mays subsp. mays
  peptide (1)..(347): Ceres Seq. ID no. 12411461
  misc_feature (134)..(279): Pfam Name: lactate/malate dehydrogenase, alpha/beta Pfam Description: lactate/malate dehydrogenase, alpha/beta
  misc_feature (1)..(279): Homolog of NCBI NO: 38345463 NR Description: OSJNBa0010H02.1 [Oryza sativa (japonica
  misc_feature (1)..(241): Homolog of NCBI NO: 38605860 NR Description: OSJNBb0034G17.18 [Oryza sativa (japonica
  misc_feature (241)..(279): Homolog of NCBI NO: 38605860 NR Description: OSJNBb0034G17.18 [Oryza sativa (japonica
  misc_feature (1)..(279): Homolog of NCBI NO: 37535388 NR Description: cytoplasmic malate dehydrogenase [Oryza sativa
  misc_feature (1)..(279): Homolog of NCBI NO: 10798652 NR Description: malate dehydrogenase [Nicotiana tabacum]
  misc_feature (1)..(279): Homolog of NCBI NO: 18202485 NR Description: Malate dehydrogenase, cytoplasmic
  misc_feature (1)..(288): Homolog of NCBI NO: 10334493 NR Description: cytosolic malate dehydrogenase [Cicer arietinum]
  misc_feature (1)..(279): Homolog of NCBI NO: 21593565 NR Description: cytosolic malate dehydrogenase [Arabidopsis
  misc_feature (1)..(279): Homolog of NCBI NO: 15239843 NR Description: cytosolic malate dehydrogenase; protein id: supported by cDNA: 40174., supported by cDNA: gi_18175962, by cDNA: gi_20259604 [Arabidopsis thaliana]
  misc_feature (1)..(279): Homolog of NCBI NO: 12229778 NR Description: Malate dehydrogenase, cytoplasmic
MIARGLMLGPDQPVVLHMLDLPKSTDALSGVRMELIDAALPLLRGVVATSDEAEAFRGVSFAVLIGGWPRKEGMQRKDLIAKNVPIYQSQASALQQHAAPNCKVLVVANPANTNALVLKELAPAVPAKNITCLTRLDHNRALGQISEKLGVHIGDVRNAIVWGNHSSTQFPDASHAIARTQHGEKPVRELIADEKWFKEEFVSVVQQRGEAVIKARKQSSSLSAASAACDHMRDWILGTPKGTWVSMGVCSDGSYGVPKGIFYSFPVTCEKGEWSIVQGEFLSLYQISSNSSTTVLDMICLLFEVLRLMTSHDPRWSFRRMNSMKRGPWRMSSSPALKAISRSLVYT

SEQ ID NO: 12995 - protein, 341 aa, Zea mays subsp. mays
  peptide (1)..(341): Ceres Seq. ID no. 12411462
  misc_feature (128)..(273): Pfam Name: lactate/malate dehydrogenase, alpha/beta Pfam Description: lactate/malate dehydrogenase, alpha/beta
  misc_feature (1)..(273): Homolog of NCBI NO: 38345463 NR Description: OSJNBa0010H02.1 [Oryza sativa (japonica
  misc_feature (1)..(235): Homolog of NCBI NO: 38605860 NR Description: OSJNBb0034G17.18 [Oryza sativa (japonica
  misc_feature (235)..(273): Homolog of NCBI NO: 38605860 NR Description: OSJNBb0034G17.18 [Oryza sativa (japonica
  misc_feature (1)..(273): Homolog of NCBI NO: 37535388 NR Description: cytoplasmic malate dehydrogenase [Oryza sativa
  misc_feature (1)..(273): Homolog of NCBI NO: 10798652 NR Description: malate dehydrogenase [Nicotiana tabacum]
  misc_feature (1)..(273): Homolog of NCBI NO: 18202485 NR Description: Malate dehydrogenase, cytoplasmic
  misc_feature (1)..(282): Homolog of NCBI NO: 10334493 NR Description: cytosolic malate dehydrogenase [Cicer arietinum]
  misc_feature (1)..(273): Homolog of NCBI NO: 21593565 NR Description: cytosolic malate dehydrogenase [Arabidopsis
  misc_feature (1)..(273): Homolog of NCBI NO: 15239843 NR Description: cytosolic malate dehydrogenase; protein id: supported by cDNA: 40174., supported by cDNA: gi_18175962, by cDNA: gi_20259604 [Arabidopsis thaliana]
  misc_feature (1)..(273): Homolog of NCBI NO: 12229778 NR Description: Malate dehydrogenase, cytoplasmic
MLGPDQPVVLHMLDLPKSTDALSGVRMELIDAALPLLRGVVATSDEAEAFRGVSFAVLIGGWPRKEGMQRKDLIAKNVPIYQSQASALQQHAAPNCKVLVVANPANTNALVLKELAPAVPAKNITCLTRLDHNRALGQISEKLGVHIGDVRNAIVWGNHSSTQFPDASHAIARTQHGEKPVRELIADEKWFKEEFVSVVQQRGEAVIKARKQSSSLSAASAACDHMRDWILGTPKGTWVSMGVCSDGSYGVPKGIFYSFPVTCEKGEWSIVQGEFLSLYQISSNSSTTVLDMICLLFEVLRLMTSHDPRWSFRRMNSMKRGPWRMSSSPALKAISRSLVYT

SEQ ID NO: 12996 - DNA, 1981 bp, Zea mays subsp. mays
  misc_feature (1)..(1981): Ceres Seq. ID no. 12372957
  misc_feature: MA Experiment ID: 108527 Result: Down-regulated in Transcription
  misc_feature: MA Experiment 108527 PARAMETER Experiment Name: Zm_5mM_NO_P Parameter: Age (day) Value: 8
  misc_feature: MA Experiment 108527 PARAMETER Experiment Name: Zm_5mM_NO_P Parameter: Organism Value: Zea mays
  misc_feature: MA Experiment 108527 PARAMETER Experiment Name: Zm_5mM_NO_P Parameter: Plant Line Value: 35A19
  misc_feature: MA Experiment 108527 PARAMETER Experiment Name: Zm_5mM_NO_P Parameter: Timepoint (hr) Value: 6
  misc_feature: MA Experiment 108527 PARAMETER Experiment Name: Zm_5mM_NO_P Parameter: Tissue Value: Aerial
  misc_feature: MA Experiment 108527 PARAMETER Experiment Name: Zm_5mM_NO_P Parameter: Treatment Value: 5mM NO vs. No Treatment
  misc_feature: MA Experiment ID: 108529 Result: Down-regulated in Transcription
  misc_feature: MA Experiment 108529 PARAMETER Experiment Name: Zm_Imbibed_Seeds_P Parameter: Age (day) Value: 5 vs. 2
  misc_feature: MA Experiment 108529 PARAMETER Experiment Name: Zm_Imbibed_Seeds_P Parameter: Organism Value: Zea mays
  misc_feature: MA Experiment 108529 PARAMETER Experiment Name: Zm_Imbibed_Seeds_P Parameter: Plant Line Value: 35A19
  misc_feature: MA Experiment 108529 PARAMETER Experiment Name: Zm_Imbibed_Seeds_P Parameter: Tissue Value: Roots vs. Embryo
  misc_feature: MA Experiment ID: 108536 Result: Down-regulated in Transcription
  misc_feature: MA Experiment 108536 PARAMETER Experiment Name: Zm_Meristem_P Parameter: Age (day) Value: 8
  misc_feature: MA Experiment 108536 PARAMETER Experiment Name: Zm_Meristem_P Parameter: Organism Value: Zea mays
  misc_feature: MA Experiment 108536 PARAMETER Experiment Name: Zm_Meristem_P Parameter: Plant Line Value: 35A19
  misc_feature: MA Experiment 108536 PARAMETER Experiment Name: Zm_Meristem_P Parameter: Tissue Value: Shoot Meristem vs. Above Shoot Meristem
  misc_feature: MA Experiment ID: 108545 Result: Up-regulated in Transcription
  misc_feature: MA Experiment 108545 PARAMETER Experiment Name: Zm_Imbibed_Seeds_P Parameter: Age (day) Value: 3 vs. 2
  misc_feature: MA Experiment 108545 PARAMETER Experiment Name: Zm_Imbibed_Seeds_P Parameter: Organism Value: Zea mays
  misc_feature: MA Experiment 108545 PARAMETER Experiment Name: Zm_Imbibed_Seeds_P Parameter: Plant Line Value: 35A19
  misc_feature: MA Experiment 108545 PARAMETER Experiment Name: Zm_Imbibed_Seeds_P Parameter: Tissue Value: Aerial vs. Embryo
  misc_feature: MA Experiment ID: 108546 Result: Down-regulated in Transcription
  misc_feature: MA Experiment 108546 PARAMETER Experiment Name: Zm_Imbibed_Seeds_P Parameter: Age (day) Value: 3 vs. 2
  misc_feature: MA Experiment 108546 PARAMETER Experiment Name: Zm_Imbibed_Seeds_P Parameter: Organism Value: Zea mays
  misc_feature: MA Experiment 108546 PARAMETER Experiment Name: Zm_Imbibed_Seeds_P Parameter: Plant Line Value: 35A19
  misc_feature: MA Experiment 108546 PARAMETER Experiment Name: Zm_Imbibed_Seeds_P Parameter: Tissue Value: Roots vs. Embryo
  misc_feature: MA Experiment ID: 108687 Result: Up-regulated in Transcription
  misc_feature: MA Experiment 108687 PARAMETER Experiment Name: Zm_Embryos-Flowers__P Parameter: Tissue Value: Embryo vs. Aerial+
  misc_feature: MA Experiment ID: 108688 Result: Down-regulated in Transcription
  misc_feature: MA Experiment 108688 PARAMETER Experiment Name: Zm_Embryos-Flowers__P Parameter: Tissue Value: Immature Flowers vs. Aerial+
  misc_feature: MA Experiment ID: 20000477 Result: Down-regulated in Transcription
  misc_feature: MA Experiment 20000477 PARAMETER Experiment Name: Zm_5mM_SA_P Parameter: Age (day) Value: 10
  misc_feature: MA Experiment 20000477 PARAMETER Experiment Name: Zm_5mM_SA_P Parameter: Organism Value: Zea mays
  misc_feature: MA Experiment 20000477 PARAMETER Experiment Name: Zm_5mM_SA_P Parameter: Plant Line Value: 35A19
  misc_feature: MA Experiment 20000477 PARAMETER Experiment Name: Zm_5mM_SA_P Parameter: Timepoint (hr) Value: 48
  misc_feature: MA Experiment 20000477 PARAMETER Experiment Name: Zm_5mM_SA_P Parameter: Tissue Value: Aerial
  misc_feature: MA Experiment 20000477 PARAMETER Experiment Name: Zm_5mM_SA_P Parameter: Treatment Value: 5mM SA vs. No Treatment
  misc_feature: MA Experiment ID: 20000478 Result: Down-regulated in Transcription
  misc_feature: MA Experiment 20000478 PARAMETER Experiment Name: Zm_5mM_SA_P Parameter: Age (day) Value: 11
  misc_feature: MA Experiment 20000478 PARAMETER Experiment Name: Zm_5mM_SA_P Parameter: Organism Value: Zea mays
  misc_feature: MA Experiment 20000478 PARAMETER Experiment Name: Zm_5mM_SA_P Parameter: Plant Line Value: 35A19
  misc_feature: MA Experiment 20000478 PARAMETER Experiment Name: Zm_5mM_SA_P Parameter: Timepoint (hr) Value: 72
  misc_feature: MA Experiment 20000478 PARAMETER Experiment Name: Zm_5mM_SA_P Parameter: Tissue Value: Aerial
  misc_feature: MA Experiment 20000478 PARAMETER Experiment Name: Zm_5mM_SA_P Parameter: Treatment Value: 5mM SA vs. No Treatment
  misc_feature: MA Experiment ID: 20000488 Result: Down-regulated in Transcription
  misc_feature: MA Experiment 20000488 PARAMETER Experiment Name: Zm_50mM_NH4NO3_L_to_H_P Parameter: Organism Value: Zea mays
  misc_feature: MA Experiment 20000488 PARAMETER Experiment Name: Zm_50mM_NH4NO3_L_to_H_P Parameter: Timepoint (hr) Value: 8
  misc_feature: MA Experiment 20000488 PARAMETER Experiment Name: Zm_50mM_NH4NO3_L_to_H_P Parameter: Tissue Value: Leaves
  misc_feature: MA Experiment 20000488 PARAMETER Experiment Name: Zm_50mM_NH4NO3_L_to_H_P Parameter: Treatment Value: 50mM NH4NO3 vs. 100mM Mannitol
  misc_feature: MA Experiment ID: 20000535 Result: Up-regulated in Transcription
  misc_feature: MA Experiment 20000535 PARAMETER Experiment Name: Zm_Hybrid_Seed_Dev_P Parameter: DAP Value: 30 vs. 12
  misc_feature: MA Experiment 20000535 PARAMETER Experiment Name: Zm_Hybrid_Seed_Dev_P Parameter: Organism Value: Zea mays
  misc_feature: MA Experiment 20000535 PARAMETER Experiment Name: Zm_Hybrid_Seed_Dev_P Parameter: Plant Line Value: 35A19
  misc_feature: MA Experiment 20000535 PARAMETER Experiment Name: Zm_Hybrid_Seed_Dev_P Parameter: Tissue Value: Embryo vs. Unfert Floret
aaccaactcatgctcgacggaccacctcgtcggagcttcgcatttatcgtgccgtccatgtccatgcaacagccgacgaacgccgcaagccaacttcacgccgcgatggaagcgccattgtcgctctcgtcactgcagctcgccttcacggcggtcgcggcgatcgcggcgctggccgtcgcggtggccgtcacgaggtacaaccggagatacatgggcctgaggctgcctccgggcccgcccgggtggcccgtcgtcggcaacctcttccaggtggcgttctccggcaagctcttcatccactacatccgcgagctccgcaaggagtacggccccatcctgacgctgcgcatgggggagcgcacgctcgtgatcatcagcagcgccgagctcgcgcacgaggcgctggtggagaaagggcgggagttcgcgagccggccccgggagaacaccacgcgcaacatcttctcgtccaacaagctcaccgtgaactccgcggtgtacgggcccgagtggcggtcgctcgccggaacatggtgtccgggatgctgagcacgtcgcggctcagggagttccggcacgcccggaggcgcgccatggaccggttcgtgtcgcggatgcgcgccgaggccgcggcgtcgcccgacggcgcgtccgtctgggtgctccgcaacgcgcggttcgccgtgttctgcatcctgctcgacatgaccttcggcctgctggacctccgcgaggagcacatcgtgcgcatcgacgccgtcatgaagcgcgtgctgctcgccgtcggcgtgcgcatggacgactacctcccgttcctccgcccgttcttctggcggcaccagcgccgtgccctcgccgtccgccgcgagcagatcgacaccctgctcccgctcatcaacaggcggcgcgcaatgcttcgcgacatgcagcagaggcagagctcatcgccgctgcccgaccccagcgtcgcagcgcccttctcgtacctcgactccgtgctcgacctccgcatcgagggccgcgacgacggcgcgctcaccgacgacgagctggtgacgctctgcgcggagctgttgaatggcggcaccgacaccacggccaccgcgatcgagtggggcatggcgcgcatcgtggacagcccgtccatccaggcacggctccacgaggaggtcatgcagcaggtcggcgacgcgcggccggtcgacgacaaggacaccgacgccatgccgtacctccaggccttcgtgaaggagctgctccggaagcacccgcccacgtacttctcgctcacccacgccgctgtgcagccgggatgcaagctcgccggctacgacgtgcccgtggacgcgaacctggacatcttcctcccgaccatctccgaggacccaaagctgtgggaccggccgacggagttcgacccggacaggttcgtgtccggcggcgagacggcggacatgacggggtcagcggggatccggatgatcccgttcggcgcggggcggaggatctgccctgggcttgccatggggacgacgcacatcgccctgatggtggcgcggatggtgcaggcgttcgagtggcgcgcgcacccgtcgcagccgcagctggacttcaaggacaaggtggagttcacggtggtgatggatcggccgctgctggccgcagtgaagccgcgaaacctcgcgttctgatcggacgggcggacggacgcgcgcatgcatggctacagtgtgcgcgtgtcagctagcgtggcagtacgacatcgctcgtaccgtcgtacgtgtgctctgcacgcccagctgcaccacgcatcgccgtttggctatgcatgcatgcatgctagccgcccatgagttgtggacgccactactgtcgtgtactcgtgtctgtatgatgtaacatacacggaaatgctagacgtttgcatatgtgtgtggatgtgtacgtactacgtatataagaatgaactcttttgtgc

SEQ ID NO: 12997 - protein, 563 aa, Zea mays subsp. mays
  peptide (1)..(563): Ceres Seq. ID no. 12372958
  misc_feature (175)..(558): Pfam Name: Cytochrome P450 Pfam Description: Cytochrome P450
  misc_feature (175)..(563): Homolog of NCBI NO: 38347596 NR Description: OSJNBa0042I15.9 [Oryza sativa (japonica
  misc_feature (175)..(559): Homolog of NCBI NO: 15238249 NR Description: cytochrome p450, putative; protein id: supported by cDNA: 7867. [Arabidopsis thaliana]
  misc_feature (175)..(559): Homolog of NCBI NO: 21595357 NR Description: cytochrom P450-like protein [Arabidopsis thaliana]
  misc_feature (175)..(559): Homolog of NCBI NO: 584867 NR Description: Cytochrome P450 77A2 (CYPLXXVIIA2) (P-450EG5)
PTHARRTTSSELRIYRAVHVHATADERRKPTSRRDGSAIVALVTAARLHGGRGDRGAGRRGGRHEVQPEIHGPEAASGPARVARRRQPLPGGVLRQALHPLHPRAPQGVRPHPDAAHGGAHARDHQQRRARARGAGGERAGVREPAPGEHHAQHLLVQQAHRELRGVRARVAVARRNMVSGMLSTSRLREFRHARRRAMDRFVSRMRAEAAASPDGASVWVLRNARFAVFCILLDMTFGLLDLREEHIVRIDAVMKRVLLAVGVRMDDYLPFLRPFFWRHQRRALAVRREQIDTLLPLINRRRAMLRDMQQRQSSSPLPDPSVAAPFSYLDSVLDLRIEGRDDGALTDDELVTLCAELLNGGTDTTATAIEWGMARIVDSPSIQARLHEEVMQQVGDARPVDDKDTDAMPYLQAFVKELLRKHPPTYFSLTHAAVQPGCKLAGYDVPVDANLDIFLPTISEDPKLWDRPTEFDPDRFVSGGETADMTGSAGIRMIPFGAGRRICPGLAMGTTHIALMVARMVQAFEWRAHPSQPQLDFKDKVEFTVVMDRPLLAAVKPRNLAF

SEQ ID NO: 12998 - protein, 386 aa, Zea mays subsp. mays
  peptide (1)..(386): Ceres Seq. ID no. 12372959
  misc_feature (1)..(381): Pfam Name: Cytochrome P450 Pfam Description: Cytochrome P450
  misc_feature (1)..(386): Homolog of NCBI NO: 38347596 NR Description: OSJNBa0042I15.9 [Oryza sativa (japonica
  misc_feature (1)..(382): Homolog of NCBI NO: 15238249 NR Description: cytochrome p450, putative; protein id: supported by cDNA: 7867. [Arabidopsis thaliana]
  misc_feature (1)..(382): Homolog of NCBI NO: 21595357 NR Description: cytochrom P450-like protein [Arabidopsis thaliana]
  misc_feature (1)..(382): Homolog of NCBI NO: 584867 NR Description: Cytochrome P450 77A2 (CYPLXXVIIA2) (P-450EG5)
MVSGMLSTSRLREFRHARRRAMDRFVSRMRAEAAASPDGASVWVLRNARFAVFCILLDMTFGLLDLREEHIVRIDAVMKRVLLAVGVRMDDYLPFLRPFFWRHQRRALAVRREQIDTLLPLINRRRAMLRDMQQRQSSSPLPDPSVAAPFSYLDSVLDLRIEGRDDGALTDDELVTLCAELLNGGTDTTATAIEWGMARIVDSPSIQARLHEEVMQQVGDARPVDDKDTDAMPYLQAFVKELLRKHPPTYFSLTHAAVQPGCKLAGYDVPVDANLDIFLPTISEDPKLWDRPTEFDPDRFVSGGETADMTGSAGIRMIPFGAGRRICPGLAMGTTHIALMVARMVQAFEWRAHPSQPQLDFKDKVEFTVVMDRPLLAAVKPRNLAF

SEQ ID NO: 12999 - protein, 382 aa, Zea mays subsp. mays
  peptide (1)..(382): Ceres Seq. ID no. 12372960
  misc_feature (1)..(377): Pfam Name: Cytochrome P450 Pfam Description: Cytochrome P450
  misc_feature (1)..(382): Homolog of NCBI NO: 38347596 NR Description: OSJNBa0042I15.9 [Oryza sativa (japonica
  misc_feature (1)..(378): Homolog of NCBI NO: 15238249 NR Description: cytochrome p450, putative; protein id: supported by cDNA: 7867. [Arabidopsis thaliana]
  misc_feature (1)..(378): Homolog of NCBI NO: 21595357 NR Description: cytochrom P450-like protein [Arabidopsis thaliana]
  misc_feature (1)..(378): Homolog of NCBI NO: 584867 NR Description: Cytochrome P450 77A2 (CYPLXXVIIA2) (P-450EG5)
MLSTSRLREFRHARRRAMDRFVSRMRAEAAASPDGASVWVLRNARFAVFCILLDMTFGLLDLREEHIVRIDAVMKRVLLAVGVRMDDYLPFLRPFFWRHQRRALAVRREQIDTLLPLINRRRAMLRDMQQRQSSSPLPDPSVAAPFSYLDSVLDLRIEGRDDGALTDDELVTLCAELLNGGTDTTATAIEWGMARIVDSPSIQARLHEEVMQQVGDARPVDDKDTDAMPYLQAFVKELLRKHPPTYFSLTHAAVQPGCKLAGYDVPVDANLDIFLPTISEDPKLWDRPTEFDPDRFVSGGETADMTGSAGIRMIPFGAGRRICPGLAMGTTHIALMVARMVQAFEWRAHPSQPQLDFKDKVEFTVVMDRPLLAAVKPRNLAF

SEQ ID NO: 13000 - DNA, 1221 bp, Zea mays subsp. mays
  misc_feature (1)..(1221): Ceres Seq. ID no. 12411455
  misc_feature: MA Experiment ID: 108528 Result: Up-regulated in Transcription
  misc_feature: MA Experiment 108528 PARAMETER Experiment Name: Zm_Imbibed_Seeds_P Parameter: Age (day) Value: 5 vs. 2
  misc_feature: MA Experiment 108528 PARAMETER Experiment Name: Zm_Imbibed_Seeds_P Parameter: Organism Value: Zea mays
  misc_feature: MA Experiment 108528 PARAMETER Experiment Name: Zm_Imbibed_Seeds_P Parameter: Plant Line Value: 35A19
  misc_feature: MA Experiment 108528 PARAMETER Experiment Name: Zm_Imbibed_Seeds_P Parameter: Tissue Value: Aerial vs. Embryo
  misc_feature: MA Experiment ID: 108530 Result: Up-regulated in Transcription
  misc_feature: MA Experiment 108530 PARAMETER Experiment Name: Zm_Imbibed_Seeds_P Parameter: Age (day) Value: 6 vs. 2
  misc_feature: MA Experiment 108530 PARAMETER Experiment Name: Zm_Imbibed_Seeds_P Parameter: Organism Value: Zea mays
  misc_feature: MA Experiment 108530 PARAMETER Experiment Name: Zm_Imbibed_Seeds_P Parameter: Plant Line Value: 35A19
  misc_feature: MA Experiment 108530 PARAMETER Experiment Name: Zm_Imbibed_Seeds_P Parameter: Tissue Value: Aerial vs. Embryo
  misc_feature: MA Experiment ID: 108544 Result: Down-regulated in Transcription
  misc_feature: MA Experiment ID: 108547 Result: Up-regulated in Transcription
  misc_feature: MA Experiment 108547 PARAMETER Experiment Name: Zm_Imbibed_Seeds_P Parameter: Age (day) Value: 4 vs. 2
  misc_feature: MA Experiment 108547 PARAMETER Experiment Name: Zm_Imbibed_Seeds_P Parameter: Organism Value: Zea mays
  misc_feature: MA Experiment 108547 PARAMETER Experiment Name: Zm_Imbibed_Seeds_P Parameter: Plant Line Value: 35A19
  misc_feature: MA Experiment 108547 PARAMETER Experiment Name: Zm_Imbibed_Seeds_P Parameter: Tissue Value: Aerial vs. Embryo
  misc_feature: MA Experiment ID: 108556 Result: Down-regulated in Transcription
  misc_feature: MA Experiment 108556 PARAMETER Experiment Name: Zm_Drought_P Parameter: Age (day) Value: 9
  misc_feature: MA Experiment 108556 PARAMETER Experiment Name: Zm_Drought_P Parameter: Organism Value: Zea mays
  misc_feature: MA Experiment 108556 PARAMETER Experiment Name: Zm_Drought_P Parameter: Plant Line Value: 35A19
  misc_feature: MA Experiment 108556 PARAMETER Experiment Name: Zm_Drought_P Parameter: Timepoint (hr) Value: 24
  misc_feature: MA Experiment 108556 PARAMETER Experiment Name: Zm_Drought_P Parameter: Tissue Value: Aerial
  misc_feature: MA Experiment 108556 PARAMETER Experiment Name: Zm_Drought_P Parameter: Treatment Value: Drought vs. No Drought
  misc_feature: MA Experiment ID: 108559 Result: Down-regulated in Transcription
  misc_feature: MA Experiment 108559 PARAMETER Experiment Name: Zm_5mM_NO_P Parameter: Age (day) Value: 8
  misc_feature: MA Experiment 108559 PARAMETER Experiment Name: Zm_5mM_NO_P Parameter: Organism Value: Zea mays
  misc_feature: MA Experiment 108559 PARAMETER Experiment Name: Zm_5mM_NO_P Parameter: Plant Line Value: 35A19
  misc_feature: MA Experiment 108559 PARAMETER Experiment Name: Zm_5mM_NO_P Parameter: Timepoint (hr) Value: 12
  misc_feature: MA Experiment 108559 PARAMETER Experiment Name: Zm_5mM_NO_P Parameter: Tissue Value: Aerial
  misc_feature: MA Experiment 108559 PARAMETER Experiment Name: Zm_5mM_NO_P Parameter: Treatment Value: 5mM NO vs. No Treatment
  misc_feature: MA Experiment ID: 20000477 Result: Down-regulated in Transcription
  misc_feature: MA Experiment 20000477 PARAMETER Experiment Name: Zm_5mM_SA_P Parameter: Age (day) Value: 10
  misc_feature: MA Experiment 20000477 PARAMETER Experiment Name: Zm_5mM_SA_P Parameter: Organism Value: Zea mays
  misc_feature: MA Experiment 20000477 PARAMETER Experiment Name: Zm_5mM_SA_P Parameter: Plant Line Value: 35A19
  misc_feature: MA Experiment 20000477 PARAMETER Experiment Name: Zm_5mM_SA_P Parameter: Timepoint (hr) Value: 48
  misc_feature: MA Experiment 20000477 PARAMETER Experiment Name: Zm_5mM_SA_P Parameter: Tissue Value: Aerial
  misc_feature: MA Experiment 20000477 PARAMETER Experiment Name: Zm_5mM_SA_P Parameter: Treatment Value: 5mM SA vs. No Treatment
  misc_feature: MA Experiment ID: 20000478 Result: Down-regulated in Transcription
  misc_feature: MA Experiment 20000478 PARAMETER Experiment Name: Zm_5mM_SA_P Parameter: Age (day) Value: 11
  misc_feature: MA Experiment 20000478 PARAMETER Experiment Name: Zm_5mM_SA_P Parameter: Organism Value: Zea mays
  misc_feature: MA Experiment 20000478 PARAMETER Experiment Name: Zm_5mM_SA_P Parameter: Plant Line Value: 35A19
  misc_feature: MA Experiment 20000478 PARAMETER Experiment Name: Zm_5mM_SA_P Parameter: Timepoint (hr) Value: 72
  misc_feature: MA Experiment 20000478 PARAMETER Experiment Name: Zm_5mM_SA_P Parameter: Tissue Value: Aerial
  misc_feature: MA Experiment 20000478 PARAMETER Experiment Name: Zm_5mM_SA_P Parameter: Treatment Value: 5mM SA vs. No Treatment
ttcttcggctatccgctggcagccgagcaggcccaagtggtgcgtcctgttcacccacggcgcctgcgtcggccctgcccgaactggcgtgcagagcagtgctccacgacgccgccaccacctgccccagcagcggcacgctccgacaacggcgaccatggcggtgcgggcgcgggggctggggagtgttccctgctagatccagtagatggccgactcatcgaggccctccgtgaatatcatctgcgccggtcgtctgctcggctgcagtggattaggtgagcgggattccggtagaggattgtttagtttgggattctaggttcctcgctcccgtgccagagacggcgctggacgttgaggtcagggccccggcggcgcggcgcgtcgcggagaggaaggcgcggaagcggtccgagcggcgcacctacctggtggccgccatgatgtccaacctcggggtcacgtccatggccgtcgccgccgtgtactatcgcttcagctggcaaatggagggcggcgcggtcccggtgagcgagatgttcggcacgtttgcgctctccgtcggcgaggcggtcgggatggagttctgggcgcggtgggcgcaccgggcgctatggcacgcctccctgtggcacatgcacgagtcgcaccaccggccgcgcgagggcccattcgagctcaacgacgtgttcgccatcgtcaacgccgtgtcggccatctccctcctcggtgacgtcgtgagcagatacaccacatggacaagtttgagggcgtcccgtatgggctcttcctgggaccaaaggagctggaggaggtcgatggcctggacgagctggaaaaggagctcgcgtgaatcggccggaccatctgatggattcatccggattccggcgcggcgatctccgctccgctccgtgattccggcgcagcctcatggttggggagccgacgaccagaacctccagaagggatttggtttggatgcgcgagcatagatcttgacctgcatttcggatggtctgtggaggcacagctcgtacctggagatgtctggtgccatggaattacttttcttttcttcttttcctgacattttcacgccgacgtctttatttgtggagacgtcgcacgttctggcccatgtattactgttcttatggctaggattctgtatataacttgtagagacatgttatgaaccaccagctcaatgaagct

SEQ ID NO: 13001 - protein, 184 aa, Zea mays subsp. mays
  peptide (1)..(184): Ceres Seq. ID no. 12411456
  misc_feature (34)..(96): Pfam Name: Carotene hydroxylase Pfam Description: Carotene hydroxylase
  misc_feature (1)..(96): Homolog of NCBI NO: 32488500 NR Description: OSJNBa0011J08.7 [Oryza sativa (japonica
  misc_feature (1)..(96): Homolog of NCBI NO: 11245486 NR Description: beta-carotene hydroxylase [Citrus unshiu]
  misc_feature (1)..(96): Homolog of NCBI NO: 9988836 NR Description: beta-carotene hydroxylase [Citrus unshiu]
  misc_feature (1)..(96): Homolog of NCBI NO: 21734857 NR Description: beta-carotene hydroxylase [Vitis vinifera]
  misc_feature (1)..(96): Homolog of NCBI NO: 33145986 NR Description: beta-carotene hydroxylase [Crocus sativus]
  misc_feature (1)..(96): Homolog of NCBI NO: 2956717 NR Description: beta-carotene hydroxylase 2 [Capsicum annuum]
  misc_feature (1)..(96): Homolog of NCBI NO: 37536402 NR Description: putative beta-carotene hydroxylase [Oryza sativa
  misc_feature (1)..(96): Homolog of NCBI NO: 5870600 NR Description: beta-carotene hydroxylase [Lycopersicon
  misc_feature (1)..(96): Homolog of NCBI NO: 5870598 NR Description: beta-carotene hydroxylase [Lycopersicon
  misc_feature (1)..(96): Homolog of NCBI NO: 9968545 NR Description: beta-carotene hydroxylase [Narcissus
MMSNLGVTSMAVAAVYYRFSWQMEGGAVPVSEMFGTFALSVGEAVGMEFWARWAHRALWHASLWHMHESHHRPREGPFELNDVFAIVNAVSAISLLGDVVSRYTTWTSLRASRMGSSWDQRSWRRSMAWTSWKRSSRESAGPSDGFIRIPARRSPLRSVIPAQPHGWGADDQNLQKGFGLDARA

SEQ ID NO: 13002 - protein, 183 aa, Zea mays subsp. mays
  peptide (1)..(183): Ceres Seq. ID no. 12411457
  misc_feature (33)..(95): Pfam Name: Carotene hydroxylase Pfam Description: Carotene hydroxylase
  misc_feature (1)..(95): Homolog of NCBI NO: 32488500 NR Description: OSJNBa0011J08.7 [Oryza sativa (japonica
  misc_feature (1)..(95): Homolog of NCBI NO: 11245486 NR Description: beta-carotene hydroxylase [Citrus unshiu]
  misc_feature (1)..(95): Homolog of NCBI NO: 9988836 NR Description: beta-carotene hydroxylase [Citrus unshiu]
  misc_feature (1)..(95): Homolog of NCBI NO: 21734857 NR Description: beta-carotene hydroxylase [Vitis vinifera]
  misc_feature (1)..(95): Homolog of NCBI NO: 33145986 NR Description: beta-carotene hydroxylase [Crocus sativus]
  misc_feature (1)..(95): Homolog of NCBI NO: 2956717 NR Description: beta-carotene hydroxylase 2 [Capsicum annuum]
  misc_feature (1)..(95): Homolog of NCBI NO: 37536402 NR Description: putative beta-carotene hydroxylase [Oryza sativa
  misc_feature (1)..(95): Homolog of NCBI NO: 5870600 NR Description: beta-carotene hydroxylase [Lycopersicon
  misc_feature (1)..(95): Homolog of NCBI NO: 5870598 NR Description: beta-carotene hydroxylase [Lycopersicon
  misc_feature (1)..(95): Homolog of NCBI NO: 9968545 NR Description: beta-carotene hydroxylase [Narcissus
MSNLGVTSMAVAAVYYRFSWQMEGGAVPVSEMFGTFALSVGEAVGMEFWARWAHRALWHASLWHMHESHHRPREGPFELNDVFAIVNAVSAISLLGDVVSRYTTWTSLRASRMGSSWDQRSWRRSMAWTSWKRSSRESAGPSDGFIRIPARRSPLRSVIPAQPHGWGADDQNLQKGFGLDARA

SEQ ID NO: 13003 - protein, 175 aa, Zea mays subsp. mays
  peptide (1)..(175): Ceres Seq. ID no. 12411458
  misc_feature (25)..(87): Pfam Name: Carotene hydroxylase Pfam Description: Carotene hydroxylase
  misc_feature (1)..(87): Homolog of NCBI NO: 32488500 NR Description: OSJNBa0011J08.7 [Oryza sativa (japonica
  misc_feature (1)..(87): Homolog of NCBI NO: 11245486 NR Description: beta-carotene hydroxylase [Citrus unshiu]
  misc_feature (1)..(87): Homolog of NCBI NO: 9988836 NR Description: beta-carotene hydroxylase [Citrus unshiu]
  misc_feature (1)..(87): Homolog of NCBI NO: 21734857 NR Description: beta-carotene hydroxylase [Vitis vinifera]
  misc_feature (1)..(87): Homolog of NCBI NO: 33145986 NR Description: beta-carotene hydroxylase [Crocus sativus]
  misc_feature (1)..(87): Homolog of NCBI NO: 2956717 NR Description: beta-carotene hydroxylase 2 [Capsicum annuum]
  misc_feature (1)..(87): Homolog of NCBI NO: 37536402 NR Description: putative beta-carotene hydroxylase [Oryza sativa
  misc_feature (1)..(87): Homolog of NCBI NO: 5870600 NR Description: beta-carotene hydroxylase [Lycopersicon
  misc_feature (1)..(87): Homolog of NCBI NO: 5870598 NR Description: beta-carotene hydroxylase [Lycopersicon
  misc_feature (1)..(87): Homolog of NCBI NO: 9968545 NR Description: beta-carotene hydroxylase [Narcissus
MAVAAVYYRFSWQMEGGAVPVSEMFGTFALSVGEAVGMEFWARWAHRALWHASLWHMHESHHRPREGPFELNDVFAIVNAVSAISLLGDVVSRYTTWTSLRASRMGSSWDQRSWRRSMAWTSWKRSSRESAGPSDGFIRIPARRSPLRSVIPAQPHGWGADDQNLQKGFGLDARA

SEQ ID NO: 13004 - DNA, 1323 bp, Zea mays subsp. mays
  misc_feature (1)..(1323): Ceres Seq. ID no. 12376296
  misc_feature: MA Experiment ID: 108535 Result: Down-regulated in Transcription
  misc_feature: MA Experiment 108535 PARAMETER Experiment Name: Zm_Meristem_P Parameter: Age (day) Value: 8
  misc_feature: MA Experiment 108535 PARAMETER Experiment Name: Zm_Meristem_P Parameter: Organism Value: Zea mays
  misc_feature: MA Experiment 108535 PARAMETER Experiment Name: Zm_Meristem_P Parameter: Plant Line Value: 35A19
  misc_feature: MA Experiment 108535 PARAMETER Experiment Name: Zm_Meristem_P Parameter: Tissue Value: Root Meristem vs. Above Root Meristem
  misc_feature: MA Experiment ID: 108544 Result: Down-regulated in Transcription
  misc_feature: MA Experiment ID: 108545 Result: Down-regulated in Transcription
  misc_feature: MA Experiment 108545 PARAMETER Experiment Name: Zm_Imbibed_Seeds_P Parameter: Age (day) Value: 3 vs. 2
  misc_feature: MA Experiment 108545 PARAMETER Experiment Name: Zm_Imbibed_Seeds_P Parameter: Organism Value: Zea mays
  misc_feature: MA Experiment 108545 PARAMETER Experiment Name: Zm_Imbibed_Seeds_P Parameter: Plant Line Value: 35A19
  misc_feature: MA Experiment 108545 PARAMETER Experiment Name: Zm_Imbibed_Seeds_P Parameter: Tissue Value: Aerial vs. Embryo
  misc_feature: MA Experiment ID: 108556 Result: Down-regulated in Transcription
  misc_feature: MA Experiment 108556 PARAMETER Experiment Name: Zm_Drought_P Parameter: Age (day) Value: 9
  misc_feature: MA Experiment 108556 PARAMETER Experiment Name: Zm_Drought_P Parameter: Organism Value: Zea mays
  misc_feature: MA Experiment 108556 PARAMETER Experiment Name: Zm_Drought_P Parameter: Plant Line Value: 35A19
  misc_feature: MA Experiment 108556 PARAMETER Experiment Name: Zm_Drought_P Parameter: Timepoint (hr) Value: 24
  misc_feature: MA Experiment 108556 PARAMETER Experiment Name: Zm_Drought_P Parameter: Tissue Value: Aerial
  misc_feature: MA Experiment 108556 PARAMETER Experiment Name: Zm_Drought_P Parameter: Treatment Value: Drought vs. No Drought
  misc_feature: MA Experiment ID: 20000477 Result: Down-regulated in Transcription
  misc_feature: MA Experiment 20000477 PARAMETER Experiment Name: Zm_5mM_SA_P Parameter: Age (day) Value: 10
  misc_feature: MA Experiment 20000477 PARAMETER Experiment Name: Zm_5mM_SA_P Parameter: Organism Value: Zea mays
  misc_feature: MA Experiment 20000477 PARAMETER Experiment Name: Zm_5mM_SA_P Parameter: Plant Line Value: 35A19
  misc_feature: MA Experiment 20000477 PARAMETER Experiment Name: Zm_5mM_SA_P Parameter: Timepoint (hr) Value: 48
  misc_feature: MA Experiment 20000477 PARAMETER Experiment Name: Zm_5mM_SA_P Parameter: Tissue Value: Aerial
  misc_feature: MA Experiment 20000477 PARAMETER Experiment Name: Zm_5mM_SA_P Parameter: Treatment Value: 5mM SA vs. No Treatment
  misc_feature: MA Experiment ID: 20000478 Result: Down-regulated in Transcription
  misc_feature: MA Experiment 20000478 PARAMETER Experiment Name: Zm_5mM_SA_P Parameter: Age (day) Value: 11
  misc_feature: MA Experiment 20000478 PARAMETER Experiment Name: Zm_5mM_SA_P Parameter: Organism Value: Zea mays
  misc_feature: MA Experiment 20000478 PARAMETER Experiment Name: Zm_5mM_SA_P Parameter: Plant Line Value: 35A19
  misc_feature: MA Experiment 20000478 PARAMETER Experiment Name: Zm_5mM_SA_P Parameter: Timepoint (hr) Value: 72
  misc_feature: MA Experiment 20000478 PARAMETER Experiment Name: Zm_5mM_SA_P Parameter: Tissue Value: Aerial
  misc_feature: MA Experiment 20000478 PARAMETER Experiment Name: Zm_5mM_SA_P Parameter: Treatment Value: 5mM SA vs. No Treatment
  misc_feature: MA Experiment ID: 20000479 Result: Down-regulated in Transcription
  misc_feature: MA Experiment 20000479 PARAMETER Experiment Name: Zm_Drought_P Parameter: Age (day) Value: 10
  misc_feature: MA Experiment 20000479 PARAMETER Experiment Name: Zm_Drought_P Parameter: Organism Value: Zea mays
  misc_feature: MA Experiment 20000479 PARAMETER Experiment Name: Zm_Drought_P Parameter: Plant Line Value: 35A19
  misc_feature: MA Experiment 20000479 PARAMETER Experiment Name: Zm_Drought_P Parameter: Timepoint (hr) Value: 48
  misc_feature: MA Experiment 20000479 PARAMETER Experiment Name: Zm_Drought_P Parameter: Tissue Value: Aerial
  misc_feature: MA Experiment 20000479 PARAMETER Experiment Name: Zm_Drought_P Parameter: Treatment Value: Drought vs. No Drought
  misc_feature: MA Experiment ID: 20000480 Result: Down-regulated in Transcription
  misc_feature: MA Experiment 20000480 PARAMETER Experiment Name: Zm_Drought_P Parameter: Age (day) Value: 11
  misc_feature: MA Experiment 20000480 PARAMETER Experiment Name: Zm_Drought_P Parameter: Organism Value: Zea mays
  misc_feature: MA Experiment 20000480 PARAMETER Experiment Name: Zm_Drought_P Parameter: Plant Line Value: 35A19
  misc_feature: MA Experiment 20000480 PARAMETER Experiment Name: Zm_Drought_P Parameter: Timepoint (hr) Value: 72
  misc_feature: MA Experiment 20000480 PARAMETER Experiment Name: Zm_Drought_P Parameter: Tissue Value: Aerial
  misc_feature: MA Experiment 20000480 PARAMETER Experiment Name: Zm_Drought_P Parameter: Treatment Value: Drought vs. No Drought
  misc_feature: MA Experiment ID: 20000492 Result: Down-regulated in Transcription
  misc_feature: MA Experiment 20000492 PARAMETER Experiment Name: Zm_Hybrid_Seed_Dev_P Parameter: DAP Value: 12
  misc_feature: MA Experiment 20000492 PARAMETER Experiment Name: Zm_Hybrid_Seed_Dev_P Parameter: Organism Value: Zea mays
  misc_feature: MA Experiment 20000492 PARAMETER Experiment Name: Zm_Hybrid_Seed_Dev_P Parameter: Plant Line Value: 35A19
  misc_feature: MA Experiment 20000492 PARAMETER Experiment Name: Zm_Hybrid_Seed_Dev_P Parameter: Tissue Value: Fert Kernel vs. Unfert Floret
  misc_feature: MA Experiment ID: 20000535 Result: Down-regulated in Transcription
  misc_feature: MA Experiment 20000535 PARAMETER Experiment Name: Zm_Hybrid_Seed_Dev_P Parameter: DAP Value: 30 vs. 12
  misc_feature: MA Experiment 20000535 PARAMETER Experiment Name: Zm_Hybrid_Seed_Dev_P Parameter: Organism Value: Zea mays
  misc_feature: MA Experiment 20000535 PARAMETER Experiment Name: Zm_Hybrid_Seed_Dev_P Parameter: Plant Line Value: 35A19
  misc_feature: MA Experiment 20000535 PARAMETER Experiment Name: Zm_Hybrid_Seed_Dev_P Parameter: Tissue Value: Embryo vs. Unfert Floret
attgcttcgaacccacttgatcgctgcgtcgtctcccgggccggccctcagcgagctctcccgtacgtgcgcagttctcggcacgctaccccttatataccccccggccgctctcgctctagatgcacaggcagtgacacgcgcgcataccgacggactaggtagctgctcatcagctatccagatcgttgctcctcccctcgccatcggccgcgcccgtgtcgggcggcgggaatgggacgccacgcgggctccggcggcggcgtgcagcagaagctgcgcaagggcctctggtcgcccgaggaagacgagaagctctacaaccacatcatccactacggcgtcgggtgctggagctccgtgcccaagctctcagggctgcagaggtgcggcaagagctgccgccttcggtggatcaactacctgcgccccgacctgaagcggggcagcttctcgcagcaggaggaggacgccatcgtcggcctccatgagatcctgggcaacagatggtcgcagatcgcgtcgcacttgccgggccgaacggacaacgagatcaagaacttctggaacagctgcctcaagaagaagctgcgccagcgcggcatcgaccccagcacccacaagcccatctccgccgacgcggcggcattggagcagccggcgtcgcgagaccgcaagccgtcgttggccacagccgccgctggtggcggcctcgatgtgaagcagcatcagcagcagcagcaggtgttcgacccgttcccgctgaccgacagcttcggcggcggcttcgacgacgcggccggcgccgcattgtacggccacatgggcggcggcggcaagcagcaggacgcggccgcgttcgtggactacagcagcgtgctggacgtgtcggagaacctgggctacggcgagagctccagcaacagcagcaacaactggaactgcgcgccggaggtgaacaacaacaacaatgcgctggacggcggcgacgcgccgctgcactgggcctccgagagcaaggccgcgcccttcgccggctacggcgccgaggagcagtcgctgctggagcacaagctccttccgcatttcgacttcgacatcggccgggccgccgtggtcggcgacttcagcctcgacttcttctgaagggttcttcagccctgcgggtataatcatcgatcgccgtgcccgtgtatgtactgtatcaaagccaattcatacggaacagtcgggagcttagagaccgcgctttgttaattctcctctagtcgtccttactcagcagctctcctcctttaacaatgttttgggcttcttcgtttc

SEQ ID NO: 13005 - protein, 303 aa, Zea mays subsp. mays
  peptide (1)..(303): Ceres Seq. ID no. 12376297
  misc_feature (17)..(64): Pfam Name: Myb-like DNA-binding domain Pfam Description: Myb-like DNA-binding domain
  misc_feature (1)..(303): Homolog of NCBI NO: 34911526 NR Description: putative myb-related protein [Oryza sativa
  misc_feature (1)..(283): Homolog of NCBI NO: 547958 NR Description: Myb-related protein Hv33 >gi|421981|pir||S31818
  misc_feature (1)..(283): Homolog of NCBI NO: 19059 NR Description: MybHv33 [Hordeum vulgare subsp. vulgare]
  misc_feature (1)..(303): Homolog of NCBI NO: 25458597 NR Description: probable myb-related protein [imported] - rice
  misc_feature (36)..(262): Homolog of NCBI NO: 227031 NR Description: myb-related gene Hv33
  misc_feature (1)..(241): Homolog of NCBI NO: 34913750 NR Description: OSJNBa0051H17.23 [Oryza sativa (japonica
  misc_feature (1)..(147): Homolog of NCBI NO: 34902542 NR Description: putative transcription factor (myb) [Oryza sativa
  misc_feature (12)..(192): Homolog of NCBI NO: 28927688 NR Description: putative Myb-like DNA-binding protein [Oryza
  misc_feature (5)..(133): Homolog of NCBI NO: 34913340 NR Description: contains ESTs to Oryza sativa chromosome 1, OSJNBa0026J14.1~unknown protein
  misc_feature (12)..(157): Homolog of NCBI NO: 28628949 NR Description: MYB2 [Dendrobium sp. XMW-2002-2]
MGRHAGSGGGVQQKLRKGLWSPEEDEKLYNHIIHYGVGCWSSVPKLSGLQRCGKSCRLRWINYLRPDLKRGSFSQQEEDAIVGLHEILGNRWSQIASHLPGRTDNEIKNFWNSCLKKKLRQRGIDPSTHKPISADAAALEQPASRDRKPSLATAAAGGGLDVKQHQQQQQVFDPFPLTDSFGGGFDDAAGAALYGHMGGGGKQQDAAAFVDYSSVLDVSENLGYGESSSNSSNNWNCAPEVNNNNNALDGGDAPLHWASESKAAPFAGYGAEEQSLLEHKLLPHFDFDIGRAAVVGDFSLDFF

SEQ ID NO: 13006 - protein, 221 aa, Zea mays subsp. mays
  peptide (1)..(221): Ceres Seq. ID no. 12376298
MVADRVALAGPNGQRDQELLEQLPQEEAAPARHRPQHPQAHLRRRGGIGAAGVARPQAVVGHSRRWWRPRCEAASAAAAGVRPVPADRQLRRRLRRRGRRRIVRPHGRRRQAAGRGRVRGLQQRAGRVGEPGLRRELQQQQQQLELRAGGEQQQQCAGRRRRAAALGLREQGRALRRLRRRGAVAAGAQAPSAFRLRHRPGRRGRRLQPRLLLKGSSALRV

SEQ ID NO: 13007 - DNA, 1824 bp, Zea mays subsp. mays
  misc_feature (1)..(1824): Ceres Seq. ID no. 12593647
  misc_feature: MA Experiment ID: 108523 Result: Down-regulated in Transcription
  misc_feature: MA Experiment 108523 PARAMETER Experiment Name: Zm_42deg_Heat_P Parameter: Age (day) Value: 8
  misc_feature: MA Experiment 108523 PARAMETER Experiment Name: Zm_42deg_Heat_P Parameter: Organism Value: Zea mays
  misc_feature: MA Experiment 108523 PARAMETER Experiment Name: Zm_42deg_Heat_P Parameter: Plant Line Value: 35A19
  misc_feature: MA Experiment 108523 PARAMETER Experiment Name: Zm_42deg_Heat_P Parameter: Temperature (deg C) Value: 42 vs. 22
  misc_feature: MA Experiment 108523 PARAMETER Experiment Name: Zm_42deg_Heat_P Parameter: Timepoint (hr) Value: 6
  misc_feature: MA Experiment 108523 PARAMETER Experiment Name: Zm_42deg_Heat_P Parameter: Tissue Value: Aerial
  misc_feature: MA Experiment ID: 108528 Result: Down-regulated in Transcription
  misc_feature: MA Experiment 108528 PARAMETER Experiment Name: Zm_Imbibed_Seeds_P Parameter: Age (day) Value: 5 vs. 2
  misc_feature: MA Experiment 108528 PARAMETER Experiment Name: Zm_Imbibed_Seeds_P Parameter: Organism Value: Zea mays
  misc_feature: MA Experiment 108528 PARAMETER Experiment Name: Zm_Imbibed_Seeds_P Parameter: Plant Line Value: 35A19
  misc_feature: MA Experiment 108528 PARAMETER Experiment Name: Zm_Imbibed_Seeds_P Parameter: Tissue Value: Aerial vs. Embryo
  misc_feature: MA Experiment ID: 108530 Result: Down-regulated in Transcription
  misc_feature: MA Experiment 108530 PARAMETER Experiment Name: Zm_Imbibed_Seeds_P Parameter: Age (day) Value: 6 vs. 2
  misc_feature: MA Experiment 108530 PARAMETER Experiment Name: Zm_Imbibed_Seeds_P Parameter: Organism Value: Zea mays
  misc_feature: MA Experiment 108530 PARAMETER Experiment Name: Zm_Imbibed_Seeds_P Parameter: Plant Line Value: 35A19
  misc_feature: MA Experiment 108530 PARAMETER Experiment Name: Zm_Imbibed_Seeds_P Parameter: Tissue Value: Aerial vs. Embryo
  misc_feature: MA Experiment ID: 108534 Result: Down-regulated in Transcription
  misc_feature: MA Experiment 108534 PARAMETER Experiment Name: Zm_4deg_Cold_P Parameter: Age (hr) Value: 8
  misc_feature: MA Experiment 108534 PARAMETER Experiment Name: Zm_4deg_Cold_P Parameter: Organism Value: Zea mays
  misc_feature: MA Experiment 108534 PARAMETER Experiment Name: Zm_4deg_Cold_P Parameter: Plant Line Value: 35A19
  misc_feature: MA Experiment 108534 PARAMETER Experiment Name: Zm_4deg_Cold_P Parameter: Temperature (deg C) Value: 4 vs. 22
  misc_feature: MA Experiment 108534 PARAMETER Experiment Name: Zm_4deg_Cold_P Parameter: Timepoint (hr) Value: 6
  misc_feature: MA Experiment 108534 PARAMETER Experiment Name: Zm_4deg_Cold_P Parameter: Tissue Value: Aerial
  misc_feature: MA Experiment ID: 108535 Result: Up-regulated in Transcription
  misc_feature: MA Experiment 108535 PARAMETER Experiment Name: Zm_Meristem_P Parameter: Age (day) Value: 8
  misc_feature: MA Experiment 108535 PARAMETER Experiment Name: Zm_Meristem_P Parameter: Organism Value: Zea mays
  misc_feature: MA Experiment 108535 PARAMETER Experiment Name: Zm_Meristem_P Parameter: Plant Line Value: 35A19
  misc_feature: MA Experiment 108535 PARAMETER Experiment Name: Zm_Meristem_P Parameter: Tissue Value: Root Meristem vs. Above Root Meristem
  misc_feature: MA Experiment ID: 108536 Result: Down-regulated in Transcription
  misc_feature: MA Experiment 108536 PARAMETER Experiment Name: Zm_Meristem_P Parameter: Age (day) Value: 8
  misc_feature: MA Experiment 108536 PARAMETER Experiment Name: Zm_Meristem_P Parameter: Organism Value: Zea mays
  misc_feature: MA Experiment 108536 PARAMETER Experiment Name: Zm_Meristem_P Parameter: Plant Line Value: 35A19
  misc_feature: MA Experiment 108536 PARAMETER Experiment Name: Zm_Meristem_P Parameter: Tissue Value: Shoot Meristem vs. Above Shoot Meristem
  misc_feature: MA Experiment ID: 108545 Result: Down-regulated in Transcription
  misc_feature: MA Experiment 108545 PARAMETER Experiment Name: Zm_Imbibed_Seeds_P Parameter: Age (day) Value: 3 vs. 2
  misc_feature: MA Experiment 108545 PARAMETER Experiment Name: Zm_Imbibed_Seeds_P Parameter: Organism Value: Zea mays
  misc_feature: MA Experiment 108545 PARAMETER Experiment Name: Zm_Imbibed_Seeds_P Parameter: Plant Line Value: 35A19
  misc_feature: MA Experiment 108545 PARAMETER Experiment Name: Zm_Imbibed_Seeds_P Parameter: Tissue Value: Aerial vs. Embryo
  misc_feature: MA Experiment ID: 108547 Result: Down-regulated in Transcription
  misc_feature: MA Experiment 108547 PARAMETER Experiment Name: Zm_Imbibed_Seeds_P Parameter: Age (day) Value: 4 vs. 2
  misc_feature: MA Experiment 108547 PARAMETER Experiment Name: Zm_Imbibed_Seeds_P Parameter: Organism Value: Zea mays
  misc_feature: MA Experiment 108547 PARAMETER Experiment Name: Zm_Imbibed_Seeds_P Parameter: Plant Line Value: 35A19
  misc_feature: MA Experiment 108547 PARAMETER Experiment Name: Zm_Imbibed_Seeds_P Parameter: Tissue Value: Aerial vs. Embryo
  misc_feature: MA Experiment ID: 20000488 Result: Down-regulated in Transcription
  misc_feature: MA Experiment 20000488 PARAMETER Experiment Name: Zm_50mM_NH4NO3_L_to_H_P Parameter: Organism Value: Zea mays
  misc_feature: MA Experiment 20000488 PARAMETER Experiment Name: Zm_50mM_NH4NO3_L_to_H_P Parameter: Timepoint (hr) Value: 8
  misc_feature: MA Experiment 20000488 PARAMETER Experiment Name: Zm_50mM_NH4NO3_L_to_H_P Parameter: Tissue Value: Leaves
  misc_feature: MA Experiment 20000488 PARAMETER Experiment Name: Zm_50mM_NH4NO3_L_to_H_P Parameter: Treatment Value: 50mM NH4NO3 vs. 100mM Mannitol
  misc_feature: MA Experiment ID: 20000492 Result: Down-regulated in Transcription
  misc_feature: MA Experiment 20000492 PARAMETER Experiment Name: Zm_Hybrid_Seed_Dev_P Parameter: DAP Value: 12
  misc_feature: MA Experiment 20000492 PARAMETER Experiment Name: Zm_Hybrid_Seed_Dev_P Parameter: Organism Value: Zea mays
  misc_feature: MA Experiment 20000492 PARAMETER Experiment Name: Zm_Hybrid_Seed_Dev_P Parameter: Plant Line Value: 35A19
  misc_feature: MA Experiment 20000492 PARAMETER Experiment Name: Zm_Hybrid_Seed_Dev_P Parameter: Tissue Value: Fert Kernel vs. Unfert Floret
  misc_feature: MA Experiment ID: 20000535 Result: Down-regulated in Transcription
  misc_feature: MA Experiment 20000535 PARAMETER Experiment Name: Zm_Hybrid_Seed_Dev_P Parameter: DAP Value: 30 vs. 12
  misc_feature: MA Experiment 20000535 PARAMETER Experiment Name: Zm_Hybrid_Seed_Dev_P Parameter: Organism Value: Zea mays
  misc_feature: MA Experiment 20000535 PARAMETER Experiment Name: Zm_Hybrid_Seed_Dev_P Parameter: Plant Line Value: 35A19
  misc_feature: MA Experiment 20000535 PARAMETER Experiment Name: Zm_Hybrid_Seed_Dev_P Parameter: Tissue Value: Embryo vs. Unfert Floret
  misc_feature: MA Experiment ID: 20000626 Result: Up-regulated in Transcription
  misc_feature: MA Experiment 20000626 PARAMETER Experiment Name: Zm_Herbicide-Treatments_P Parameter: Timepoint (hr) Value: 12
  misc_feature: MA Experiment 20000626 PARAMETER Experiment Name: Zm_Herbicide-Treatments_P Parameter: Tissue Value: Aerial
  misc_feature: MA Experiment 20000626 PARAMETER Experiment Name: Zm_Herbicide-Treatments_P Parameter: Treatment Value: Roundup vs. No Treatment
gcacgagaccattacctagaacatcctaatcgaaaaatttcattctttgtttgtttcagcctttcacggaagaggggcggagtacgtaaggtgaacccggtcgtctgaagagaagcgaggacgacgtaggagaggggaggacagcgagatggccggcgggtttggcagcggcggggcagccgccgggagggccgagctctacgagggcaagatcaccggctacttcatcctcgcttgcatcgtcggctccttcggcggatccctcttcggctatgacctcggagtctccagcggcgtgacttccatggacgacttcctggtgaagttcttcccggacgtgtaccggcggaagcaggcgcacctccacgagacggactactgcaagtacgacaaccaggtgctgacgctcttcacctcgtcgctctacttcgcgggcctcgtctccaccttcggcgcctcctacgtgaccaagcgccacggccggcgcgccagcatcatggtgggcgccgccagcttcttcctcggcggcgccatcaacgcggccgccatgaacatcgccatgctcatcgtcggccgcgtgctcctcggcgtcggcatcggcttcggcaaccaggccgtgccgctctacctctcggagatcgcgccctaccgcatccgcggcgccgtgaaccagctcttccagctcaccacctgcctcggcatcctcgtcgccgacgtcatcaactacttcaccgaccgcctgcacccctgggggtggcgcctctcgctgggcctcgccatgggcccggccaccgccatcttcgtcggcgcgctcttccttcccgagacgcccaacagcctcgtcgagcgcgggcacctggaggaggcccgccgcgtgctggagaaggtgcgcggcacgcacaaggtggacgccgagttcgaggacctcaaggaggccagccaggccgcgcgcgccgtcacgggcacgttccggaacctgctcgccgtgcgcaaccgcccgcagctcatcatcggcgcgctcggcatcccggcgttccagcagctgtcgggcatgaactccatcctcttctactcgcccgtcatcttccagagccttggattcggctcctccgcggcgctctactcctccatcatcaccggctccatgctcgtcgtcggcgcgctcatctccatggttaccgtcgaccgccttggccgccgcttcctcttcatcgaggcgggcattcagatggtctcatccatggtcgtggtggctgtgatccttgccctcaagttcggaaaaggcgaggagctgagcaagggcgtgagcacggtgctggtggtggccatctgcctcttcgtggtggcctacggatggtcctgggggcccctcggatggctggtgccgagcgagctgttcccgctggagatgcggtcggcggggcagagcgtggtggtgtgcgtcaacctcttctggacggcttccgtagcgcagtgcttcctcgccgcgctgtgccacctccggtggggcgtcttcgtgctcttcgccgcgctcatcgtcgtcatgtccatcttcgtcatcctcctgctgccggagaccaagcaggtgcccatcgaggagatatggatgctctttgacaggcactggtactggaagcgcatcgtccgcagggacccaaaataccagggcaacctccaccagcagcaggagatgtccagaatatgaacatggttaattagcgatgtggtttaataagttttctatccctaaacatataggatatgatgattactactagattattaagacgaatgtggtgtgatccttgatgcaatccaaagagg

SEQ ID NO: 13008 - protein, 518 aa, Zea mays subsp. mays
  peptide (1)..(518): Ceres Seq. ID no. 12593648
  misc_feature (29)..(489): Pfam Name: Sugar (and other) transporter Pfam Description: Sugar (and other) transporter
  misc_feature (1)..(499): Homolog of NCBI NO: 15223861 NR Description: sugar carrier protein, putative; protein id: [Arabidopsis thaliana] >gi|7446743|pir||T00450 probable
  misc_feature (1)..(499): Homolog of NCBI NO: 26453114 NR Description: unknown protein [Arabidopsis thaliana]
  misc_feature (1)..(499): Homolog of NCBI NO: 7446723 NR Description: probable monosaccharide transport protein Mst-1 -
  misc_feature (1)..(499): Homolog of NCBI NO: 15235215 NR Description: putative hexose transporter; protein id: [Arabidopsis thaliana] >gi|7446742|pir||T01506 probable hexose
  misc_feature (3)..(502): Homolog of NCBI NO: 347855 NR Description: glucose transporter [Saccharum hybrid cultivar
  misc_feature (1)..(515): Homolog of NCBI NO: 1723182 NR Description: Sugar carrier protein A >gi|7446730|pir||T10150
  misc_feature (6)..(499): Homolog of NCBI NO: 15240313 NR Description: hexose transporter - like protein; protein id: supported by cDNA: gi_15010579, supported by cDNA: gi_15450648, by cDNA: gi_9965738 [Arabidopsis thaliana]
  misc_feature (3)..(499): Homolog of NCBI NO: 5734440 NR Description: hexose transporter [Lycopersicon esculentum]
  misc_feature (3)..(502): Homolog of NCBI NO: 7446737 NR Description: hexose transport protein - tomato
  misc_feature (1)..(517): Homolog of NCBI NO: 100347 NR Description: monosaccharide transport protein MST1 - common >gi|19885|emb|CAA47324.1| monosaccharid transporter [Nicotiana
MAGGFGSGGAAAGRAELYEGKITGYFILACIVGSFGGSLFGYDLGVSSGVTSMDDFLVKFFPDVYRRKQAHLHETDYCKYDNQVLTLFTSSLYFAGLVSTFGASYVTKRHGRRASIMVGAASFFLGGAINAAAMNIAMLIVGRVLLGVGIGFGNQAVPLYLSEIAPYRIRGAVNQLFQLTTCLGILVADVINYFTDRLHPWGWRLSLGLAMGPATAIFVGALFLPETPNSLVERGHLEEARRVLEKVRGTHKVDAEFEDLKEASQAARAVTGTFRNLLAVRNRPQLIIGALGIPAFQQLSGMNSILFYSPVIFQSLGFGSSAALYSSIITGSMLVVGALISMVTVDRLGRRFLFIEAGIQMVSSMVVVAVILALKFGKGEELSKGVSTVLVVAICLFVVAYGWSWGPLGWLVPSELFPLEMRSAGQSVVVCVNLFWTASVAQCFLAALCHLRWGVFVLFAALIVVMSIFVILLLPETKQVPIEEIWMLFDRHWYWKRIVRRDPKYQGNLHQQQEMSRI

SEQ ID NO: 13009 - protein, 466 aa, Zea mays subsp. mays
  peptide (1)..(466): Ceres Seq. ID no. 12593649
  misc_feature (1)..(437): Pfam Name: Sugar (and other) transporter Pfam Description: Sugar (and other) transporter
  misc_feature (1)..(447): Homolog of NCBI NO: 15223861 NR Description: sugar carrier protein, putative; protein id: [Arabidopsis thaliana] >gi|7446743|pir||T00450 probable
  misc_feature (1)..(447): Homolog of NCBI NO: 26453114 NR Description: unknown protein [Arabidopsis thaliana]
  misc_feature (1)..(447): Homolog of NCBI NO: 7446723 NR Description: probable monosaccharide transport protein Mst-1 -
  misc_feature (1)..(447): Homolog of NCBI NO: 15235215 NR Description: putative hexose transporter; protein id: [Arabidopsis thaliana] >gi|7446742|pir||T01506 probable hexose
  misc_feature (1)..(450): Homolog of NCBI NO: 347855 NR Description: glucose transporter [Saccharum hybrid cultivar
  misc_feature (1)..(463): Homolog of NCBI NO: 1723182 NR Description: Sugar carrier protein A >gi|7446730|pir||T10150
  misc_feature (1)..(447): Homolog of NCBI NO: 15240313 NR Description: hexose transporter - like protein; protein id: supported by cDNA: gi_15010579, supported by cDNA: gi_15450648, by cDNA: gi_9965738 [Arabidopsis thaliana]
  misc_feature (1)..(447): Homolog of NCBI NO: 5734440 NR Description: hexose transporter [Lycopersicon esculentum]
  misc_feature (1)..(450): Homolog of NCBI NO: 7446737 NR Description: hexose transport protein - tomato
  misc_feature (1)..(465): Homolog of NCBI NO: 100347 NR Description: monosaccharide transport protein MST1 - common >gi|19885|emb|CAA47324.1| monosaccharid transporter [Nicotiana
MDDFLVKFFPDVYRRKQAHLHETDYCKYDNQVLTLFTSSLYFAGLVSTFGASYVTKRHGRRASIMVGAASFFLGGAINAAAMNIAMLIVGRVLLGVGIGFGNQAVPLYLSEIAPYRIRGAVNQLFQLTTCLGILVADVINYFTDRLHPWGWRLSLGLAMGPATAIFVGALFLPETPNSLVERGHLEEARRVLEKVRGTHKVDAEFEDLKEASQAARAVTGTFRNLLAVRNRPQLIIGALGIPAFQQLSGMNSILFYSPVIFQSLGFGSSAALYSSIITGSMLVVGALISMVTVDRLGRRFLFIEAGIQMVSSMVVVAVILALKFGKGEELSKGVSTVLVVAICLFVVAYGWSWGPLGWLVPSELFPLEMRSAGQSVVVCVNLFWTASVAQCFLAALCHLRWGVFVLFAALIVVMSIFVILLLPETKQVPIEEIWMLFDRHWYWKRIVRRDPKYQGNLHQQQEMSRI

SEQ ID NO: 13010 - protein, 402 aa, Zea mays subsp. mays
  peptide (1)..(402): Ceres Seq. ID no. 12593650
  misc_feature (1)..(373): Pfam Name: Sugar (and other) transporter Pfam Description: Sugar (and other) transporter
  misc_feature (1)..(383): Homolog of NCBI NO: 15223861 NR Description: sugar carrier protein, putative; protein id: [Arabidopsis thaliana] >gi|7446743|pir||T00450 probable
  misc_feature (1)..(383): Homolog of NCBI NO: 26453114 NR Description: unknown protein [Arabidopsis thaliana]
  misc_feature (1)..(383): Homolog of NCBI NO: 7446723 NR Description: probable monosaccharide transport protein Mst-1 -
  misc_feature (1)..(383): Homolog of NCBI NO: 15235215 NR Description: putative hexose transporter; protein id: [Arabidopsis thaliana] >gi|7446742|pir||T01506 probable hexose
  misc_feature (1)..(386): Homolog of NCBI NO: 347855 NR Description: glucose transporter [Saccharum hybrid cultivar
  misc_feature (1)..(399): Homolog of NCBI NO: 1723182 NR Description: Sugar carrier protein A >gi|7446730|pir||T10150
  misc_feature (1)..(383): Homolog of NCBI NO: 15240313 NR Description: hexose transporter - like protein; protein id: supported by cDNA: gi_15010579, supported by cDNA: gi_15450648, by cDNA: gi_9965738 [Arabidopsis thaliana]
  misc_feature (1)..(383): Homolog of NCBI NO: 5734440 NR Description: hexose transporter [Lycopersicon esculentum]
  misc_feature (1)..(386): Homolog of NCBI NO: 7446737 NR Description: hexose transport protein - tomato
  misc_feature (1)..(401): Homolog of NCBI NO: 100347 NR Description: monosaccharide transport protein MST1 - common >gi|19885|emb|CAA47324.1| monosaccharid transporter [Nicotiana
MVGAASFFLGGAINAAAMNIAMLIVGRVLLGVGIGFGNQAVPLYLSEIAPYRIRGAVNQLFQLTTCLGILVADVINYFTDRLHPWGWRLSLGLAMGPATAIFVGALFLPETPNSLVERGHLEEARRVLEKVRGTHKVDAEFEDLKEASQAARAVTGTFRNLLAVRNRPQLIIGALGIPAFQQLSGMNSILFYSPVIFQSLGFGSSAALYSSIITGSMLVVGALISMVTVDRLGRRFLFIEAGIQMVSSMVVVAVILALKFGKGEELSKGVSTVLVVAICLFVVAYGWSWGPLGWLVPSELFPLEMRSAGQSVVVCVNLFWTASVAQCFLAALCHLRWGVFVLFAALIVVMSIFVILLLPETKQVPIEEIWMLFDRHWYWKRIVRRDPKYQGNLHQQQEMSRI

SEQ ID NO: 13011 - DNA, 1457 bp, Zea mays subsp. mays
  misc_feature (1)..(1457): Ceres Seq. ID no. 12353525
  misc_feature: MA Experiment ID: 108527 Result: Down-regulated in Transcription
  misc_feature: MA Experiment 108527 PARAMETER Experiment Name: Zm_5mM_NO_P Parameter: Age (day) Value: 8
  misc_feature: MA Experiment 108527 PARAMETER Experiment Name: Zm_5mM_NO_P Parameter: Organism Value: Zea mays
  misc_feature: MA Experiment 108527 PARAMETER Experiment Name: Zm_5mM_NO_P Parameter: Plant Line Value: 35A19
  misc_feature: MA Experiment 108527 PARAMETER Experiment Name: Zm_5mM_NO_P Parameter: Timepoint (hr) Value: 6
  misc_feature: MA Experiment 108527 PARAMETER Experiment Name: Zm_5mM_NO_P Parameter: Tissue Value: Aerial
  misc_feature: MA Experiment 108527 PARAMETER Experiment Name: Zm_5mM_NO_P Parameter: Treatment Value: 5mM NO vs. No Treatment
  misc_feature: MA Experiment ID: 108528 Result: Up-regulated in Transcription
  misc_feature: MA Experiment 108528 PARAMETER Experiment Name: Zm_Imbibed_Seeds_P Parameter: Age (day) Value: 5 vs. 2
  misc_feature: MA Experiment 108528 PARAMETER Experiment Name: Zm_Imbibed_Seeds_P Parameter: Organism Value: Zea mays
  misc_feature: MA Experiment 108528 PARAMETER Experiment Name: Zm_Imbibed_Seeds_P Parameter: Plant Line Value: 35A19
  misc_feature: MA Experiment 108528 PARAMETER Experiment Name: Zm_Imbibed_Seeds_P Parameter: Tissue Value: Aerial vs. Embryo
  misc_feature: MA Experiment ID: 108530 Result: Up-regulated in Transcription
  misc_feature: MA Experiment 108530 PARAMETER Experiment Name: Zm_Imbibed_Seeds_P Parameter: Age (day) Value: 6 vs. 2
  misc_feature: MA Experiment 108530 PARAMETER Experiment Name: Zm_Imbibed_Seeds_P Parameter: Organism Value: Zea mays
  misc_feature: MA Experiment 108530 PARAMETER Experiment Name: Zm_Imbibed_Seeds_P Parameter: Plant Line Value: 35A19
  misc_feature: MA Experiment 108530 PARAMETER Experiment Name: Zm_Imbibed_Seeds_P Parameter: Tissue Value: Aerial vs. Embryo
  misc_feature: MA Experiment ID: 108535 Result: Down-regulated in Transcription
  misc_feature: MA Experiment 108535 PARAMETER Experiment Name: Zm_Meristem_P Parameter: Age (day) Value: 8
  misc_feature: MA Experiment 108535 PARAMETER Experiment Name: Zm_Meristem_P Parameter: Organism Value: Zea mays
  misc_feature: MA Experiment 108535 PARAMETER Experiment Name: Zm_Meristem_P Parameter: Plant Line Value: 35A19
  misc_feature: MA Experiment 108535 PARAMETER Experiment Name: Zm_Meristem_P Parameter: Tissue Value: Root Meristem vs. Above Root Meristem
  misc_feature: MA Experiment ID: 108536 Result: Up-regulated in Transcription
  misc_feature: MA Experiment 108536 PARAMETER Experiment Name: Zm_Meristem_P Parameter: Age (day) Value: 8
  misc_feature: MA Experiment 108536 PARAMETER Experiment Name: Zm_Meristem_P Parameter: Organism Value: Zea mays
  misc_feature: MA Experiment 108536 PARAMETER Experiment Name: Zm_Meristem_P Parameter: Plant Line Value: 35A19
  misc_feature: MA Experiment 108536 PARAMETER Experiment Name: Zm_Meristem_P Parameter: Tissue Value: Shoot Meristem vs. Above Shoot Meristem
  misc_feature: MA Experiment ID: 108543 Result: Up-regulated in Transcription
  misc_feature: MA Experiment ID: 108547 Result: Up-regulated in Transcription
  misc_feature: MA Experiment 108547 PARAMETER Experiment Name: Zm_Imbibed_Seeds_P Parameter: Age (day) Value: 4 vs. 2
  misc_feature: MA Experiment 108547 PARAMETER Experiment Name: Zm_Imbibed_Seeds_P Parameter: Organism Value: Zea mays
  misc_feature: MA Experiment 108547 PARAMETER Experiment Name: Zm_Imbibed_Seeds_P Parameter: Plant Line Value: 35A19
  misc_feature: MA Experiment 108547 PARAMETER Experiment Name: Zm_Imbibed_Seeds_P Parameter: Tissue Value: Aerial vs. Embryo
  misc_feature: MA Experiment ID: 108687 Result: Down-regulated in Transcription
  misc_feature: MA Experiment 108687 PARAMETER Experiment Name: Zm_Embryos-Flowers__P Parameter: Tissue Value: Embryo vs. Aerial+
  misc_feature: MA Experiment ID: 108688 Result: Down-regulated in Transcription
  misc_feature: MA Experiment 108688 PARAMETER Experiment Name: Zm_Embryos-Flowers__P Parameter: Tissue Value: Immature Flowers vs. Aerial+
  misc_feature: MA Experiment ID: 20000492 Result: Down-regulated in Transcription
  misc_feature: MA Experiment 20000492 PARAMETER Experiment Name: Zm_Hybrid_Seed_Dev_P Parameter: DAP Value: 12
  misc_feature: MA Experiment 20000492 PARAMETER Experiment Name: Zm_Hybrid_Seed_Dev_P Parameter: Organism Value: Zea mays
  misc_feature: MA Experiment 20000492 PARAMETER Experiment Name: Zm_Hybrid_Seed_Dev_P Parameter: Plant Line Value: 35A19
  misc_feature: MA Experiment 20000492 PARAMETER Experiment Name: Zm_Hybrid_Seed_Dev_P Parameter: Tissue Value: Fert Kernel vs. Unfert Floret
  misc_feature: MA Experiment ID: 20000535 Result: Down-regulated in Transcription
  misc_feature: MA Experiment 20000535 PARAMETER Experiment Name: Zm_Hybrid_Seed_Dev_P Parameter: DAP Value: 30 vs. 12
  misc_feature: MA Experiment 20000535 PARAMETER Experiment Name: Zm_Hybrid_Seed_Dev_P Parameter: Organism Value: Zea mays
  misc_feature: MA Experiment 20000535 PARAMETER Experiment Name: Zm_Hybrid_Seed_Dev_P Parameter: Plant Line Value: 35A19
  misc_feature: MA Experiment 20000535 PARAMETER Experiment Name: Zm_Hybrid_Seed_Dev_P Parameter: Tissue Value: Embryo vs. Unfert Floret
gccgtggagtagaggagcacaagtgagctagctagctctagctaggccacgcactgctgcctccttcatcatcaggtcgtgctagctagctagctatagctgggccgggggacgtacgacatcagcgcgcggccatgggcgtggggaagctgatgaacgacgtgaagccatacctggcgatggtgctgctgcaggtggggttctccgggatgtacatcgtctccgtcgcctccctcaagcgcggcatgaaccacttcgtcctcgtcgtctaccgcaacctcgtcgccaccgtcgtcatggcccccttcgccctcctcttcgagaggcgagtgaggcccaagatgacgccgctcatcttcctcaagatcatggggctcgccgtgctcgagcctgtgctcgaccagaacatgtactacctcggcgcgaagctgacgtccgcgaccttcgcctcagcgctggtcaacatcctccccgccatcacgttcctgctggccctcgccctgaggatggagaggctgaggctccggagcctccgcagccaggccaaggtggtcggcacggtctgcaccgtcgccggcgccgtgctgatgatcctctaccacggcccggtggtgccgttcccgtggtccgcgggtcgtcttcaccaccacgtccccgcggcggcggtggagagccagagcagcgcctcctggctcaacggcatctgcatgatcatcggcagctgcctgtgctggtccggcttcttcatcctccagtcgaacacgctgcagagctaccctgcggagctgacgctgacgactctgatctgcttcctgggctcggtgctgaccggcggcgtggcgctcgtggcggagcgccgcgacatgagcgcctgggtcattggcttcgacacccgcctcttcaccgccgtctactccgggatcgtgtgctccggcgtggccttctacgtgcaggggatcgtgacgcaggcgcgcgggccggtgttcgtgacggcgttccagcccctgtgcatgatcatcaccacggttcttggctccaccatactgaaagaggagaccaccctgggaagcgtgattggcgcggcgatcatagtggtggggctctactgcctcatctggggcaagagcaaggaccacctcggcagcaacggcggcaagcccggcgccgcggccgtcgccgagctgcccctgacctcgtcggctcctgcttggtccaacggcaagcaagctctggccgtcgtcgagacgacaccgccttcgtctttgcccaacaagtgcgttcactgacgcgcggatcggagctccatgcatgatgcggaccgtacaccaccgcacactactagtagtgcattgccagtgactgtaagccgccggccgtgtatgatcatgcatgcataccgtcataccgatatgatgtcccatactcccatcgttgcgtttaacactctcgagtttttg

SEQ ID NO: 13012 - protein, 383 aa, Zea mays subsp. mays
  peptide (1)..(383): Ceres Seq. ID no. 12353526
  misc_feature (199)..(328): Pfam Name: Integral membrane protein DUF6 Pfam Description: Integral membrane protein DUF6
  misc_feature (2)..(356): Homolog of NCBI NO: 15236455 NR Description: nodulin-like protein; protein id: At4g08290.1, by cDNA: 40485. [Arabidopsis thaliana] >gi|7486869|pir||T10556
  misc_feature (7)..(356): Homolog of NCBI NO: 21593603 NR Description: nodulin-like protein [Arabidopsis thaliana]
  misc_feature (14)..(66): Homolog of NCBI NO: 37532392 NR Description: putative nodulin-like protein [Oryza sativa
  misc_feature (1)..(333): Homolog of NCBI NO: 17529004 NR Description: putative nodulin protein [Arabidopsis thaliana]
  misc_feature (7)..(354): Homolog of NCBI NO: 21553533 NR Description: nodulin protein, putative [Arabidopsis thaliana]
  misc_feature (4)..(354): Homolog of NCBI NO: 15219448 NR Description: nodulin protein, putative; protein id: supported by cDNA: 149985., supported by cDNA: gi_15146329
  misc_feature (1)..(333): Homolog of NCBI NO: 6552743 NR Description: T26F17.11 [Arabidopsis thaliana]
  misc_feature (1)..(333): Homolog of NCBI NO: 15219123 NR Description: nodulin-like protein; protein id: At1g21890.1,
  misc_feature (86)..(334): Homolog of NCBI NO: 37532392 NR Description: putative nodulin-like protein [Oryza sativa
  misc_feature (4)..(362): Homolog of NCBI NO: 30680708 NR Description: nodulin MtN21 family protein [Arabidopsis
MGVGKLMNDVKPYLAMVLLQVGFSGMYIVSVASLKRGMNHFVLVVYRNLVATVVMAPFALLFERRVRPKMTPLIFLKIMGLAVLEPVLDQNMYYLGAKLTSATFASALVNILPAITFLLALALRMERLRLRSLRSQAKVVGTVCTVAGAVLMILYHGPVVPFPWSAGRLHHHVPAAAVESQSSASWLNGICMIIGSCLCWSGFFILQSNTLQSYPAELTLTTLICFLGSVLTGGVALVAERRDMSAWVIGFDTRLFTAVYSGIVCSGVAFYVQGIVTQARGPVFVTAFQPLCMIITTVLGSTILKEETTLGSVIGAAIIVVGLYCLIWGKSKDHLGSNGGKPGAAAVAELPLTSSAPAWSNGKQALAVVETTPPSSLPNKCVH

SEQ ID NO: 13013 - protein, 377 aa, Zea mays subsp. mays
  peptide (1)..(377): Ceres Seq. ID no. 12353527
  misc_feature (193)..(322): Pfam Name: Integral membrane protein DUF6 Pfam Description: Integral membrane protein DUF6
  misc_feature (80)..(328): Homolog of NCBI NO: 37532392 NR Description: putative nodulin-like protein [Oryza sativa
  misc_feature (8)..(60): Homolog of NCBI NO: 37532392 NR Description: putative nodulin-like protein [Oryza sativa
  misc_feature (1)..(327): Homolog of NCBI NO: 15219123 NR Description: nodulin-like protein; protein id: At1g21890.1,
  misc_feature (1)..(327): Homolog of NCBI NO: 17529004 NR Description: putative nodulin protein [Arabidopsis thaliana]
  misc_feature (1)..(327): Homolog of NCBI NO: 6552743 NR Description: T26F17.11 [Arabidopsis thaliana]
  misc_feature (1)..(348): Homolog of NCBI NO: 21553533 NR Description: nodulin protein, putative [Arabidopsis thaliana]
  misc_feature (1)..(348): Homolog of NCBI NO: 15219448 NR Description: nodulin protein, putative; protein id: supported by cDNA: 149985., supported by cDNA: gi_15146329
  misc_feature (1)..(350): Homolog of NCBI NO: 15236455 NR Description: nodulin-like protein; protein id: At4g08290.1, by cDNA: 40485. [Arabidopsis thaliana] >gi|7486869|pir||T10556
  misc_feature (1)..(350): Homolog of NCBI NO: 21593603 NR Description: nodulin-like protein [Arabidopsis thaliana]
  misc_feature (1)..(356): Homolog of NCBI NO: 30680708 NR Description: nodulin MtN21 family protein [Arabidopsis
MNDVKPYLAMVLLQVGFSGMYIVSVASLKRGMNHFVLVVYRNLVATVVMAPFALLFERRVRPKMTPLIFLKIMGLAVLEPVLDQNMYYLGAKLTSATFASALVNILPAITFLLALALRMERLRLRSLRSQAKVVGTVCTVAGAVLMILYHGPVVPFPWSAGRLHHHVPAAAVESQSSASWLNGICMIIGSCLCWSGFFILQSNTLQSYPAELTLTTLICFLGSVLTGGVALVAERRDMSAWVIGFDTRLFTAVYSGIVCSGVAFYVQGIVTQARGPVFVTAFQPLCMIITTVLGSTILKEETTLGSVIGAAIIVVGLYCLIWGKSKDHLGSNGGKPGAAAVAELPLTSSAPAWSNGKQALAVVETTPPSSLPNKCVH

SEQ ID NO: 13014 - protein, 368 aa, Zea mays subsp. mays
  peptide (1)..(368): Ceres Seq. ID no. 12353528
  misc_feature (184)..(313): Pfam Name: Integral membrane protein DUF6 Pfam Description: Integral membrane protein DUF6
  misc_feature (71)..(319): Homolog of NCBI NO: 37532392 NR Description: putative nodulin-like protein [Oryza sativa
  misc_feature (1)..(51): Homolog of NCBI NO: 37532392 NR Description: putative nodulin-like protein [Oryza sativa
  misc_feature (1)..(318): Homolog of NCBI NO: 15219123 NR Description: nodulin-like protein; protein id: At1g21890.1,
  misc_feature (1)..(318): Homolog of NCBI NO: 17529004 NR Description: putative nodulin protein [Arabidopsis thaliana]
  misc_feature (1)..(318): Homolog of NCBI NO: 6552743 NR Description: T26F17.11 [Arabidopsis thaliana]
  misc_feature (1)..(339): Homolog of NCBI NO: 21553533 NR Description: nodulin protein, putative [Arabidopsis thaliana]
  misc_feature (1)..(339): Homolog of NCBI NO: 15219448 NR Description: nodulin protein, putative; protein id: supported by cDNA: 149985., supported by cDNA: gi_15146329
  misc_feature (1)..(341): Homolog of NCBI NO: 15236455 NR Description: nodulin-like protein; protein id: At4g08290.1, by cDNA: 40485. [Arabidopsis thaliana] >gi|7486869|pir||T10556
  misc_feature (1)..(341): Homolog of NCBI NO: 21593603 NR Description: nodulin-like protein [Arabidopsis thaliana]
  misc_feature (1)..(347): Homolog of NCBI NO: 30680708 NR Description: nodulin MtN21 family protein [Arabidopsis
MVLLQVGFSGMYIVSVASLKRGMNHFVLVVYRNLVATVVMAPFALLFERRVRPKMTPLIFLKIMGLAVLEPVLDQNMYYLGAKLTSATFASALVNILPAITFLLALALRMERLRLRSLRSQAKVVGTVCTVAGAVLMILYHGPVVPFPWSAGRLHHHVPAAAVESQSSASWLNGICMIIGSCLCWSGFFILQSNTLQSYPAELTLTTLICFLGSVLTGGVALVAERRDMSAWVIGFDTRLFTAVYSGIVCSGVAFYVQGIVTQARGPVFVTAFQPLCMIITTVLGSTILKEETTLGSVIGAAIIVVGLYCLIWGKSKDHLGSNGGKPGAAAVAELPLTSSAPAWSNGKQALAVVETTPPSSLPNKCVH

SEQ ID NO: 13015 - DNA, 1641 bp, Zea mays subsp. mays
  misc_feature (1)..(1641): Ceres Seq. ID no. 12365124
  misc_feature: MA Experiment ID: 108515 Result: Up-regulated in Transcription
  misc_feature: MA Experiment 108515 PARAMETER Experiment Name: Zm_2mM_SA_P Parameter: Age (day) Value: 8
  misc_feature: MA Experiment 108515 PARAMETER Experiment Name: Zm_2mM_SA_P Parameter: Organism Value: Zea mays
  misc_feature: MA Experiment 108515 PARAMETER Experiment Name: Zm_2mM_SA_P Parameter: Plant Line Value: 35A19
  misc_feature: MA Experiment 108515 PARAMETER Experiment Name: Zm_2mM_SA_P Parameter: Timepoint (hr) Value: 12
  misc_feature: MA Experiment 108515 PARAMETER Experiment Name: Zm_2mM_SA_P Parameter: Tissue Value: Aerial
  misc_feature: MA Experiment 108515 PARAMETER Experiment Name: Zm_2mM_SA_P Parameter: Treatment Value: 2mM SA vs. No Treatment
  misc_feature: MA Experiment ID: 108535 Result: Down-regulated in Transcription
  misc_feature: MA Experiment 108535 PARAMETER Experiment Name: Zm_Meristem_P Parameter: Age (day) Value: 8
  misc_feature: MA Experiment 108535 PARAMETER Experiment Name: Zm_Meristem_P Parameter: Organism Value: Zea mays
  misc_feature: MA Experiment 108535 PARAMETER Experiment Name: Zm_Meristem_P Parameter: Plant Line Value: 35A19
  misc_feature: MA Experiment 108535 PARAMETER Experiment Name: Zm_Meristem_P Parameter: Tissue Value: Root Meristem vs. Above Root Meristem
  misc_feature: MA Experiment ID: 108543 Result: Down-regulated in Transcription
  misc_feature: MA Experiment ID: 108546 Result: Down-regulated in Transcription
  misc_feature: MA Experiment 108546 PARAMETER Experiment Name: Zm_Imbibed_Seeds_P Parameter: Age (day) Value: 3 vs. 2
  misc_feature: MA Experiment 108546 PARAMETER Experiment Name: Zm_Imbibed_Seeds_P Parameter: Organism Value: Zea mays
  misc_feature: MA Experiment 108546 PARAMETER Experiment Name: Zm_Imbibed_Seeds_P Parameter: Plant Line Value: 35A19
  misc_feature: MA Experiment 108546 PARAMETER Experiment Name: Zm_Imbibed_Seeds_P Parameter: Tissue Value: Roots vs. Embryo
  misc_feature: MA Experiment ID: 108547 Result: Up-regulated in Transcription
  misc_feature: MA Experiment 108547 PARAMETER Experiment Name: Zm_Imbibed_Seeds_P Parameter: Age (day) Value: 4 vs. 2
  misc_feature: MA Experiment 108547 PARAMETER Experiment Name: Zm_Imbibed_Seeds_P Parameter: Organism Value: Zea mays
  misc_feature: MA Experiment 108547 PARAMETER Experiment Name: Zm_Imbibed_Seeds_P Parameter: Plant Line Value: 35A19
  misc_feature: MA Experiment 108547 PARAMETER Experiment Name: Zm_Imbibed_Seeds_P Parameter: Tissue Value: Aerial vs. Embryo
  misc_feature: MA Experiment ID: 108559 Result: Up-regulated in Transcription
  misc_feature: MA Experiment 108559 PARAMETER Experiment Name: Zm_5mM_NO_P Parameter: Age (day) Value: 8
  misc_feature: MA Experiment 108559 PARAMETER Experiment Name: Zm_5mM_NO_P Parameter: Organism Value: Zea mays
  misc_feature: MA Experiment 108559 PARAMETER Experiment Name: Zm_5mM_NO_P Parameter: Plant Line Value: 35A19
  misc_feature: MA Experiment 108559 PARAMETER Experiment Name: Zm_5mM_NO_P Parameter: Timepoint (hr) Value: 12
  misc_feature: MA Experiment 108559 PARAMETER Experiment Name: Zm_5mM_NO_P Parameter: Tissue Value: Aerial
  misc_feature: MA Experiment 108559 PARAMETER Experiment Name: Zm_5mM_NO_P Parameter: Treatment Value: 5mM NO vs. No Treatment
  misc_feature: MA Experiment ID: 20000478 Result: Up-regulated in Transcription
  misc_feature: MA Experiment 20000478 PARAMETER Experiment Name: Zm_5mM_SA_P Parameter: Age (day) Value: 11
  misc_feature: MA Experiment 20000478 PARAMETER Experiment Name: Zm_5mM_SA_P Parameter: Organism Value: Zea mays
  misc_feature: MA Experiment 20000478 PARAMETER Experiment Name: Zm_5mM_SA_P Parameter: Plant Line Value: 35A19
  misc_feature: MA Experiment 20000478 PARAMETER Experiment Name: Zm_5mM_SA_P Parameter: Timepoint (hr) Value: 72
  misc_feature: MA Experiment 20000478 PARAMETER Experiment Name: Zm_5mM_SA_P Parameter: Tissue Value: Aerial
  misc_feature: MA Experiment 20000478 PARAMETER Experiment Name: Zm_5mM_SA_P Parameter: Treatment Value: 5mM SA vs. No Treatment
  misc_feature: MA Experiment ID: 20000626 Result: Up-regulated in Transcription
  misc_feature: MA Experiment 20000626 PARAMETER Experiment Name: Zm_Herbicide-Treatments_P Parameter: Timepoint (hr) Value: 12
  misc_feature: MA Experiment 20000626 PARAMETER Experiment Name: Zm_Herbicide-Treatments_P Parameter: Tissue Value: Aerial
  misc_feature: MA Experiment 20000626 PARAMETER Experiment Name: Zm_Herbicide-Treatments_P Parameter: Treatment Value: Roundup vs. No Treatment
aacacggccacaccccgacaccggcatggccacatccctttcccttaaatagacgccatcgccgccgagccgcgcattgggatcgtgcggcaatggcggcggcggcggcggcgcacgtgctggtgttcccggcccctgcgcagggccacctcaacagtttcctccacttctccacggggctcctccgcgcgggcctccacgtcaccttcctgcacaccgaccacaacctccgccgcctcggtactgctgccgccgaggctacggtcgcctcgccgcgtctccgcttcctatccgtgcccgacggcctccccgacgacgacccgcgcaccgtcgacggcctcccggagctcatggagtccctgcgcaccaaggccagcgcctcgtaccgcgcactgctcgcctcgctgcgcgcgggaggcggaggcttcccgccggtgacgtgcgtcgttgccgacggcataatgccgttcgtggtcgacgtcgcagaggagcttggagtcccggcgatctccttccgtacggtgagcgcgtgcgcggtcctggcgtacctgtccgtgcccaagctcatcgccctcggcgagctccccttccccaaaggtggcgacctcgacgcgcccatccgcggcgtcccggggatggagagcttcctgcgtcgacgagacctcccgatccagttccgccagctcaccagcacgtacgaggagcccttggtagcgggcggtggtcgcggccaccgtgcacagctgctgcaaggccagagctctcatcgtcaacacgaccacgtccctggagaggtcatccctcgggcacctcacgcaggagatgcgcgacgtattcgccgtcgggcctctgcacgccatgtcccccgcgccggcggtggcctcgagcctgtggcgccccgacgacgggtgcatggcgtggctcgacaaccagcaggcggagcgggccgtggtgtacatcagcctgggtagcctcgccgtcatctcccacgagcagttcaccgagttcctgcacgggctcgtcgccaccggctacccgttcctctgggtgctccggccggatatgctcgtggccagccaggacgccgcgctccgggaagccatcggcgcggtcgggaaagacagggcgtgcgtcgtncngtgggtgccgcagcgagacgtgctgcggcaccgcgccgtggggtgctttctgacgcacagcgggtggaactcgacgatggagggcatcgtcgagggcgtgcccatggtgtgctggcccttcttcgccgaccagcagatcaacagccgcttcgtaggcgccgtgtggaggaacgggctggacatgaaggacgtgtgcgacagagttgtggtggagagcacggtgagggaagcaatggagtccgaagagatcaggaggtcggttcatgctctggcggagcaggtgaagcgtgacgtcgccgacgacggggcatcggcgttggaattcaagcgcctcatcagcttcatcacggagctcagcacgtcagcagcacagggaaccccatcttcaaaatcgtgaagtgaatgaatgaatcgaaagtaaacttgatagatacgcaccggattcaacaaccggctgaggggtgttttggaatgttatttttgaaggaatttctattttctc

SEQ ID NO: 13016 - protein, 322 aa, Zea mays subsp. mays
  peptide (1)..(322): Ceres Seq. ID no. 12365125
  misc_feature (37)..(258): Pfam Name: UDP-glucoronosyl and UDP-glucosyl transferase Pfam Description: UDP-glucoronosyl and UDP-glucosyl transferase
  misc_feature (35)..(237): Homolog of NCBI NO: 34394122 NR Description: putative UDP-glucose glucosyltransferase [Oryza
  misc_feature (33)..(242): Homolog of NCBI NO: 33146987 NR Description: putative glucosyltransferase-2 [Oryza sativa
  misc_feature (34)..(227): Homolog of NCBI NO: 33146994 NR Description: putative glucosyltransferase-2 [Oryza sativa
  misc_feature (113)..(222): Homolog of NCBI NO: 33146981 NR Description: putative glucosyltransferase-12 [Oryza sativa
  misc_feature (7)..(258): Homolog of NCBI NO: 34900792 NR Description: glucosyltransferase-2-like protein [Oryza sativa
  misc_feature (32)..(133): Homolog of NCBI NO: 33146981 NR Description: putative glucosyltransferase-12 [Oryza sativa
  misc_feature (34)..(236): Homolog of NCBI NO: 19911187 NR Description: glucosyltransferase-2 [Vigna angularis]
  misc_feature (38)..(222): Homolog of NCBI NO: 38344776 NR Description: OSJNBb0026L04.7 [Oryza sativa (japonica
  misc_feature (38)..(222): Homolog of NCBI NO: 38569139 NR Description: OSJNBb0033P05.7 [Oryza sativa (japonica
  misc_feature (30)..(268): Homolog of NCBI NO: 25286821 NR Description: T16E15.2 protein - Arabidopsis thaliana
HGHTPTPAWPHPFPLNRRHRRRAAHWDRAAMAAAAAAHVLVFPAPAQGHLNSFLHFSTGLLRAGLHVTFLHTDHNLRRLGTAAAEATVASPRLRFLSVPDGLPDDDPRTVDGLPELMESLRTKASASYRALLASLRAGGGGFPPVTCVVADGIMPFVVDVAEELGVPAISFRTVSACAVLAYLSVPKLIALGELPFPKGGDLDAPIRGVPGMESFLRRRDLPIQFRQLTSTYEEPLVAGGGRGHRAQLLQGQSSHRQHDHVPGEVIPRAPHAGDARRIRRRASARHVPRAGGGLEPVAPRRRVHGVARQPAGGAGRGVHQPG

SEQ ID NO: 13017 - protein, 292 aa, Zea mays subsp. mays
  peptide (1)..(292): Ceres Seq. ID no. 12365126
  misc_feature (7)..(228): Pfam Name: UDP-glucoronosyl and UDP-glucosyl transferase Pfam Description: UDP-glucoronosyl and UDP-glucosyl transferase
  misc_feature (5)..(207): Homolog of NCBI NO: 34394122 NR Description: putative UDP-glucose glucosyltransferase [Oryza
  misc_feature (3)..(212): Homolog of NCBI NO: 33146987 NR Description: putative glucosyltransferase-2 [Oryza sativa
  misc_feature (4)..(197): Homolog of NCBI NO: 33146994 NR Description: putative glucosyltransferase-2 [Oryza sativa
  misc_feature (83)..(192): Homolog of NCBI NO: 33146981 NR Description: putative glucosyltransferase-12 [Oryza sativa
  misc_feature (1)..(228): Homolog of NCBI NO: 34900792 NR Description: glucosyltransferase-2-like protein [Oryza sativa
  misc_feature (2)..(103): Homolog of NCBI NO: 33146981 NR Description: putative glucosyltransferase-12 [Oryza sativa
  misc_feature (4)..(206): Homolog of NCBI NO: 19911187 NR Description: glucosyltransferase-2 [Vigna angularis]
  misc_feature (8)..(192): Homolog of NCBI NO: 38344776 NR Description: OSJNBb0026L04.7 [Oryza sativa (japonica
  misc_feature (8)..(192): Homolog of NCBI NO: 38569139 NR Description: OSJNBb0033P05.7 [Oryza sativa (japonica
  misc_feature (1)..(238): Homolog of NCBI NO: 25286821 NR Description: T16E15.2 protein - Arabidopsis thaliana
MAAAAAAHVLVFPAPAQGHLNSFLHFSTGLLRAGLHVTFLHTDHNLRRLGTAAAEATVASPRLRFLSVPDGLPDDDPRTVDGLPELMESLRTKASASYRALLASLRAGGGGFPPVTCVVADGIMPFVVDVAEELGVPAISFRTVSACAVLAYLSVPKLIALGELPFPKGGDLDAPIRGVPGMESFLRRRDLPIQFRQLTSTYEEPLVAGGGRGHRAQLLQGQSSHRQHDHVPGEVIPRAPHAGDARRIRRRASARHVPRAGGGLEPVAPRRRVHGVARQPAGGAGRGVHQPG

SEQ ID NO: 13018 - protein, 237 aa, Zea mays subsp. mays
  peptide (1)..(237): Ceres Seq. ID no. 12365127
  misc_feature (1)..(225): Pfam Name: UDP-glucoronosyl and UDP-glucosyl transferase Pfam Description: UDP-glucoronosyl and UDP-glucosyl transferase
  misc_feature (1)..(231): Homolog of NCBI NO: 34394122 NR Description: putative UDP-glucose glucosyltransferase [Oryza
  misc_feature (1)..(226): Homolog of NCBI NO: 33146987 NR Description: putative glucosyltransferase-2 [Oryza sativa
  misc_feature (1)..(226): Homolog of NCBI NO: 33146994 NR Description: putative glucosyltransferase-2 [Oryza sativa
  misc_feature (1)..(229): Homolog of NCBI NO: 33146981 NR Description: putative glucosyltransferase-12 [Oryza sativa
  misc_feature (1)..(225): Homolog of NCBI NO: 34900792 NR Description: glucosyltransferase-2-like protein [Oryza sativa
  misc_feature (1)..(228): Homolog of NCBI NO: 28564775 NR Description: putative glucosyltransferase-2 [Oryza sativa
  misc_feature (1)..(225): Homolog of NCBI NO: 28564779 NR Description: putative glucosyltransferase-2 [Oryza sativa
  misc_feature (1)..(225): Homolog of NCBI NO: 19911187 NR Description: glucosyltransferase-2 [Vigna angularis]
  misc_feature (1)..(218): Homolog of NCBI NO: 38344776 NR Description: OSJNBb0026L04.7 [Oryza sativa (japonica
  misc_feature (1)..(218): Homolog of NCBI NO: 38569139 NR Description: OSJNBb0033P05.7 [Oryza sativa (japonica
  misc_feature (105)..(105): Xaa is any aa, unknown or other
  misc_feature (106)..(106): Xaa is any aa, unknown or other
MRDVFAVGPLHAMSPAPAVASSLWRPDDGCMAWLDNQQAERAVVYISLGSLAVISHEQFTEFLHGLVATGYPFLWVLRPDMLVASQDAALREAIGAVGKDRACVXXWVPQRDVLRHRAVGCFLTHSGWNSTMEGIVEGVPMVCWPFFADQQINSRFVGAVWRNGLDMKDVCDRVVVESTVREAMESEEIRRSVHALAEQVKRDVADDGASALEFKRLISFITELSTSAAQGTPSSKS

SEQ ID NO: 13019 - DNA, 1448 bp, Zea mays subsp. mays; identical to SEQ ID NO: 3555
  misc_feature (1)..(1448): Ceres Seq. ID no. 12343332
  misc_feature: MA Experiment ID: 108559 Result: Up-regulated in Transcription
  misc_feature: MA Experiment 108559 PARAMETER Experiment Name: Zm_5mM_NO_P Parameter: Age (day) Value: 8
  misc_feature: MA Experiment 108559 PARAMETER Experiment Name: Zm_5mM_NO_P Parameter: Organism Value: Zea mays
  misc_feature: MA Experiment 108559 PARAMETER Experiment Name: Zm_5mM_NO_P Parameter: Plant Line Value: 35A19
  misc_feature: MA Experiment 108559 PARAMETER Experiment Name: Zm_5mM_NO_P Parameter: Timepoint (hr) Value: 12
  misc_feature: MA Experiment 108559 PARAMETER Experiment Name: Zm_5mM_NO_P Parameter: Tissue Value: Aerial
  misc_feature: MA Experiment 108559 PARAMETER Experiment Name: Zm_5mM_NO_P Parameter: Treatment Value: 5mM NO vs. No Treatment
  misc_feature: MA Experiment ID: 20000633 Result: Down-regulated in Transcription
  misc_feature: MA Experiment 20000633 PARAMETER Experiment Name: Zm_Herbicide-Treatments_P Parameter: Timepoint (hr) Value: 4
  misc_feature: MA Experiment 20000633 PARAMETER Experiment Name: Zm_Herbicide-Treatments_P Parameter: Tissue Value: Aerial
  misc_feature: MA Experiment 20000633 PARAMETER Experiment Name: Zm_Herbicide-Treatments_P Parameter: Treatment Value: Trimec vs. No Treatment

SEQ ID NO: 13020 - protein, 388 aa, Zea mays subsp. mays; identical to SEQ ID NO: 3556
  peptide (1)..(388): Ceres Seq. ID no. 12343333
  misc_feature (253)..(357): Pfam Name: PCI domain Pfam Description: PCI domain
  misc_feature (1)..(388): Homolog of NCBI NO: 20978545 NR Description: 26S proteasome non-ATPase regulatory subunit 6
  misc_feature (1)..(388): Homolog of NCBI NO: 18416433 NR Description: 26S proteasome regulatory subunit (RPN7), protein id: At4g24820.1, supported by cDNA: 38927., supported by gi_15450839, supported by cDNA: gi_20259841 [Arabidopsis
  misc_feature (1)..(274): Homolog of NCBI NO: 7484780 NR Description: 26S proteasome regulatory particle chain RPN7
  misc_feature (157)..(388): Homolog of NCBI NO: 2982297 NR Description: KIAA0107-like protein [Picea mariana]
  misc_feature (6)..(388): Homolog of NCBI NO: 21313464 NR Description: RIKEN cDNA 2400006A19 [Mus musculus]
  misc_feature (6)..(388): Homolog of NCBI NO: 20978552 NR Description: 26S proteasome non-ATPase regulatory subunit 6 proteasome regulatory subunit S10) (p42A) putative KIAA0107 homologue [Mus musculus]
  misc_feature (6)..(388): Homolog of NCBI NO: 29436940 NR Description: Unknown (protein for MGC:56471) [Danio rerio]
  misc_feature (6)..(388): Homolog of NCBI NO: 7661914 NR Description: KIAA0107 gene product [Homo sapiens]
  misc_feature (6)..(388): Homolog of NCBI NO: 38454206 NR Description: Unknown (protein for MGC:72968) [Rattus >gi|37748489|gb|AAH59159.1| Unknown (protein for MGC:72968)
  misc_feature (6)..(388): Homolog of NCBI NO: 39795842 NR Description: Unknown (protein for MGC:76241) [Silurana

SEQ ID NO: 13021 - protein, 340 aa, Zea mays subsp. mays; identical to SEQ ID NO: 3557
  peptide (1)..(340): Ceres Seq. ID no. 12343334
  misc_feature (205)..(309): Pfam Name: PCI domain Pfam Description: PCI domain
  misc_feature (1)..(340): Homolog of NCBI NO: 20978545 NR Description: 26S proteasome non-ATPase regulatory subunit 6
  misc_feature (1)..(340): Homolog of NCBI NO: 18416433 NR Description: 26S proteasome regulatory subunit (RPN7), protein id: At4g24820.1, supported by cDNA: 38927., supported by gi_15450839, supported by cDNA: gi_20259841 [Arabidopsis
  misc_feature (1)..(226): Homolog of NCBI NO: 7484780 NR Description: 26S proteasome regulatory particle chain RPN7
  misc_feature (109)..(340): Homolog of NCBI NO: 2982297 NR Description: KIAA0107-like protein [Picea mariana]
  misc_feature (1)..(340): Homolog of NCBI NO: 21313464 NR Description: RIKEN cDNA 2400006A19 [Mus musculus]
  misc_feature (1)..(340): Homolog of NCBI NO: 20978552 NR Description: 26S proteasome non-ATPase regulatory subunit 6 proteasome regulatory subunit S10) (p42A) putative KIAA0107 homologue [Mus musculus]
  misc_feature (1)..(340): Homolog of NCBI NO: 29436940 NR Description: Unknown (protein for MGC:56471) [Danio rerio]
  misc_feature (1)..(340): Homolog of NCBI NO: 7661914 NR Description: KIAA0107 gene product [Homo sapiens]
  misc_feature (1)..(340): Homolog of NCBI NO: 38454206 NR Description: Unknown (protein for MGC:72968) [Rattus >gi|37748489|gb|AAH59159.1| Unknown (protein for MGC:72968)
  misc_feature (1)..(340): Homolog of NCBI NO: 39795842 NR Description: Unknown (protein for MGC:76241) [Silurana

SEQ ID NO: 13022 - protein, 317 aa, Zea mays subsp. mays; identical to SEQ ID NO: 3558
  peptide (1)..(317): Ceres Seq. ID no. 12343335
  misc_feature (182)..(286): Pfam Name: PCI domain Pfam Description: PCI domain
  misc_feature (1)..(317): Homolog of NCBI NO: 20978545 NR Description: 26S proteasome non-ATPase regulatory subunit 6
  misc_feature (1)..(317): Homolog of NCBI NO: 18416433 NR Description: 26S proteasome regulatory subunit (RPN7), protein id: At4g24820.1, supported by cDNA: 38927., supported by gi_15450839, supported by cDNA: gi_20259841 [Arabidopsis
  misc_feature (1)..(203): Homolog of NCBI NO: 7484780 NR Description: 26S proteasome regulatory particle chain RPN7
  misc_feature (86)..(317): Homolog of NCBI NO: 2982297 NR Description: KIAA0107-like protein [Picea mariana]
  misc_feature (1)..(317): Homolog of NCBI NO: 21313464 NR Description: RIKEN cDNA 2400006A19 [Mus musculus]
  misc_feature (1)..(317): Homolog of NCBI NO: 20978552 NR Description: 26S proteasome non-ATPase regulatory subunit 6 proteasome regulatory subunit S10) (p42A) putative KIAA0107 homologue [Mus musculus]
  misc_feature (1)..(317): Homolog of NCBI NO: 29436940 NR Description: Unknown (protein for MGC:56471) [Danio rerio]
  misc_feature (1)..(317): Homolog of NCBI NO: 7661914 NR Description: KIAA0107 gene product [Homo sapiens]
  misc_feature (1)..(317): Homolog of NCBI NO: 38454206 NR Description: Unknown (protein for MGC:72968) [Rattus >gi|37748489|gb|AAH59159.1| Unknown (protein for MGC:72968)
  misc_feature (1)..(317): Homolog of NCBI NO: 39795842 NR Description: Unknown (protein for MGC:76241) [Silurana

SEQ ID NO: 13023 - DNA, 1559 bp, Zea mays subsp. mays
  misc_feature (1)..(1559): Ceres Seq. ID no. 12411451
  misc_feature: MA Experiment ID: 108529 Result: Up-regulated in Transcription
  misc_feature: MA Experiment 108529 PARAMETER Experiment Name: Zm_Imbibed_Seeds_P Parameter: Age (day) Value: 5 vs. 2
  misc_feature: MA Experiment 108529 PARAMETER Experiment Name: Zm_Imbibed_Seeds_P Parameter: Organism Value: Zea mays
  misc_feature: MA Experiment 108529 PARAMETER Experiment Name: Zm_Imbibed_Seeds_P Parameter: Plant Line Value: 35A19
  misc_feature: MA Experiment 108529 PARAMETER Experiment Name: Zm_Imbibed_Seeds_P Parameter: Tissue Value: Roots vs. Embryo
  misc_feature: MA Experiment ID: 108545 Result: Down-regulated in Transcription
  misc_feature: MA Experiment 108545 PARAMETER Experiment Name: Zm_Imbibed_Seeds_P Parameter: Age (day) Value: 3 vs. 2
  misc_feature: MA Experiment 108545 PARAMETER Experiment Name: Zm_Imbibed_Seeds_P Parameter: Organism Value: Zea mays
  misc_feature: MA Experiment 108545 PARAMETER Experiment Name: Zm_Imbibed_Seeds_P Parameter: Plant Line Value: 35A19
  misc_feature: MA Experiment 108545 PARAMETER Experiment Name: Zm_Imbibed_Seeds_P Parameter: Tissue Value: Aerial vs. Embryo
  misc_feature: MA Experiment ID: 20000535 Result: Down-regulated in Transcription
  misc_feature: MA Experiment 20000535 PARAMETER Experiment Name: Zm_Hybrid_Seed_Dev_P Parameter: DAP Value: 30 vs. 12
  misc_feature: MA Experiment 20000535 PARAMETER Experiment Name: Zm_Hybrid_Seed_Dev_P Parameter: Organism Value: Zea mays
  misc_feature: MA Experiment 20000535 PARAMETER Experiment Name: Zm_Hybrid_Seed_Dev_P Parameter: Plant Line Value: 35A19
  misc_feature: MA Experiment 20000535 PARAMETER Experiment Name: Zm_Hybrid_Seed_Dev_P Parameter: Tissue Value: Embryo vs. Unfert Floret
  misc_feature: MA Experiment ID: 20000626 Result: Down-regulated in Transcription
  misc_feature: MA Experiment 20000626 PARAMETER Experiment Name: Zm_Herbicide-Treatments_P Parameter: Timepoint (hr) Value: 12
  misc_feature: MA Experiment 20000626 PARAMETER Experiment Name: Zm_Herbicide-Treatments_P Parameter: Tissue Value: Aerial
  misc_feature: MA Experiment 20000626 PARAMETER Experiment Name: Zm_Herbicide-Treatments_P Parameter: Treatment Value: Roundup vs. No Treatment
  misc_feature: MA Experiment ID: 20000630 Result: Down-regulated in Transcription
  misc_feature: MA Experiment 20000630 PARAMETER Experiment Name: Zm_Herbicide-Treatments_P Parameter: Timepoint (hr) Value: 4
  misc_feature: MA Experiment 20000630 PARAMETER Experiment Name: Zm_Herbicide-Treatments_P Parameter: Tissue Value: Aerial
  misc_feature: MA Experiment 20000630 PARAMETER Experiment Name: Zm_Herbicide-Treatments_P Parameter: Treatment Value: Roundup vs. No Treatment
ctttcccctttccttcagaaacaaacaacagctgcgccggctccaccgcaccagcccacacccgccgcggccgttacatccccgcttccccggccaccttccttccatttatacccctccgtttcccacccttccctccccactccggcagtccccgtcccaccactacagccactgctgcccggccggccgcgtccctcttcctccgccaggcgccagccgcccgttctccagcaatggcgtctgcctcgcacgccccgacgccgctgctcaaggacgagctggacatcgtcatcccgacgatccgcaacctcgacttcctggagatgtggaggcccttcttccagccctaccacctcatcatcgtgcaggacggcgaccccagcaagaccatccgcgtccccgagggcttcgactacgagctctacaaccgcaacgacatcaaccgcatgctggggcccaaggcctcctgcatctccttcaaggactccgcctgccgctgcttcggctacatggtctccaagaagaagtacatctacaccatcgacgatgactgcttcgttgccaaggatccatcagggaaggacatcaatgcacttgagcagcacatcaagaacctcctgagcccttccactccatttttcttcaatactctgtatgacccttaccgtgttggcgccgattttgttcgtgggtaccccttcagccttcgtgagggtgtcccaactgctgtttctcacgggctttggctcaacattccagactacgatgcccctacccagcttgttaagccccttgagagaaacaccaggtatgtggatgctattcttacgatcccaaagggcaccctcttccctatgtgtggaatgaaccttgcatttgaccgtgagctcattggtcctgcaatgtactttggtcttatgggtgatggccagcctattggtcgctacgatgatatgtgggcaggatggtgcacaaaggtgattacggatcatctgggcctgggtgtgaagactggcctgccctacatctggcacagcaaagcaagcaacccatttgtgaacctgaagaaggaatacaacggcatcttctggcaagaagagctgatcccgttcttccagtcggtctcccttccaaaggaggccaccaccgtccaaaagtgctacctcgagctggccaagcaggtgagggccaagctcggtaaggtggacggctacttcaacaagcttgccgactccatggtcacgtggattgaggcctgggacgagctgaaccccccaaaaggcggagtccccacagcaaatggccctccaaagaagtaaaacactatgtagtgtaaacttcactcgttcatgtggaccatcgtactgaaaggaaatactgttttggggttagtgctgatggactgagatcactccgctgtaactcgagattttcacgtcccggaaaccgccctgccggttttagggcgtttacatgtttttttttcatttttcgtgtgatacaacaggtgtaatgtcggattggattagaataaagtttatgatcttcatcttttc

SEQ ID NO: 13024 - protein, 439 aa, Zea mays subsp. mays
  peptide (1)..(439): Ceres Seq. ID no. 12411452
  misc_feature (85)..(424): Pfam Name: Reversibly glycosylated polypeptide Pfam Description: Reversibly glycosylated polypeptide
  misc_feature (82)..(438): Homolog of NCBI NO: 18077708 NR Description: reversibly glycosylated polypeptide [Gossypium
  misc_feature (74)..(438): Homolog of NCBI NO: 34915190 NR Description: reversibly glycosylated polypeptide [Oryza sativa
  misc_feature (74)..(438): Homolog of NCBI NO: 4158221 NR Description: reversibly glycosylated polypeptide [Oryza sativa
  misc_feature (83)..(435): Homolog of NCBI NO: 4158232 NR Description: reversibly glycosylated polypeptide [Triticum
  misc_feature (88)..(426): Homolog of NCBI NO: 2317729 NR Description: reversibly glycosylated polypeptide-1
  misc_feature (88)..(426): Homolog of NCBI NO: 15232865 NR Description: reversibly glycosylated polypeptide-1; protein
  misc_feature (171)..(439): Homolog of NCBI NO: 7488888 NR Description: type IIIa membrane protein cp-wap11 - cowpea
  misc_feature (84)..(420): Homolog of NCBI NO: 19387283 NR Description: putative amylogenin [Oryza sativa (japonica
FPFPSETNNSCAGSTAPAHTRRGRYIPASPATFLPFIPLRFPPFPPHSGSPRPTTTATAARPAASLFLRQAPAARSPAMASASHAPTPLLKDELDIVIPTIRNLDFLEMWRPFFQPYHLIIVQDGDPSKTIRVPEGFDYELYNRNDINRMLGPKASCISFKDSACRCFGYMVSKKKYIYTIDDDCFVAKDPSGKDINALEQHIKNLLSPSTPFFFNTLYDPYRVGADFVRGYPFSLREGVPTAVSHGLWLNIPDYDAPTQLVKPLERNTRYVDAILTIPKGTLFPMCGMNLAFDRELIGPAMYFGLMGDGQPIGRYDDMWAGWCTKVITDHLGLGVKTGLPYIWHSKASNPFVNLKKEYNGIFWQEELIPFFQSVSLPKEATTVQKCYLELAKQVRAKLGKVDGYFNKLADSMVTWIEAWDELNPPKGGVPTANGPPKK

SEQ ID NO: 13025 - protein, 361 aa, Zea mays subsp. mays
  peptide (1)..(361): Ceres Seq. ID no. 12411453
  misc_feature (7)..(346): Pfam Name: Reversibly glycosylated polypeptide Pfam Description: Reversibly glycosylated polypeptide
  misc_feature (4)..(360): Homolog of NCBI NO: 18077708 NR Description: reversibly glycosylated polypeptide [Gossypium
  misc_feature (1)..(360): Homolog of NCBI NO: 34915190 NR Description: reversibly glycosylated polypeptide [Oryza sativa
  misc_feature (1)..(360): Homolog of NCBI NO: 4158221 NR Description: reversibly glycosylated polypeptide [Oryza sativa
  misc_feature (5)..(357): Homolog of NCBI NO: 4158232 NR Description: reversibly glycosylated polypeptide [Triticum
  misc_feature (10)..(348): Homolog of NCBI NO: 2317729 NR Description: reversibly glycosylated polypeptide-1
  misc_feature (10)..(348): Homolog of NCBI NO: 15232865 NR Description: reversibly glycosylated polypeptide-1; protein
  misc_feature (93)..(361): Homolog of NCBI NO: 7488888 NR Description: type IIIa membrane protein cp-wap11 - cowpea
  misc_feature (6)..(342): Homolog of NCBI NO: 19387283 NR Description: putative amylogenin [Oryza sativa (japonica
MASASHAPTPLLKDELDIVIPTIRNLDFLEMWRPFFQPYHLIIVQDGDPSKTIRVPEGFDYELYNRNDINRMLGPKASCISFKDSACRCFGYMVSKKKYIYTIDDDCFVAKDPSGKDINALEQHIKNLLSPSTPFFFNTLYDPYRVGADFVRGYPFSLREGVPTAVSHGLWLNIPDYDAPTQLVKPLERNTRYVDAILTIPKGTLFPMCGMNLAFDRELIGPAMYFGLMGDGQPIGRYDDMWAGWCTKVITDHLGLGVKTGLPYIWHSKASNPFVNLKKEYNGIFWQEELIPFFQSVSLPKEATTVQKCYLELAKQVRAKLGKVDGYFNKLADSMVTWIEAWDELNPPKGGVPTANGPPKK

SEQ ID NO: 13026 - protein, 331 aa, Zea mays subsp. mays
  peptide (1)..(331): Ceres Seq. ID no. 12411454
  misc_feature (1)..(316): Pfam Name: Reversibly glycosylated polypeptide Pfam Description: Reversibly glycosylated polypeptide
  misc_feature (1)..(330): Homolog of NCBI NO: 18077708 NR Description: reversibly glycosylated polypeptide [Gossypium
  misc_feature (1)..(330): Homolog of NCBI NO: 34915190 NR Description: reversibly glycosylated polypeptide [Oryza sativa
  misc_feature (1)..(330): Homolog of NCBI NO: 4158221 NR Description: reversibly glycosylated polypeptide [Oryza sativa
  misc_feature (1)..(327): Homolog of NCBI NO: 4158232 NR Description: reversibly glycosylated polypeptide [Triticum
  misc_feature (1)..(318): Homolog of NCBI NO: 2317729 NR Description: reversibly glycosylated polypeptide-1
  misc_feature (1)..(318): Homolog of NCBI NO: 15232865 NR Description: reversibly glycosylated polypeptide-1; protein
  misc_feature (63)..(331): Homolog of NCBI NO: 7488888 NR Description: type IIIa membrane protein cp-wap11 - cowpea
  misc_feature (1)..(312): Homolog of NCBI NO: 19387283 NR Description: putative amylogenin [Oryza sativa (japonica
MWRPFFQPYHLIIVQDGDPSKTIRVPEGFDYELYNRNDINRMLGPKASCISFKDSACRCFGYMVSKKKYIYTIDDDCFVAKDPSGKDINALEQHIKNLLSPSTPFFFNTLYDPYRVGADFVRGYPFSLREGVPTAVSHGLWLNIPDYDAPTQLVKPLERNTRYVDAILTIPKGTLFPMCGMNLAFDRELIGPAMYFGLMGDGQPIGRYDDMWAGWCTKVITDHLGLGVKTGLPYIWHSKASNPFVNLKKEYNGIFWQEELIPFFQSVSLPKEATTVQKCYLELAKQVRAKLGKVDGYFNKLADSMVTWIEAWDELNPPKGGVPTANGPPKK

SEQ ID NO: 13027 - DNA, 1968 bp, Zea mays subsp. mays
  misc_feature (1)..(1968): Ceres Seq. ID no. 12355752
  misc_feature: MA Experiment ID: 108504 Result: Up-regulated in Transcription
  misc_feature: MA Experiment 108504 PARAMETER Experiment Name: Zm_Drought_P Parameter: Age (day) Value: 8
  misc_feature: MA Experiment 108504 PARAMETER Experiment Name: Zm_Drought_P Parameter: Organism Value: Zea mays
  misc_feature: MA Experiment 108504 PARAMETER Experiment Name: Zm_Drought_P Parameter: Plant Line Value: 35A19
  misc_feature: MA Experiment 108504 PARAMETER Experiment Name: Zm_Drought_P Parameter: Timepoint (hr) Value: 12
  misc_feature: MA Experiment 108504 PARAMETER Experiment Name: Zm_Drought_P Parameter: Tissue Value: Aerial
  misc_feature: MA Experiment 108504 PARAMETER Experiment Name: Zm_Drought_P Parameter: Treatment Value: Drought vs. No Drought
  misc_feature: MA Experiment ID: 108523 Result: Down-regulated in Transcription
  misc_feature: MA Experiment 108523 PARAMETER Experiment Name: Zm_42deg_Heat_P Parameter: Age (day) Value: 8
  misc_feature: MA Experiment 108523 PARAMETER Experiment Name: Zm_42deg_Heat_P Parameter: Organism Value: Zea mays
  misc_feature: MA Experiment 108523 PARAMETER Experiment Name: Zm_42deg_Heat_P Parameter: Plant Line Value: 35A19
  misc_feature: MA Experiment 108523 PARAMETER Experiment Name: Zm_42deg_Heat_P Parameter: Temperature (deg C) Value: 42 vs. 22
  misc_feature: MA Experiment 108523 PARAMETER Experiment Name: Zm_42deg_Heat_P Parameter: Timepoint (hr) Value: 6
  misc_feature: MA Experiment 108523 PARAMETER Experiment Name: Zm_42deg_Heat_P Parameter: Tissue Value: Aerial
  misc_feature: MA Experiment ID: 108527 Result: Up-regulated in Transcription
  misc_feature: MA Experiment 108527 PARAMETER Experiment Name: Zm_5mM_NO_P Parameter: Age (day) Value: 8
  misc_feature: MA Experiment 108527 PARAMETER Experiment Name: Zm_5mM_NO_P Parameter: Organism Value: Zea mays
  misc_feature: MA Experiment 108527 PARAMETER Experiment Name: Zm_5mM_NO_P Parameter: Plant Line Value: 35A19
  misc_feature: MA Experiment 108527 PARAMETER Experiment Name: Zm_5mM_NO_P Parameter: Timepoint (hr) Value: 6
  misc_feature: MA Experiment 108527 PARAMETER Experiment Name: Zm_5mM_NO_P Parameter: Tissue Value: Aerial
  misc_feature: MA Experiment 108527 PARAMETER Experiment Name: Zm_5mM_NO_P Parameter: Treatment Value: 5mM NO vs. No Treatment
  misc_feature: MA Experiment ID: 108543 Result: Down-regulated in Transcription
  misc_feature: MA Experiment ID: 108689 Result: Up-regulated in Transcription
  misc_feature: MA Experiment 108689 PARAMETER Experiment Name: Zm_Drought_Roots_P Parameter: Age (day) Value: 9
  misc_feature: MA Experiment 108689 PARAMETER Experiment Name: Zm_Drought_Roots_P Parameter: Organism Value: Zea mays
  misc_feature: MA Experiment 108689 PARAMETER Experiment Name: Zm_Drought_Roots_P Parameter: Plant Line Value: 35A19
  misc_feature: MA Experiment 108689 PARAMETER Experiment Name: Zm_Drought_Roots_P Parameter: Timepoint (hr) Value: 24
  misc_feature: MA Experiment 108689 PARAMETER Experiment Name: Zm_Drought_Roots_P Parameter: Tissue Value: Roots
  misc_feature: MA Experiment 108689 PARAMETER Experiment Name: Zm_Drought_Roots_P Parameter: Treatment Value: Drought vs. No Drought
  misc_feature: MA Experiment ID: 20000477 Result: Up-regulated in Transcription
  misc_feature: MA Experiment 20000477 PARAMETER Experiment Name: Zm_5mM_SA_P Parameter: Age (day) Value: 10
  misc_feature: MA Experiment 20000477 PARAMETER Experiment Name: Zm_5mM_SA_P Parameter: Organism Value: Zea mays
  misc_feature: MA Experiment 20000477 PARAMETER Experiment Name: Zm_5mM_SA_P Parameter: Plant Line Value: 35A19
  misc_feature: MA Experiment 20000477 PARAMETER Experiment Name: Zm_5mM_SA_P Parameter: Timepoint (hr) Value: 48
  misc_feature: MA Experiment 20000477 PARAMETER Experiment Name: Zm_5mM_SA_P Parameter: Tissue Value: Aerial
  misc_feature: MA Experiment 20000477 PARAMETER Experiment Name: Zm_5mM_SA_P Parameter: Treatment Value: 5mM SA vs. No Treatment
  misc_feature: MA Experiment ID: 20000478 Result: Up-regulated in Transcription
  misc_feature: MA Experiment 20000478 PARAMETER Experiment Name: Zm_5mM_SA_P Parameter: Age (day) Value: 11
  misc_feature: MA Experiment 20000478 PARAMETER Experiment Name: Zm_5mM_SA_P Parameter: Organism Value: Zea mays
  misc_feature: MA Experiment 20000478 PARAMETER Experiment Name: Zm_5mM_SA_P Parameter: Plant Line Value: 35A19
  misc_feature: MA Experiment 20000478 PARAMETER Experiment Name: Zm_5mM_SA_P Parameter: Timepoint (hr) Value: 72
  misc_feature: MA Experiment 20000478 PARAMETER Experiment Name: Zm_5mM_SA_P Parameter: Tissue Value: Aerial
  misc_feature: MA Experiment 20000478 PARAMETER Experiment Name: Zm_5mM_SA_P Parameter: Treatment Value: 5mM SA vs. No Treatment
  misc_feature: MA Experiment ID: 20000488 Result: Down-regulated in Transcription
  misc_feature: MA Experiment 20000488 PARAMETER Experiment Name: Zm_50mM_NH4NO3_L_to_H_P Parameter: Organism Value: Zea mays
  misc_feature: MA Experiment 20000488 PARAMETER Experiment Name: Zm_50mM_NH4NO3_L_to_H_P Parameter: Timepoint (hr) Value: 8
  misc_feature: MA Experiment 20000488 PARAMETER Experiment Name: Zm_50mM_NH4NO3_L_to_H_P Parameter: Tissue Value: Leaves
  misc_feature: MA Experiment 20000488 PARAMETER Experiment Name: Zm_50mM_NH4NO3_L_to_H_P Parameter: Treatment Value: 50mM NH4NO3 vs. 100mM Mannitol
aaatagcagacggcagacaacagtcgaggggacacaggaaggcgcgaagaagaccgagatcctcgcccaacgccatcacgccactcccccaatactcaggtgtcaggacagcgagcaggcacaagcagatctcactccacgttgctccttccgcccttcctctccgccgctccccggaaggatcatggagcgcgggattcttggctccaggggcgccgtccaaatcttggggtcgaagaccggggccgcgatgtcatgtggcaaaacaacctctacaagttttacttgttctaccaaacacgagctgaacttgcatgtgaatgttaagccgttgcaattggtaacagatggatcctctcgtttggcatacaaaactccagtgcttaaaaatcagtggaatctttctgctagttcttcctctgcaaatgtggttaccacttttgatgatgacaaaggtgtaccttccagttttgctgaagaaaagatcggagtactgttattaaatcttggtggtccagaaaccctagacgatgttcaaccattcttgttcaacctatttgctgatccagatatcattcgactgcctaggctcttcaggttccttcaaagaccactggccaaacttatttctacttttagagctcctaagagtaaagaagggtatgcttcaatcggtggtgggtcaccattgaggaaaattactgatgagcaggcaaatgctttgaagattgctctggaaaagaaaaaattgaacgcaaatatatatgttgggatgcggtattggtatcctttcacagaagaagccattgatcagattaagaaggataatatttccaagctcgttgttcttccactctaccctcagtactccatatcaacaagtgggtcaagcattcgtgttctccaaaatgttgtcaaggaagattcatatttttctggcttgccaatctccattatcgaatcatggtaccaacgtgatggctatgtgaaatcaatggctgacctaattgaaaaagagctatctgccttttccaatcctgaagaggtaatgatattcttcagtgcacatggtgtgccacttacctatgttcaggatgctggagatccttacagagatcagatggaggattgtatttctttgatcatgggggagctgagatccagaggaatcttaaatggtcacactttggcgtatcagagtcgggtgggaccagttcaatggctgaagccatatactgatgaagttttagtagaacttggtcagaacggtgtgaagagcctcctggctgttccagtaagcttcgtgagcgagcacattgagacactggaagaaatagacatggagtacaaggagttggctctggaatcaggcattgagaactggggccgggtccctgctcttggatgcacttcgacgttcatctccgaccttgcagatgcggttgtcgaagccctgccctctgcctcggcgctgggaaccagaaagcctgaagacaccggttccagcatggacctgatgcattacctgaccaagatgttcttcggctcaatcttggcatttatcctgctgttgtcaccaagactggtttctgctttccggaacaccacgctttaggtggttaggtaggtaagcaaaaagggaatggtgtgataggtaattcttaaaaatttgagattaataatggaaaaactggagagagcttggtgatagtaactagagatactttaggctttgtttgagtactctagtattgaccccaatccgtgtgttgagatagattgaggtgtaaattagtttaagttacacctcaattcagctcaatacatatggattgagctcaatactaaaatactcaaactaggccttagggcacgaggtagcagcttgcaatttgctgtttttgatattgttcacaggaaacattggtctcataaatgaatctgtgaaagcacataacgttacaaatc

SEQ ID NO: 13028 - protein, 537 aa, Zea mays subsp. mays
  peptide (1)..(537): Ceres Seq. ID no. 12355753
  misc_feature (161)..(485): Pfam Name: Ferrochelatase Pfam Description: Ferrochelatase
  misc_feature (67)..(535): Homolog of NCBI NO: 7437214 NR Description: probable ferrochelatase (EC 4.99.1.1) - barley
  misc_feature (67)..(535): Homolog of NCBI NO: 1170242 NR Description: Ferrochelatase II, chloroplast precursor ferro- lyase) (Heme synthetase) >gi|7437215|pir||T05736 probable
  misc_feature (71)..(537): Homolog of NCBI NO: 1170239 NR Description: Ferrochelatase II, chloroplast precursor
  misc_feature (95)..(534): Homolog of NCBI NO: 30690097 NR Description: ferrochelatase-I [Arabidopsis thaliana]
  misc_feature (80)..(497): Homolog of NCBI NO: 12082085 NR Description: ferrochelatase [Cucumis sativus]
  misc_feature (126)..(497): Homolog of NCBI NO: 3913808 NR Description: Ferrochelatase II, chloroplast precursor ferro- lyase) (Heme synthetase) >gi|2429618|dbj|BAA22284.1|
  misc_feature (131)..(505): Homolog of NCBI NO: 7437212 NR Description: probable ferrochelatase (EC 4.99.1.1) - potato
  misc_feature (161)..(505): Homolog of NCBI NO: 15147828 NR Description: ferrochelatase [Nicotiana tabacum]
  misc_feature (127)..(505): Homolog of NCBI NO: 15227742 NR Description: putative ferrochelatase precusor; protein id: [Arabidopsis thaliana] >gi|3913871|sp|O04921|HMZ2_ARATH
  misc_feature (127)..(505): Homolog of NCBI NO: 2623990 NR Description: ferrochelatase [Arabidopsis thaliana]
NSRRQTTVEGTQEGAKKTEILAQRHHATPPILRCQDSEQAQADLTPRCSFRPSSPPLPGRIMERGILGSRGAVQILGSKTGAAMSCGKTTSTSFTCSTKHELNLHVNVKPLQLVTDGSSRLAYKTPVLKNQWNLSASSSSANVVTTFDDDKGVPSSFAEEKIGVLLLNLGGPETLDDVQPFLFNLFADPDIIRLPRLFRFLQRPLAKLISTFRAPKSKEGYASIGGGSPLRKITDEQANALKIALEKKKLNANIYVGMRYWYPFTEEAIDQIKKDNISKLVVLPLYPQYSISTSGSSIRVLQNVVKEDSYFSGLPISIIESWYQRDGYVKSMADLIEKELSAFSNPEEVMIFFSAHGVPLTYVQDAGDPYRDQMEDCISLIMGELRSRGILNGHTLAYQSRVGPVQWLKPYTDEVLVELGQNGVKSLLAVPVSFVSEHIETLEEIDMEYKELALESGIENWGRVPALGCTSTFISDLADAVVEALPSASALGTRKPEDTGSSMDLMHYLTKMFFGSILAFILLLSPRLVSAFRNTTL

SEQ ID NO: 13029 - protein, 476 aa, Zea mays subsp. mays
  peptide (1)..(476): Ceres Seq. ID no. 12355754
  misc_feature (100)..(424): Pfam Name: Ferrochelatase Pfam Description: Ferrochelatase
  misc_feature (10)..(476): Homolog of NCBI NO: 1170239 NR Description: Ferrochelatase II, chloroplast precursor
  misc_feature (34)..(473): Homolog of NCBI NO: 30690097 NR Description: ferrochelatase-I [Arabidopsis thaliana]
  misc_feature (19)..(436): Homolog of NCBI NO: 12082085 NR Description: ferrochelatase [Cucumis sativus]
  misc_feature (65)..(436): Homolog of NCBI NO: 3913808 NR Description: Ferrochelatase II, chloroplast precursor ferro- lyase) (Heme synthetase) >gi|2429618|dbj|BAA22284.1|
  misc_feature (6)..(474): Homolog of NCBI NO: 7437214 NR Description: probable ferrochelatase (EC 4.99.1.1) - barley
  misc_feature (6)..(474): Homolog of NCBI NO: 1170242 NR Description: Ferrochelatase II, chloroplast precursor ferro- lyase) (Heme synthetase) >gi|7437215|pir||T05736 probable
  misc_feature (70)..(444): Homolog of NCBI NO: 7437212 NR Description: probable ferrochelatase (EC 4.99.1.1) - potato
  misc_feature (100)..(444): Homolog of NCBI NO: 15147828 NR Description: ferrochelatase [Nicotiana tabacum]
  misc_feature (66)..(444): Homolog of NCBI NO: 15227742 NR Description: putative ferrochelatase precusor; protein id: [Arabidopsis thaliana] >gi|3913871|sp|O04921|HMZ2_ARATH
  misc_feature (66)..(444): Homolog of NCBI NO: 2623990 NR Description: ferrochelatase [Arabidopsis thaliana]
MERGILGSRGAVQILGSKTGAAMSCGKTTSTSFTCSTKHELNLHVNVKPLQLVTDGSSRLAYKTPVLKNQWNLSASSSSANVVTTFDDDKGVPSSFAEEKIGVLLLNLGGPETLDDVQPFLFNLFADPDIIRLPRLFRFLQRPLAKLISTFRAPKSKEGYASIGGGSPLRKITDEQANALKIALEKKKLNANIYVGMRYWYPFTEEAIDQIKKDNISKLVVLPLYPQYSISTSGSSIRVLQNVVKEDSYFSGLPISIIESWYQRDGYVKSMADLIEKELSAFSNPEEVMIFFSAHGVPLTYVQDAGDPYRDQMEDCISLIMGELRSRGILNGHTLAYQSRVGPVQWLKPYTDEVLVELGQNGVKSLLAVPVSFVSEHIETLEEIDMEYKELALESGIENWGRVPALGCTSTFISDLADAVVEALPSASALGTRKPEDTGSSMDLMHYLTKMFFGSILAFILLLSPRLVSAFRNTTL

SEQ ID NO: 13030 - protein, 454 aa, Zea mays subsp. mays
  peptide (1)..(454): Ceres Seq. ID no. 12355755
  misc_feature (78)..(402): Pfam Name: Ferrochelatase Pfam Description: Ferrochelatase
  misc_feature (1)..(452): Homolog of NCBI NO: 7437214 NR Description: probable ferrochelatase (EC 4.99.1.1) - barley
  misc_feature (1)..(452): Homolog of NCBI NO: 1170242 NR Description: Ferrochelatase II, chloroplast precursor ferro- lyase) (Heme synthetase) >gi|7437215|pir||T05736 probable
  misc_feature (1)..(454): Homolog of NCBI NO: 1170239 NR Description: Ferrochelatase II, chloroplast precursor
  misc_feature (12)..(451): Homolog of NCBI NO: 30690097 NR Description: ferrochelatase-I [Arabidopsis thaliana]
  misc_feature (1)..(414): Homolog of NCBI NO: 12082085 NR Description: ferrochelatase [Cucumis sativus]
  misc_feature (43)..(414): Homolog of NCBI NO: 3913808 NR Description: Ferrochelatase II, chloroplast precursor ferro- lyase) (Heme synthetase) >gi|2429618|dbj|BAA22284.1|
  misc_feature (48)..(422): Homolog of NCBI NO: 7437212 NR Description: probable ferrochelatase (EC 4.99.1.1) - potato
  misc_feature (78)..(422): Homolog of NCBI NO: 15147828 NR Description: ferrochelatase [Nicotiana tabacum]
  misc_feature (44)..(422): Homolog of NCBI NO: 15227742 NR Description: putative ferrochelatase precusor; protein id: [Arabidopsis thaliana] >gi|3913871|sp|O04921|HMZ2_ARATH
  misc_feature (44)..(422): Homolog of NCBI NO: 2623990 NR Description: ferrochelatase [Arabidopsis thaliana]
MSCGKTTSTSFTCSTKHELNLHVNVKPLQLVTDGSSRLAYKTPVLKNQWNLSASSSSANVVTTFDDDKGVPSSFAEEKIGVLLLNLGGPETLDDVQPFLFNLFADPDIIRLPRLFRFLQRPLAKLISTFRAPKSKEGYASIGGGSPLRKITDEQANALKIALEKKKLNANIYVGMRYWYPFTEEAIDQIKKDNISKLVVLPLYPQYSISTSGSSIRVLQNVVKEDSYFSGLPISIIESWYQRDGYVKSMADLIEKELSAFSNPEEVMIFFSAHGVPLTYVQDAGDPYRDQMEDCISLIMGELRSRGILNGHTLAYQSRVGPVQWLKPYTDEVLVELGQNGVKSLLAVPVSFVSEHIETLEEIDMEYKELALESGIENWGRVPALGCTSTFISDLADAVVEALPSASALGTRKPEDTGSSMDLMHYLTKMFFGSILAFILLLSPRLVSAFRNTTL

SEQ ID NO: 13031 - DNA, 954 bp, Zea mays subsp. mays
  misc_feature (1)..(954): Ceres Seq. ID no. 12413099
  misc_feature: MA Experiment ID: 108529 Result: Up-regulated in Transcription
  misc_feature: MA Experiment 108529 PARAMETER Experiment Name: Zm_Imbibed_Seeds_P Parameter: Age (day) Value: 5 vs. 2
  misc_feature: MA Experiment 108529 PARAMETER Experiment Name: Zm_Imbibed_Seeds_P Parameter: Organism Value: Zea mays
  misc_feature: MA Experiment 108529 PARAMETER Experiment Name: Zm_Imbibed_Seeds_P Parameter: Plant Line Value: 35A19
  misc_feature: MA Experiment 108529 PARAMETER Experiment Name: Zm_Imbibed_Seeds_P Parameter: Tissue Value: Roots vs. Embryo
  misc_feature: MA Experiment ID: 108535 Result: Down-regulated in Transcription
  misc_feature: MA Experiment 108535 PARAMETER Experiment Name: Zm_Meristem_P Parameter: Age (day) Value: 8
  misc_feature: MA Experiment 108535 PARAMETER Experiment Name: Zm_Meristem_P Parameter: Organism Value: Zea mays
  misc_feature: MA Experiment 108535 PARAMETER Experiment Name: Zm_Meristem_P Parameter: Plant Line Value: 35A19
  misc_feature: MA Experiment 108535 PARAMETER Experiment Name: Zm_Meristem_P Parameter: Tissue Value: Root Meristem vs. Above Root Meristem
  misc_feature: MA Experiment ID: 108544 Result: Up-regulated in Transcription
  misc_feature: MA Experiment ID: 108556 Result: Up-regulated in Transcription
  misc_feature: MA Experiment 108556 PARAMETER Experiment Name: Zm_Drought_P Parameter: Age (day) Value: 9
  misc_feature: MA Experiment 108556 PARAMETER Experiment Name: Zm_Drought_P Parameter: Organism Value: Zea mays
  misc_feature: MA Experiment 108556 PARAMETER Experiment Name: Zm_Drought_P Parameter: Plant Line Value: 35A19
  misc_feature: MA Experiment 108556 PARAMETER Experiment Name: Zm_Drought_P Parameter: Timepoint (hr) Value: 24
  misc_feature: MA Experiment 108556 PARAMETER Experiment Name: Zm_Drought_P Parameter: Tissue Value: Aerial
  misc_feature: MA Experiment 108556 PARAMETER Experiment Name: Zm_Drought_P Parameter: Treatment Value: Drought vs. No Drought
  misc_feature: MA Experiment ID: 20000492 Result: Down-regulated in Transcription
  misc_feature: MA Experiment 20000492 PARAMETER Experiment Name: Zm_Hybrid_Seed_Dev_P Parameter: DAP Value: 12
  misc_feature: MA Experiment 20000492 PARAMETER Experiment Name: Zm_Hybrid_Seed_Dev_P Parameter: Organism Value: Zea mays
  misc_feature: MA Experiment 20000492 PARAMETER Experiment Name: Zm_Hybrid_Seed_Dev_P Parameter: Plant Line Value: 35A19
  misc_feature: MA Experiment 20000492 PARAMETER Experiment Name: Zm_Hybrid_Seed_Dev_P Parameter: Tissue Value: Fert Kernel vs. Unfert Floret
caaactgtgatggttcatctagaccacttgaccatcctgcggatttgtatgatttccatgtctatactgattctaagactttgtttaacatgaggagcacatttgacagaacatcacgtagtggacctaaggcctttgtgagcgagtacgctgtctggagaagtgacgcgggtagaggcagtcttgcttgcttcgttggctgaagctgctttcctcactggtctggagaagaacagtgatatcgttcagatggcaagttacgctccactcttcgtgaacgacaatgaccaaacgtggaacccggacgctattgtcttcaactcctggcaacactatggaactcctagctactggatgcagacgattttccgcgagtcaagcggcgccatgattcatccggttaatatcagttcccggtactcgagttcgctggccgcgtctgcgatcacgtggcaggatgcagagaatagcttcctgagagtgaaggtcgtgaacttcgggtcggacaccgttaacctcacggtctccacgagcggactcggggccagcgtcaacgcgctgggatcaaccgccaccgtcctcacgtctggcaacgtcatggacgagaactccttcagtaacccgaacaaggttgcgccggtgaaaagccagctgagcaacgccgcggagcagatgcaggtcacgctggctcctcactccttcaccgccttcgatctggcgctggctgagcccaagcttgtggcggagatatgatgtgtgtgctgcacattacagtacacaaacagcgcgcggatggcagcaaccagagggtgtggagtgtggtgtgctgttagcgatcttgatcgataaaaaaggctttgtactggtgtaccacgatacaggataacgtactacgtactgttgcttcatgaaataaaaaccacatcaggtttttgcttggtgttggttggtttc

SEQ ID NO: 13032 - protein, 167 aa, Zea mays subsp. mays
  peptide (1)..(167): Ceres Seq. ID no. 12413100
  misc_feature (1)..(167): Homolog of NCBI NO: 13398414 NR Description: arabinoxylan arabinofuranohydrolase isoenzyme
  misc_feature (1)..(167): Homolog of NCBI NO: 13398412 NR Description: arabinoxylan arabinofuranohydrolase isoenzyme
  misc_feature (1)..(165): Homolog of NCBI NO: 38347003 NR Description: OSJNBb0058J09.4 [Oryza sativa (japonica
  misc_feature (1)..(164): Homolog of NCBI NO: 33151175 NR Description: alpha-L-arabinofuranosidase [Malus x domestica]
  misc_feature (1)..(163): Homolog of NCBI NO: 13937191 NR Description: AT3g10740/T7M13_18 [Arabidopsis thaliana]
  misc_feature (1)..(163): Homolog of NCBI NO: 15228368 NR Description: glycosyl hydrolase family 51; protein id:
  misc_feature (1)..(163): Homolog of NCBI NO: 29825623 NR Description: alpha-L-arabinofuranosidase [Arabidopsis thaliana]
  misc_feature (1)..(158): Homolog of NCBI NO: 16417958 NR Description: arabinosidase ARA-1 [Lycopersicon esculentum]
  misc_feature (1)..(162): Homolog of NCBI NO: 22324432 NR Description: putative arabinoxylan narabinofuranohydrolase
  misc_feature (1)..(167): Homolog of NCBI NO: 22327075 NR Description: glycosyl hydrolase family 51; protein id: supported by cDNA: gi_17380937 [Arabidopsis thaliana]
MASYAPLFVNDNDQTWNPDAIVFNSWQHYGTPSYWMQTIFRESSGAMIHPVNISSRYSSSLAASAITWQDAENSFLRVKVVNFGSDTVNLTVSTSGLGASVNALGSTATVLTSGNVMDENSFSNPNKVAPVKSQLSNAAEQMQVTLAPHSFTAFDLALAEPKLVAEI

SEQ ID NO: 13033 - protein, 132 aa, Zea mays subsp. mays
  peptide (1)..(132): Ceres Seq. ID no. 12413101
  misc_feature (1)..(132): Homolog of NCBI NO: 13398414 NR Description: arabinoxylan arabinofuranohydrolase isoenzyme
  misc_feature (1)..(132): Homolog of NCBI NO: 13398412 NR Description: arabinoxylan arabinofuranohydrolase isoenzyme
  misc_feature (1)..(130): Homolog of NCBI NO: 38347003 NR Description: OSJNBb0058J09.4 [Oryza sativa (japonica
  misc_feature (1)..(129): Homolog of NCBI NO: 33151175 NR Description: alpha-L-arabinofuranosidase [Malus x domestica]
  misc_feature (1)..(128): Homolog of NCBI NO: 13937191 NR Description: AT3g10740/T7M13_18 [Arabidopsis thaliana]
  misc_feature (1)..(128): Homolog of NCBI NO: 15228368 NR Description: glycosyl hydrolase family 51; protein id:
  misc_feature (1)..(128): Homolog of NCBI NO: 29825623 NR Description: alpha-L-arabinofuranosidase [Arabidopsis thaliana]
  misc_feature (1)..(123): Homolog of NCBI NO: 16417958 NR Description: arabinosidase ARA-1 [Lycopersicon esculentum]
  misc_feature (1)..(127): Homolog of NCBI NO: 22324432 NR Description: putative arabinoxylan narabinofuranohydrolase
  misc_feature (1)..(132): Homolog of NCBI NO: 22327075 NR Description: glycosyl hydrolase family 51; protein id: supported by cDNA: gi_17380937 [Arabidopsis thaliana]
MQTIFRESSGAMIHPVNISSRYSSSLAASAITWQDAENSFLRVKVVNFGSDTVNLTVSTSGLGASVNALGSTATVLTSGNVMDENSFSNPNKVAPVKSQLSNAAEQMQVTLAPHSFTAFDLALAEPKLVAEI

SEQ ID NO: 13034 - protein, 121 aa, Zea mays subsp. mays
  peptide (1)..(121): Ceres Seq. ID no. 12413102
  misc_feature (1)..(121): Homolog of NCBI NO: 13398414 NR Description: arabinoxylan arabinofuranohydrolase isoenzyme
  misc_feature (1)..(121): Homolog of NCBI NO: 13398412 NR Description: arabinoxylan arabinofuranohydrolase isoenzyme
  misc_feature (1)..(119): Homolog of NCBI NO: 38347003 NR Description: OSJNBb0058J09.4 [Oryza sativa (japonica
  misc_feature (1)..(118): Homolog of NCBI NO: 33151175 NR Description: alpha-L-arabinofuranosidase [Malus x domestica]
  misc_feature (1)..(117): Homolog of NCBI NO: 13937191 NR Description: AT3g10740/T7M13_18 [Arabidopsis thaliana]
  misc_feature (1)..(117): Homolog of NCBI NO: 15228368 NR Description: glycosyl hydrolase family 51; protein id:
  misc_feature (1)..(117): Homolog of NCBI NO: 29825623 NR Description: alpha-L-arabinofuranosidase [Arabidopsis thaliana]
  misc_feature (1)..(112): Homolog of NCBI NO: 16417958 NR Description: arabinosidase ARA-1 [Lycopersicon esculentum]
  misc_feature (1)..(116): Homolog of NCBI NO: 22324432 NR Description: putative arabinoxylan narabinofuranohydrolase
  misc_feature (1)..(121): Homolog of NCBI NO: 22327075 NR Description: glycosyl hydrolase family 51; protein id: supported by cDNA: gi_17380937 [Arabidopsis thaliana]
MIHPVNISSRYSSSLAASAITWQDAENSFLRVKVVNFGSDTVNLTVSTSGLGASVNALGSTATVLTSGNVMDENSFSNPNKVAPVKSQLSNAAEQMQVTLAPHSFTAFDLALAEPKLVAEI

SEQ ID NO: 13035 - DNA, 1156 bp, Zea mays subsp. mays
  misc_feature (1)..(1156): Ceres Seq. ID no. 12364587
  misc_feature: MA Experiment ID: 108515 Result: Down-regulated in Transcription
  misc_feature: MA Experiment 108515 PARAMETER Experiment Name: Zm_2mM_SA_P Parameter: Age (day) Value: 8
  misc_feature: MA Experiment 108515 PARAMETER Experiment Name: Zm_2mM_SA_P Parameter: Organism Value: Zea mays
  misc_feature: MA Experiment 108515 PARAMETER Experiment Name: Zm_2mM_SA_P Parameter: Plant Line Value: 35A19
  misc_feature: MA Experiment 108515 PARAMETER Experiment Name: Zm_2mM_SA_P Parameter: Timepoint (hr) Value: 12
  misc_feature: MA Experiment 108515 PARAMETER Experiment Name: Zm_2mM_SA_P Parameter: Tissue Value: Aerial
  misc_feature: MA Experiment 108515 PARAMETER Experiment Name: Zm_2mM_SA_P Parameter: Treatment Value: 2mM SA vs. No Treatment
  misc_feature: MA Experiment ID: 108523 Result: Down-regulated in Transcription
  misc_feature: MA Experiment 108523 PARAMETER Experiment Name: Zm_42deg_Heat_P Parameter: Age (day) Value: 8
  misc_feature: MA Experiment 108523 PARAMETER Experiment Name: Zm_42deg_Heat_P Parameter: Organism Value: Zea mays
  misc_feature: MA Experiment 108523 PARAMETER Experiment Name: Zm_42deg_Heat_P Parameter: Plant Line Value: 35A19
  misc_feature: MA Experiment 108523 PARAMETER Experiment Name: Zm_42deg_Heat_P Parameter: Temperature (deg C) Value: 42 vs. 22
  misc_feature: MA Experiment 108523 PARAMETER Experiment Name: Zm_42deg_Heat_P Parameter: Timepoint (hr) Value: 6
  misc_feature: MA Experiment 108523 PARAMETER Experiment Name: Zm_42deg_Heat_P Parameter: Tissue Value: Aerial
  misc_feature: MA Experiment ID: 108527 Result: Down-regulated in Transcription
  misc_feature: MA Experiment 108527 PARAMETER Experiment Name: Zm_5mM_NO_P Parameter: Age (day) Value: 8
  misc_feature: MA Experiment 108527 PARAMETER Experiment Name: Zm_5mM_NO_P Parameter: Organism Value: Zea mays
  misc_feature: MA Experiment 108527 PARAMETER Experiment Name: Zm_5mM_NO_P Parameter: Plant Line Value: 35A19
  misc_feature: MA Experiment 108527 PARAMETER Experiment Name: Zm_5mM_NO_P Parameter: Timepoint (hr) Value: 6
  misc_feature: MA Experiment 108527 PARAMETER Experiment Name: Zm_5mM_NO_P Parameter: Tissue Value: Aerial
  misc_feature: MA Experiment 108527 PARAMETER Experiment Name: Zm_5mM_NO_P Parameter: Treatment Value: 5mM NO vs. No Treatment
  misc_feature: MA Experiment ID: 108529 Result: Down-regulated in Transcription
  misc_feature: MA Experiment 108529 PARAMETER Experiment Name: Zm_Imbibed_Seeds_P Parameter: Age (day) Value: 5 vs. 2
  misc_feature: MA Experiment 108529 PARAMETER Experiment Name: Zm_Imbibed_Seeds_P Parameter: Organism Value: Zea mays
  misc_feature: MA Experiment 108529 PARAMETER Experiment Name: Zm_Imbibed_Seeds_P Parameter: Plant Line Value: 35A19
  misc_feature: MA Experiment 108529 PARAMETER Experiment Name: Zm_Imbibed_Seeds_P Parameter: Tissue Value: Roots vs. Embryo
  misc_feature: MA Experiment ID: 108530 Result: Down-regulated in Transcription
  misc_feature: MA Experiment 108530 PARAMETER Experiment Name: Zm_Imbibed_Seeds_P Parameter: Age (day) Value: 6 vs. 2
  misc_feature: MA Experiment 108530 PARAMETER Experiment Name: Zm_Imbibed_Seeds_P Parameter: Organism Value: Zea mays
  misc_feature: MA Experiment 108530 PARAMETER Experiment Name: Zm_Imbibed_Seeds_P Parameter: Plant Line Value: 35A19
  misc_feature: MA Experiment 108530 PARAMETER Experiment Name: Zm_Imbibed_Seeds_P Parameter: Tissue Value: Aerial vs. Embryo
  misc_feature: MA Experiment ID: 108534 Result: Down-regulated in Transcription
  misc_feature: MA Experiment 108534 PARAMETER Experiment Name: Zm_4deg_Cold_P Parameter: Age (hr) Value: 8
  misc_feature: MA Experiment 108534 PARAMETER Experiment Name: Zm_4deg_Cold_P Parameter: Organism Value: Zea mays
  misc_feature: MA Experiment 108534 PARAMETER Experiment Name: Zm_4deg_Cold_P Parameter: Plant Line Value: 35A19
  misc_feature: MA Experiment 108534 PARAMETER Experiment Name: Zm_4deg_Cold_P Parameter: Temperature (deg C) Value: 4 vs. 22
  misc_feature: MA Experiment 108534 PARAMETER Experiment Name: Zm_4deg_Cold_P Parameter: Timepoint (hr) Value: 6
  misc_feature: MA Experiment 108534 PARAMETER Experiment Name: Zm_4deg_Cold_P Parameter: Tissue Value: Aerial
  misc_feature: MA Experiment ID: 108535 Result: Down-regulated in Transcription
  misc_feature: MA Experiment 108535 PARAMETER Experiment Name: Zm_Meristem_P Parameter: Age (day) Value: 8
  misc_feature: MA Experiment 108535 PARAMETER Experiment Name: Zm_Meristem_P Parameter: Organism Value: Zea mays
  misc_feature: MA Experiment 108535 PARAMETER Experiment Name: Zm_Meristem_P Parameter: Plant Line Value: 35A19
  misc_feature: MA Experiment 108535 PARAMETER Experiment Name: Zm_Meristem_P Parameter: Tissue Value: Root Meristem vs. Above Root Meristem
  misc_feature: MA Experiment ID: 108543 Result: Up-regulated in Transcription
  misc_feature: MA Experiment ID: 108544 Result: Up-regulated in Transcription
  misc_feature: MA Experiment ID: 108547 Result: Down-regulated in Transcription
  misc_feature: MA Experiment 108547 PARAMETER Experiment Name: Zm_Imbibed_Seeds_P Parameter: Age (day) Value: 4 vs. 2
  misc_feature: MA Experiment 108547 PARAMETER Experiment Name: Zm_Imbibed_Seeds_P Parameter: Organism Value: Zea mays
  misc_feature: MA Experiment 108547 PARAMETER Experiment Name: Zm_Imbibed_Seeds_P Parameter: Plant Line Value: 35A19
  misc_feature: MA Experiment 108547 PARAMETER Experiment Name: Zm_Imbibed_Seeds_P Parameter: Tissue Value: Aerial vs. Embryo
  misc_feature: MA Experiment ID: 108689 Result: Down-regulated in Transcription
  misc_feature: MA Experiment 108689 PARAMETER Experiment Name: Zm_Drought_Roots_P Parameter: Age (day) Value: 9
  misc_feature: MA Experiment 108689 PARAMETER Experiment Name: Zm_Drought_Roots_P Parameter: Organism Value: Zea mays
  misc_feature: MA Experiment 108689 PARAMETER Experiment Name: Zm_Drought_Roots_P Parameter: Plant Line Value: 35A19
  misc_feature: MA Experiment 108689 PARAMETER Experiment Name: Zm_Drought_Roots_P Parameter: Timepoint (hr) Value: 24
  misc_feature: MA Experiment 108689 PARAMETER Experiment Name: Zm_Drought_Roots_P Parameter: Tissue Value: Roots
  misc_feature: MA Experiment 108689 PARAMETER Experiment Name: Zm_Drought_Roots_P Parameter: Treatment Value: Drought vs. No Drought
  misc_feature: MA Experiment ID: 20000478 Result: Down-regulated in Transcription
  misc_feature: MA Experiment 20000478 PARAMETER Experiment Name: Zm_5mM_SA_P Parameter: Age (day) Value: 11
  misc_feature: MA Experiment 20000478 PARAMETER Experiment Name: Zm_5mM_SA_P Parameter: Organism Value: Zea mays
  misc_feature: MA Experiment 20000478 PARAMETER Experiment Name: Zm_5mM_SA_P Parameter: Plant Line Value: 35A19
  misc_feature: MA Experiment 20000478 PARAMETER Experiment Name: Zm_5mM_SA_P Parameter: Timepoint (hr) Value: 72
  misc_feature: MA Experiment 20000478 PARAMETER Experiment Name: Zm_5mM_SA_P Parameter: Tissue Value: Aerial
  misc_feature: MA Experiment 20000478 PARAMETER Experiment Name: Zm_5mM_SA_P Parameter: Treatment Value: 5mM SA vs. No Treatment
  misc_feature: MA Experiment ID: 20000479 Result: Down-regulated in Transcription
  misc_feature: MA Experiment 20000479 PARAMETER Experiment Name: Zm_Drought_P Parameter: Age (day) Value: 10
  misc_feature: MA Experiment 20000479 PARAMETER Experiment Name: Zm_Drought_P Parameter: Organism Value: Zea mays
  misc_feature: MA Experiment 20000479 PARAMETER Experiment Name: Zm_Drought_P Parameter: Plant Line Value: 35A19
  misc_feature: MA Experiment 20000479 PARAMETER Experiment Name: Zm_Drought_P Parameter: Timepoint (hr) Value: 48
  misc_feature: MA Experiment 20000479 PARAMETER Experiment Name: Zm_Drought_P Parameter: Tissue Value: Aerial
  misc_feature: MA Experiment 20000479 PARAMETER Experiment Name: Zm_Drought_P Parameter: Treatment Value: Drought vs. No Drought
  misc_feature: MA Experiment ID: 20000480 Result: Down-regulated in Transcription
  misc_feature: MA Experiment 20000480 PARAMETER Experiment Name: Zm_Drought_P Parameter: Age (day) Value: 11
  misc_feature: MA Experiment 20000480 PARAMETER Experiment Name: Zm_Drought_P Parameter: Organism Value: Zea mays
  misc_feature: MA Experiment 20000480 PARAMETER Experiment Name: Zm_Drought_P Parameter: Plant Line Value: 35A19
  misc_feature: MA Experiment 20000480 PARAMETER Experiment Name: Zm_Drought_P Parameter: Timepoint (hr) Value: 72
  misc_feature: MA Experiment 20000480 PARAMETER Experiment Name: Zm_Drought_P Parameter: Tissue Value: Aerial
  misc_feature: MA Experiment 20000480 PARAMETER Experiment Name: Zm_Drought_P Parameter: Treatment Value: Drought vs. No Drought
  misc_feature: MA Experiment ID: 20000492 Result: Down-regulated in Transcription
  misc_feature: MA Experiment 20000492 PARAMETER Experiment Name: Zm_Hybrid_Seed_Dev_P Parameter: DAP Value: 12
  misc_feature: MA Experiment 20000492 PARAMETER Experiment Name: Zm_Hybrid_Seed_Dev_P Parameter: Organism Value: Zea mays
  misc_feature: MA Experiment 20000492 PARAMETER Experiment Name: Zm_Hybrid_Seed_Dev_P Parameter: Plant Line Value: 35A19
  misc_feature: MA Experiment 20000492 PARAMETER Experiment Name: Zm_Hybrid_Seed_Dev_P Parameter: Tissue Value: Fert Kernel vs. Unfert Floret
  misc_feature: MA Experiment ID: 20000533 Result: Down-regulated in Transcription
  misc_feature: MA Experiment 20000533 PARAMETER Experiment Name: Zm_0.001percent_MeJA_P Parameter: Age (day) Value: 11
  misc_feature: MA Experiment 20000533 PARAMETER Experiment Name: Zm_0.001percent_MeJA_P Parameter: Organism Value: Zea mays
  misc_feature: MA Experiment 20000533 PARAMETER Experiment Name: Zm_0.001percent_MeJA_P Parameter: Plant Line Value: 35A19
  misc_feature: MA Experiment 20000533 PARAMETER Experiment Name: Zm_0.001percent_MeJA_P Parameter: Timepoint (hr) Value: 72
  misc_feature: MA Experiment 20000533 PARAMETER Experiment Name: Zm_0.001percent_MeJA_P Parameter: Tissue Value: Aerial
  misc_feature: MA Experiment 20000533 PARAMETER Experiment Name: Zm_0.001percent_MeJA_P Parameter: Treatment Value: 0.001percent MeJA vs. No Treatment
  misc_feature: MA Experiment ID: 20000535 Result: Down-regulated in Transcription
  misc_feature: MA Experiment 20000535 PARAMETER Experiment Name: Zm_Hybrid_Seed_Dev_P Parameter: DAP Value: 30 vs. 12
  misc_feature: MA Experiment 20000535 PARAMETER Experiment Name: Zm_Hybrid_Seed_Dev_P Parameter: Organism Value: Zea mays
  misc_feature: MA Experiment 20000535 PARAMETER Experiment Name: Zm_Hybrid_Seed_Dev_P Parameter: Plant Line Value: 35A19
  misc_feature: MA Experiment 20000535 PARAMETER Experiment Name: Zm_Hybrid_Seed_Dev_P Parameter: Tissue Value: Embryo vs. Unfert Floret
gcattcagcgtgcgaccgaagctagctagcagttattcttgctttgcattaattattgcgagatcgatgacgatgtccattgttgctgccgtgctgctgttgctgctcgtcgtacatccacgggcggcagcgtcgcagccttctccgggctacttcccgagctccacggtgaggcccatggccttctcggatggatacgacaacctgtgggggccgcagcaccagacgctgtcgcaggacaggatggcgctcacgctcttgatggaccgcacctcaggcagcgggttcaagtccaagcgctcgtaccggaacggctacttcggcgtctccatcaaggtgcagccgggctacaccgccggcgtcaacaccgccttctacctgtccaacaacgagctgtacccggggaggcacgacgagatcgacatggagctgctgggcaccgtgccgggggagccctacacgctgcagaccaacgtgtacgtgcggggcaccggcgacggcgcgcgcctcgtgggccgggagatgcgcttccacctctggttcgacccggccgccgacttccaccactacgccatcctctggaaccccgaccagatcgtcttcctcgtcgacgacgtccccatcaggcgctacgccgccgccagtgcgccgttcttccccgaccgccagatgtgggcgtacggctccatctgggacgcctccgactgggccaccgacggcggccgctacagggccgactaccgctaccagcccttcctggcgggattccgggggttcaggaccgccggatgcgaggacgcccagtgccgtcccgtgccggcgtcccccgccggcgccggactcagcgtgcagcagcgggacgccatgcgctgggcgcagcagacctccatggtctactactactgccaggattacaccaaggatcgctccttgtacccagagtgctcgctcgctagctagcctagctaccactaccagagcaagagcatgcatggaggaggcgtgcgagtgaagaagcgccgccctacgtacgtaccgttctaaaattgtatgtacaattaagtctccatccacatccatatatacatatgtaatgtataattaagtccattattaatttaatcatcaaaaaatggaacatgcctatatatttcct

SEQ ID NO: 13036 - protein, 319 aa, Zea mays subsp. mays
  peptide (1)..(319): Ceres Seq. ID no. 12364588
  misc_feature (62)..(249): Pfam Name: Glycosyl hydrolases family 16 Pfam Description: Glycosyl hydrolases family 16
  misc_feature (31)..(315): Homolog of NCBI NO: 37536586 NR Description: putative cellulase [Oryza sativa (japonica
  misc_feature (60)..(315): Homolog of NCBI NO: 34902398 NR Description: Putative cellulase [Oryza sativa (japonica
  misc_feature (20)..(315): Homolog of NCBI NO: 34901732 NR Description: putative xyloglucan endo-transglycosylase [Oryza
  misc_feature (25)..(315): Homolog of NCBI NO: 15228047 NR Description: xyloglucan endotransglycosylase, putative; id: At2g36870.1, supported by cDNA: 7831., supported by cDNA:
  misc_feature (27)..(315): Homolog of NCBI NO: 14029149 NR Description: xyloglucan endo-transglycosylase [Carica papaya]
  misc_feature (32)..(315): Homolog of NCBI NO: 17402583 NR Description: Xyloglucan endo-transglycosylase [Vitis labrusca
  misc_feature (28)..(315): Homolog of NCBI NO: 15230574 NR Description: xyloglucan endotransglycosylase, putative; id: At3g44990.1, supported by cDNA: gi_15810248 [Arabidopsis
  misc_feature (28)..(315): Homolog of NCBI NO: 1769907 NR Description: xyloglucan endo-transglycosylase [Arabidopsis
  misc_feature (25)..(315): Homolog of NCBI NO: 1362078 NR Description: xyloglucan endo-1,4-beta-D-glucanase (EC 3.2.1.-)
  misc_feature (127)..(315): Homolog of NCBI NO: 1084391 NR Description: xyloglucan endo-1,4-beta-D-glucanase (EC 3.2.1.-)
AFSVRPKLASSYSCFALIIARSMTMSIVAAVLLLLLVVHPRAAASQPSPGYFPSSTVRPMAFSDGYDNLWGPQHQTLSQDRMALTLLMDRTSGSGFKSKRSYRNGYFGVSIKVQPGYTAGVNTAFYLSNNELYPGRHDEIDMELLGTVPGEPYTLQTNVYVRGTGDGARLVGREMRFHLWFDPAADFHHYAILWNPDQIVFLVDDVPIRRYAAASAPFFPDRQMWAYGSIWDASDWATDGGRYRADYRYQPFLAGFRGFRTAGCEDAQCRPVPASPAGAGLSVQQRDAMRWAQQTSMVYYYCQDYTKDRSLYPECSLAS

SEQ ID NO: 13037 - protein, 297 aa, Zea mays subsp. mays
  peptide (1)..(297): Ceres Seq. ID no. 12364589
  misc_feature (40)..(227): Pfam Name: Glycosyl hydrolases family 16 Pfam Description: Glycosyl hydrolases family 16
  misc_feature (9)..(293): Homolog of NCBI NO: 37536586 NR Description: putative cellulase [Oryza sativa (japonica
  misc_feature (38)..(293): Homolog of NCBI NO: 34902398 NR Description: Putative cellulase [Oryza sativa (japonica
  misc_feature (1)..(293): Homolog of NCBI NO: 34901732 NR Description: putative xyloglucan endo-transglycosylase [Oryza
  misc_feature (3)..(293): Homolog of NCBI NO: 15228047 NR Description: xyloglucan endotransglycosylase, putative; id: At2g36870.1, supported by cDNA: 7831., supported by cDNA:
  misc_feature (5)..(293): Homolog of NCBI NO: 14029149 NR Description: xyloglucan endo-transglycosylase [Carica papaya]
  misc_feature (10)..(293): Homolog of NCBI NO: 17402583 NR Description: Xyloglucan endo-transglycosylase [Vitis labrusca
  misc_feature (6)..(293): Homolog of NCBI NO: 15230574 NR Description: xyloglucan endotransglycosylase, putative; id: At3g44990.1, supported by cDNA: gi_15810248 [Arabidopsis
  misc_feature (6)..(293): Homolog of NCBI NO: 1769907 NR Description: xyloglucan endo-transglycosylase [Arabidopsis
  misc_feature (3)..(293): Homolog of NCBI NO: 1362078 NR Description: xyloglucan endo-1,4-beta-D-glucanase (EC 3.2.1.-)
  misc_feature (105)..(293): Homolog of NCBI NO: 1084391 NR Description: xyloglucan endo-1,4-beta-D-glucanase (EC 3.2.1.-)
MTMSIVAAVLLLLLVVHPRAAASQPSPGYFPSSTVRPMAFSDGYDNLWGPQHQTLSQDRMALTLLMDRTSGSGFKSKRSYRNGYFGVSIKVQPGYTAGVNTAFYLSNNELYPGRHDEIDMELLGTVPGEPYTLQTNVYVRGTGDGARLVGREMRFHLWFDPAADFHHYAILWNPDQIVFLVDDVPIRRYAAASAPFFPDRQMWAYGSIWDASDWATDGGRYRADYRYQPFLAGFRGFRTAGCEDAQCRPVPASPAGAGLSVQQRDAMRWAQQTSMVYYYCQDYTKDRSLYPECSLAS

SEQ ID NO: 13038 - protein, 295 aa, Zea mays subsp. mays
  peptide (1)..(295): Ceres Seq. ID no. 12364590
  misc_feature (38)..(225): Pfam Name: Glycosyl hydrolases family 16 Pfam Description: Glycosyl hydrolases family 16
  misc_feature (7)..(291): Homolog of NCBI NO: 37536586 NR Description: putative cellulase [Oryza sativa (japonica
  misc_feature (36)..(291): Homolog of NCBI NO: 34902398 NR Description: Putative cellulase [Oryza sativa (japonica
  misc_feature (1)..(291): Homolog of NCBI NO: 34901732 NR Description: putative xyloglucan endo-transglycosylase [Oryza
  misc_feature (1)..(291): Homolog of NCBI NO: 15228047 NR Description: xyloglucan endotransglycosylase, putative; id: At2g36870.1, supported by cDNA: 7831., supported by cDNA:
  misc_feature (3)..(291): Homolog of NCBI NO: 14029149 NR Description: xyloglucan endo-transglycosylase [Carica papaya]
  misc_feature (8)..(291): Homolog of NCBI NO: 17402583 NR Description: Xyloglucan endo-transglycosylase [Vitis labrusca
  misc_feature (4)..(291): Homolog of NCBI NO: 15230574 NR Description: xyloglucan endotransglycosylase, putative; id: At3g44990.1, supported by cDNA: gi_15810248 [Arabidopsis
  misc_feature (4)..(291): Homolog of NCBI NO: 1769907 NR Description: xyloglucan endo-transglycosylase [Arabidopsis
  misc_feature (1)..(291): Homolog of NCBI NO: 1362078 NR Description: xyloglucan endo-1,4-beta-D-glucanase (EC 3.2.1.-)
  misc_feature (103)..(291): Homolog of NCBI NO: 1084391 NR Description: xyloglucan endo-1,4-beta-D-glucanase (EC 3.2.1.-)
MSIVAAVLLLLLVVHPRAAASQPSPGYFPSSTVRPMAFSDGYDNLWGPQHQTLSQDRMALTLLMDRTSGSGFKSKRSYRNGYFGVSIKVQPGYTAGVNTAFYLSNNELYPGRHDEIDMELLGTVPGEPYTLQTNVYVRGTGDGARLVGREMRFHLWFDPAADFHHYAILWNPDQIVFLVDDVPIRRYAAASAPFFPDRQMWAYGSIWDASDWATDGGRYRADYRYQPFLAGFRGFRTAGCEDAQCRPVPASPAGAGLSVQQRDAMRWAQQTSMVYYYCQDYTKDRSLYPECSLAS

SEQ ID NO: 13039 - DNA, 1054 bp, Zea mays subsp. mays
  misc_feature (1)..(1054): Ceres Seq. ID no. 12340668
  misc_feature: MA Experiment ID: 108689 Result: Up-regulated in Transcription
  misc_feature: MA Experiment 108689 PARAMETER Experiment Name: Zm_Drought_Roots_P Parameter: Age (day) Value: 9
  misc_feature: MA Experiment 108689 PARAMETER Experiment Name: Zm_Drought_Roots_P Parameter: Organism Value: Zea mays
  misc_feature: MA Experiment 108689 PARAMETER Experiment Name: Zm_Drought_Roots_P Parameter: Plant Line Value: 35A19
  misc_feature: MA Experiment 108689 PARAMETER Experiment Name: Zm_Drought_Roots_P Parameter: Timepoint (hr) Value: 24
  misc_feature: MA Experiment 108689 PARAMETER Experiment Name: Zm_Drought_Roots_P Parameter: Tissue Value: Roots
  misc_feature: MA Experiment 108689 PARAMETER Experiment Name: Zm_Drought_Roots_P Parameter: Treatment Value: Drought vs. No Drought
ggaagaaacactcgcttctgagtttggtcgcggttttgcccctcccttcttgaactcctccgctcgatcgaactcagttccgattcggcaggttcattgtgaagttgaggtgggtggtataagcatcgaagagagcatgagcactgccagtggtacaaggcgtgcaccaagaagacagtcgcaagatgggtctgctgataaagtagtggtgatcatcgaagcaacctccccggtggtggggagccgtcgtggaccaccgacccctgttcctggcgcccaaaactcacccattgatgtggaggccatcgaagatgaagttcaggcagtatctccctcgcgagtgcccccaccgaggagggacaggagaaccaggagggaacctataacagtggttgacttggaggttgacgctagccaggaagggaacaaacgccagagggttgtggcagtagatcacctctctcccgattggggagcagggtccagcttgcagccaaatggcgtacaaaccggcaaagagcctgctaaggaggttcccaaggaaccatcttttacctgcccaatatgttggaataagatggaggagccttccacaacgacttgtggccatatcttctgcgacacgtgcatcaaacaggccatcaaggttcagaagaaatgccctacttgcaggaaggggctgaaaatgaatagtgttcatcgtattttccttccgaacgcttctagttaaggtcgattggctttgtcaaaggaacttctggtaacacaaggctgtgcaatgtacagtgaggatcagaagttcttgggtgaacagcagatagatgtttcatcctagtctgtatcatttaacagcatcactaggagctcatcatgaaaacttcctgactagggaagtggatatcagcctcagttttactggcctcttattgcatccgtggttcataatgttatttcgctgttgtatgtattaggttattactgtggtggattagtgtaactgggatttgcttcattgtaaaatgataatgacgagttgaaacgtttagcatttttg

SEQ ID NO: 13040 - protein, 242 aa, Zea mays subsp. mays
  peptide (1)..(242): Ceres Seq. ID no. 12340669
  misc_feature (191)..(223): Pfam Name: Zinc finger, C3HC4 type (RING finger) Pfam Description: Zinc finger, C3HC4 type (RING finger)
  misc_feature (54)..(238): Homolog of NCBI NO: 21537318 NR Description: unknown [Arabidopsis thaliana]
  misc_feature (54)..(238): Homolog of NCBI NO: 18422940 NR Description: Expressed protein; protein id: At5g48655.2, by cDNA: 12974. [Arabidopsis thaliana] unknown protein [Arabidopsis thaliana]
  misc_feature (57)..(238): Homolog of NCBI NO: 21954077 NR Description: unknown protein [Arabidopsis thaliana]
  misc_feature (86)..(238): Homolog of NCBI NO: 15231414 NR Description: putative RING zinc finger protein; protein id: [Arabidopsis thaliana] >gi|6642645|gb|AAF20226.1|AC012395_13
  misc_feature (86)..(238): Homolog of NCBI NO: 26451887 NR Description: putative RING finger protein [Arabidopsis
  misc_feature (191)..(242): Homolog of NCBI NO: 19386727 NR Description: P0678F11.16 [Oryza sativa (japonica
  misc_feature (184)..(237): Homolog of NCBI NO: 20129579 NR Description: CG15150-PA [Drosophila melanogaster]
  misc_feature (113)..(237): Homolog of NCBI NO: 24644441 NR Description: CG10981-PB [Drosophila melanogaster]
  misc_feature (113)..(237): Homolog of NCBI NO: 21357313 NR Description: CG10981-PA [Drosophila melanogaster]
  misc_feature (81)..(237): Homolog of NCBI NO: 33859620 NR Description: ring finger protein 4 [Mus musculus] RING finger protein 4 >gi|6006817|gb|AAF00620.1| ring finger
EETLASEFGRGFAPPFLNSSARSNSVPIRQVHCEVEVGGISIEESMSTASGTRRAPRRQSQDGSADKVVVIIEATSPVVGSRRGPPTPVPGAQNSPIDVEAIEDEVQAVSPSRVPPPRRDRRTRREPITVVDLEVDASQEGNKRQRVVAVDHLSPDWGAGSSLQPNGVQTGKEPAKEVPKEPSFTCPICWNKMEEPSTTTCGHIFCDTCIKQAIKVQKKCPTCRKGLKMNSVHRIFLPNASS

SEQ ID NO: 13041 - protein, 197 aa, Zea mays subsp. mays
  peptide (1)..(197): Ceres Seq. ID no. 12340670
  misc_feature (146)..(178): Pfam Name: Zinc finger, C3HC4 type (RING finger) Pfam Description: Zinc finger, C3HC4 type (RING finger)
  misc_feature (9)..(193): Homolog of NCBI NO: 21537318 NR Description: unknown [Arabidopsis thaliana]
  misc_feature (9)..(193): Homolog of NCBI NO: 18422940 NR Description: Expressed protein; protein id: At5g48655.2, by cDNA: 12974. [Arabidopsis thaliana] unknown protein [Arabidopsis thaliana]
  misc_feature (12)..(193): Homolog of NCBI NO: 21954077 NR Description: unknown protein [Arabidopsis thaliana]
  misc_feature (41)..(193): Homolog of NCBI NO: 15231414 NR Description: putative RING zinc finger protein; protein id: [Arabidopsis thaliana] >gi|6642645|gb|AAF20226.1|AC012395_13
  misc_feature (41)..(193): Homolog of NCBI NO: 26451887 NR Description: putative RING finger protein [Arabidopsis
  misc_feature (146)..(197): Homolog of NCBI NO: 19386727 NR Description: P0678F11.16 [Oryza sativa (japonica
  misc_feature (139)..(192): Homolog of NCBI NO: 20129579 NR Description: CG15150-PA [Drosophila melanogaster]
  misc_feature (68)..(192): Homolog of NCBI NO: 24644441 NR Description: CG10981-PB [Drosophila melanogaster]
  misc_feature (68)..(192): Homolog of NCBI NO: 21357313 NR Description: CG10981-PA [Drosophila melanogaster]
  misc_feature (36)..(192): Homolog of NCBI NO: 33859620 NR Description: ring finger protein 4 [Mus musculus] RING finger protein 4 >gi|6006817|gb|AAF00620.1| ring finger
MSTASGTRRAPRRQSQDGSADKVVVIIEATSPVVGSRRGPPTPVPGAQNSPIDVEAIEDEVQAVSPSRVPPPRRDRRTRREPITVVDLEVDASQEGNKRQRVVAVDHLSPDWGAGSSLQPNGVQTGKEPAKEVPKEPSFTCPICWNKMEEPSTTTCGHIFCDTCIKQAIKVQKKCPTCRKGLKMNSVHRIFLPNASS

SEQ ID NO: 13042 - DNA, 1264 bp, Zea mays subsp. mays
  misc_feature (1)..(1264): Ceres Seq. ID no. 12411439
  misc_feature: MA Experiment ID: 108523 Result: Down-regulated in Transcription
  misc_feature: MA Experiment 108523 PARAMETER Experiment Name: Zm_42deg_Heat_P Parameter: Age (day) Value: 8
  misc_feature: MA Experiment 108523 PARAMETER Experiment Name: Zm_42deg_Heat_P Parameter: Organism Value: Zea mays
  misc_feature: MA Experiment 108523 PARAMETER Experiment Name: Zm_42deg_Heat_P Parameter: Plant Line Value: 35A19
  misc_feature: MA Experiment 108523 PARAMETER Experiment Name: Zm_42deg_Heat_P Parameter: Temperature (deg C) Value: 42 vs. 22
  misc_feature: MA Experiment 108523 PARAMETER Experiment Name: Zm_42deg_Heat_P Parameter: Timepoint (hr) Value: 6
  misc_feature: MA Experiment 108523 PARAMETER Experiment Name: Zm_42deg_Heat_P Parameter: Tissue Value: Aerial
  misc_feature: MA Experiment ID: 108527 Result: Up-regulated in Transcription
  misc_feature: MA Experiment 108527 PARAMETER Experiment Name: Zm_5mM_NO_P Parameter: Age (day) Value: 8
  misc_feature: MA Experiment 108527 PARAMETER Experiment Name: Zm_5mM_NO_P Parameter: Organism Value: Zea mays
  misc_feature: MA Experiment 108527 PARAMETER Experiment Name: Zm_5mM_NO_P Parameter: Plant Line Value: 35A19
  misc_feature: MA Experiment 108527 PARAMETER Experiment Name: Zm_5mM_NO_P Parameter: Timepoint (hr) Value: 6
  misc_feature: MA Experiment 108527 PARAMETER Experiment Name: Zm_5mM_NO_P Parameter: Tissue Value: Aerial
  misc_feature: MA Experiment 108527 PARAMETER Experiment Name: Zm_5mM_NO_P Parameter: Treatment Value: 5mM NO vs. No Treatment
  misc_feature: MA Experiment ID: 108535 Result: Down-regulated in Transcription
  misc_feature: MA Experiment 108535 PARAMETER Experiment Name: Zm_Meristem_P Parameter: Age (day) Value: 8
  misc_feature: MA Experiment 108535 PARAMETER Experiment Name: Zm_Meristem_P Parameter: Organism Value: Zea mays
  misc_feature: MA Experiment 108535 PARAMETER Experiment Name: Zm_Meristem_P Parameter: Plant Line Value: 35A19
  misc_feature: MA Experiment 108535 PARAMETER Experiment Name: Zm_Meristem_P Parameter: Tissue Value: Root Meristem vs. Above Root Meristem
  misc_feature: MA Experiment ID: 108543 Result: Down-regulated in Transcription
  misc_feature: MA Experiment ID: 20000535 Result: Down-regulated in Transcription
  misc_feature: MA Experiment 20000535 PARAMETER Experiment Name: Zm_Hybrid_Seed_Dev_P Parameter: DAP Value: 30 vs. 12
  misc_feature: MA Experiment 20000535 PARAMETER Experiment Name: Zm_Hybrid_Seed_Dev_P Parameter: Organism Value: Zea mays
  misc_feature: MA Experiment 20000535 PARAMETER Experiment Name: Zm_Hybrid_Seed_Dev_P Parameter: Plant Line Value: 35A19
  misc_feature: MA Experiment 20000535 PARAMETER Experiment Name: Zm_Hybrid_Seed_Dev_P Parameter: Tissue Value: Embryo vs. Unfert Floret
atgccagagcaaacccataggtccagtccaaatccaatccctgttgccatgagaatttcaggggcagccatggccgaaaaggagagcaacggagtgcgggtgtgcgtcaccggaggagccgggttcatcggctcctggctcgtcaggaagctcctcgagaaaggctacaccgtccacgccaccctgcggaacaccggggacgaggcgaaggcggggctgctgcgtcggctggtccccggcgcagcggagcggctgcggttgttccaggccgacctcttcgacgccgccaccttcgcgccggcgatcgctgggtgccagttcgtcttcctcgtcgccacgccattcgggctcgatagcgccggctcccagtataagagcacggcggaagctgtggtggacgcggtgcacgcgatcctccggcaatgcgaggagtccaggacggtgaagcgagtgatccacacggcctccgtagcggccgcctcgccgctgctggaggaggaggtccccgcctccggcgtcgggtacagagacttcatcgacgaatcttgttggacttcgctcaacgttgactatcctctacgaagcgcacacttcgacaagtacatactgtcgaagctgcagtcggagcaagagctcctgagctacaacaacggcgagagtccggcgttcgaggtggtgaccctgccgctggggctcgtggcgggcgacacggtcctcggccgcgccccggagacggtggagagcgccgtggcgcccgtgtcccgcagcgagccctacttcggcctcctgcgcatactgcagcagctcctggggtcgctgccgctggtgcacgtggacgacgtctgcgacgcgctcgtcttctgcatggagcggcgcccctccgtcgccggccgcttcctctgcgccgccgcgtacccgacgatccacgacgtggtcgcccactacgccagcaagttccctcacctcgacatcttgaaagagacgacggaggcggtggcgacggtgcggcctgcccgggacaggttgggcgagctgggcttcaagtacaagtacggcatggaagagattctggatagcagcgttgcctgtgcggcgagattgggttcccttgacggatccaagctcggcctacagaaaggataaaagctcgaagcttactcataagcaccatggggaacttggattgttcgctgtccactatacgcgttcgaaatttggaaactagacatactccaataaaacaagaggtaaagaaacggaattc

SEQ ID NO: 13043 - protein, 380 aa, Zea mays subsp. mays
  peptide (1)..(380): Ceres Seq. ID no. 12411440
  misc_feature (34)..(171): Pfam Name: NAD dependent epimerase/dehydratase family Pfam Description: NAD dependent epimerase/dehydratase family
  misc_feature (24)..(380): Homolog of NCBI NO: 7431417 NR Description: NADPH HC toxin reductase hm1 - maize
  misc_feature (24)..(379): Homolog of NCBI NO: 2911362 NR Description: NADPH HC toxin reductase [Zea mays]
  misc_feature (24)..(379): Homolog of NCBI NO: 7431414 NR Description: NADPH HC toxin reductase - maize
  misc_feature (24)..(380): Homolog of NCBI NO: 7431416 NR Description: NADPH HC toxin reductase - maize
  misc_feature (24)..(380): Homolog of NCBI NO: 7431413 NR Description: NADPH HC-toxin reductase - maize
  misc_feature (17)..(380): Homolog of NCBI NO: 7431412 NR Description: HC-toxin reductase (EC 1.-.-.-) - barley
  misc_feature (67)..(304): Homolog of NCBI NO: 21927696 NR Description: NADPH HC toxin reductase [Zea mays subsp. mays]
  misc_feature (67)..(304): Homolog of NCBI NO: 21927715 NR Description: NADPH HC toxin reductase [Zea mays subsp.
  misc_feature (67)..(304): Homolog of NCBI NO: 21927713 NR Description: NADPH HC toxin reductase [Zea mays subsp.
  misc_feature (67)..(304): Homolog of NCBI NO: 21927723 NR Description: NADPH HC toxin reductase [Zea mays subsp.
MPEQTHRSSPNPIPVAMRISGAAMAEKESNGVRVCVTGGAGFIGSWLVRKLLEKGYTVHATLRNTGDEAKAGLLRRLVPGAAERLRLFQADLFDAATFAPAIAGCQFVFLVATPFGLDSAGSQYKSTAEAVVDAVHAILRQCEESRTVKRVIHTASVAAASPLLEEEVPASGVGYRDFIDESCWTSLNVDYPLRSAHFDKYILSKLQSEQELLSYNNGESPAFEVVTLPLGLVAGDTVLGRAPETVESAVAPVSRSEPYFGLLRILQQLLGSLPLVHVDDVCDALVFCMERRPSVAGRFLCAAAYPTIHDVVAHYASKFPHLDILKETTEAVATVRPARDRLGELGFKYKYGMEEILDSSVACAARLGSLDGSKLGLQKG

SEQ ID NO: 13044 - protein, 364 aa, Zea mays subsp. mays
  peptide (1)..(364): Ceres Seq. ID no. 12411441
  misc_feature (18)..(155): Pfam Name: NAD dependent epimerase/dehydratase family Pfam Description: NAD dependent epimerase/dehydratase family
  misc_feature (51)..(288): Homolog of NCBI NO: 21927713 NR Description: NADPH HC toxin reductase [Zea mays subsp.
  misc_feature (8)..(364): Homolog of NCBI NO: 7431417 NR Description: NADPH HC toxin reductase hm1 - maize
  misc_feature (8)..(363): Homolog of NCBI NO: 7431414 NR Description: NADPH HC toxin reductase - maize
  misc_feature (8)..(364): Homolog of NCBI NO: 7431413 NR Description: NADPH HC-toxin reductase - maize
  misc_feature (51)..(288): Homolog of NCBI NO: 21927696 NR Description: NADPH HC toxin reductase [Zea mays subsp. mays]
  misc_feature (51)..(288): Homolog of NCBI NO: 21927715 NR Description: NADPH HC toxin reductase [Zea mays subsp.
  misc_feature (1)..(364): Homolog of NCBI NO: 7431412 NR Description: HC-toxin reductase (EC 1.-.-.-) - barley
  misc_feature (8)..(364): Homolog of NCBI NO: 7431416 NR Description: NADPH HC toxin reductase - maize
  misc_feature (8)..(363): Homolog of NCBI NO: 2911362 NR Description: NADPH HC toxin reductase [Zea mays]
  misc_feature (51)..(288): Homolog of NCBI NO: 21927723 NR Description: NADPH HC toxin reductase [Zea mays subsp.
MRISGAAMAEKESNGVRVCVTGGAGFIGSWLVRKLLEKGYTVHATLRNTGDEAKAGLLRRLVPGAAERLRLFQADLFDAATFAPAIAGCQFVFLVATPFGLDSAGSQYKSTAEAVVDAVHAILRQCEESRTVKRVIHTASVAAASPLLEEEVPASGVGYRDFIDESCWTSLNVDYPLRSAHFDKYILSKLQSEQELLSYNNGESPAFEVVTLPLGLVAGDTVLGRAPETVESAVAPVSRSEPYFGLLRILQQLLGSLPLVHVDDVCDALVFCMERRPSVAGRFLCAAAYPTIHDVVAHYASKFPHLDILKETTEAVATVRPARDRLGELGFKYKYGMEEILDSSVACAARLGSLDGSKLGLQKG

SEQ ID NO: 13045 - protein, 357 aa, Zea mays subsp. mays
  peptide (1)..(357): Ceres Seq. ID no. 12411442
  misc_feature (11)..(148): Pfam Name: NAD dependent epimerase/dehydratase family Pfam Description: NAD dependent epimerase/dehydratase family
  misc_feature (1)..(357): Homolog of NCBI NO: 7431417 NR Description: NADPH HC toxin reductase hm1 - maize
  misc_feature (1)..(356): Homolog of NCBI NO: 2911362 NR Description: NADPH HC toxin reductase [Zea mays]
  misc_feature (1)..(356): Homolog of NCBI NO: 7431414 NR Description: NADPH HC toxin reductase - maize
  misc_feature (1)..(357): Homolog of NCBI NO: 7431416 NR Description: NADPH HC toxin reductase - maize
  misc_feature (1)..(357): Homolog of NCBI NO: 7431413 NR Description: NADPH HC-toxin reductase - maize
  misc_feature (1)..(357): Homolog of NCBI NO: 7431412 NR Description: HC-toxin reductase (EC 1.-.-.-) - barley
  misc_feature (44)..(281): Homolog of NCBI NO: 21927696 NR Description: NADPH HC toxin reductase [Zea mays subsp. mays]
  misc_feature (44)..(281): Homolog of NCBI NO: 21927715 NR Description: NADPH HC toxin reductase [Zea mays subsp.
  misc_feature (44)..(281): Homolog of NCBI NO: 21927713 NR Description: NADPH HC toxin reductase [Zea mays subsp.
  misc_feature (44)..(281): Homolog of NCBI NO: 21927723 NR Description: NADPH HC toxin reductase [Zea mays subsp.
MAEKESNGVRVCVTGGAGFIGSWLVRKLLEKGYTVHATLRNTGDEAKAGLLRRLVPGAAERLRLFQADLFDAATFAPAIAGCQFVFLVATPFGLDSAGSQYKSTAEAVVDAVHAILRQCEESRTVKRVIHTASVAAASPLLEEEVPASGVGYRDFIDESCWTSLNVDYPLRSAHFDKYILSKLQSEQELLSYNNGESPAFEVVTLPLGLVAGDTVLGRAPETVESAVAPVSRSEPYFGLLRILQQLLGSLPLVHVDDVCDALVFCMERRPSVAGRFLCAAAYPTIHDVVAHYASKFPHLDILKETTEAVATVRPARDRLGELGFKYKYGMEEILDSSVACAARLGSLDGSKLGLQKG

SEQ ID NO: 13046 - DNA, 1177 bp, Zea mays subsp. mays
  misc_feature (1)..(1177): Ceres Seq. ID no. 12341403
  misc_feature: MA Experiment ID: 20000534 Result: Down-regulated in Transcription
  misc_feature: MA Experiment 20000534 PARAMETER Experiment Name: Zm_Hybrid_Pollen_P Parameter: Age (day) Value: 8
  misc_feature: MA Experiment 20000534 PARAMETER Experiment Name: Zm_Hybrid_Pollen_P Parameter: Organism Value: Zea mays
  misc_feature: MA Experiment 20000534 PARAMETER Experiment Name: Zm_Hybrid_Pollen_P Parameter: Plant Line Value: 35A19
  misc_feature: MA Experiment 20000534 PARAMETER Experiment Name: Zm_Hybrid_Pollen_P Parameter: Tissue Value: Pollen vs. Aerial
acatatgctgtccgtcaccgcgcgcgcctccttgcccttcttcaccctttcctcccggacccggcgtctccgtgcccgtgcgtgccttctccggcctgcggtctcctccaccggccaccgctgcctcgcaattgggcaaggcaatcagaccgctcccatcaaccgccctgaccgcgcgaggaagatcaaacgcggaggccgtccgtccctcccgcgttatcgtgatgccaggcctcgccgcagccgagcaggacgccgtctcgctggtgcggcgcgtcgcccgcgctctcaaccgccgcttcaccgacatcgtcgcactgctcttcagccacaagggcgctggatcgctcggcgccgtcgcggggttcgccatcgccgtcgtgttcgcgtggaagttcctgcgcccccgcagacgtgctcccaagcggcccccacctacccctgcagcggctcccgctgcgactgtgcctgatgcggccgagcctatcggtgactcaggcaaggtagtaacacgggaaattgtggtgaagcgactgaaaggctgcagaaaggttacatgccaacttctcggtgttgtttttgaggaaaaaattcctgaggagcttcagaaacatgccacagttagaccctccgtggtagagctgctactggaaatatccagatattgtgatctctacctaatggagactgtaattgacgataagagcgaggaaaatgctctcatggccctggagatctctggacttttcagaactggtggcctgatgaaagagaaggtgctcttttgcagctctgaagttggtcgaacttcatttgttcgacagttggagtcagattttcacatagacacgagccttgacatagtttctcaactatctcggttcattcgatgccaactatttatttccacggtggaaggagaacagcttgcaggcaacgtattcaattctccaagtcttgagcagttcttctcttgatggcgggacgcaaagaaaggccttctgcactccaaacaaatgtgctgatttcacaattgtgacttgtgagttgtaggcttgtagcgcccccaaccaaggcctggacgcaacaaacaccctactcctgttggagttaagttgtgatcatgcaagatgtatattaaacagacaataataagttggtaaaaatattcatattt

SEQ ID NO: 13047 - protein, 324 aa, Zea mays subsp. mays
  peptide (1)..(324): Ceres Seq. ID no. 12341404
  misc_feature (75)..(324): Homolog of NCBI NO: 38345629 NR Description: OSJNBb0004A17.10 [Oryza sativa (japonica
  misc_feature (155)..(323): Homolog of NCBI NO: 17381010 NR Description: unknown protein [Arabidopsis thaliana]
  misc_feature (83)..(162): Homolog of NCBI NO: 17381010 NR Description: unknown protein [Arabidopsis thaliana]
  misc_feature (176)..(323): Homolog of NCBI NO: 21618311 NR Description: unknown [Arabidopsis thaliana]
  misc_feature (182)..(292): Homolog of NCBI NO: 39546241 NR Description: OSJNBa0089N06.11 [Oryza sativa (japonica
  misc_feature (227)..(323): Homolog of NCBI NO: 18403177 NR Description: unknown protein; protein id: At3g21865.1, by cDNA: 250935., supported by cDNA: gi_20465874 [Arabidopsis
ICCPSPRAPPCPSSPFPPGPGVSVPVRAFSGLRSPPPATAASQLGKAIRPLPSTALTARGRSNAEAVRPSRVIVMPGLAAAEQDAVSLVRRVARALNRRFTDIVALLFSHKGAGSLGAVAGFAIAVVFAWKFLRPRRRAPKRPPPTPAAAPAATVPDAAEPIGDSGKVVTREIVVKRLKGCRKVTCQLLGVVFEEKIPEELQKHATVRPSVVELLLEISRYCDLYLMETVIDDKSEENALMALEISGLFRTGGLMKEKVLFCSSEVGRTSFVRQLESDFHIDTSLDIVSQLSRFIRCQLFISTVEGEQLAGNVFNSPSLEQFFS

SEQ ID NO: 13048 - protein, 250 aa, Zea mays subsp. mays
  peptide (1)..(250): Ceres Seq. ID no. 12341405
  misc_feature (1)..(250): Homolog of NCBI NO: 38345629 NR Description: OSJNBb0004A17.10 [Oryza sativa (japonica
  misc_feature (81)..(249): Homolog of NCBI NO: 17381010 NR Description: unknown protein [Arabidopsis thaliana]
  misc_feature (9)..(88): Homolog of NCBI NO: 17381010 NR Description: unknown protein [Arabidopsis thaliana]
  misc_feature (102)..(249): Homolog of NCBI NO: 21618311 NR Description: unknown [Arabidopsis thaliana]
  misc_feature (108)..(218): Homolog of NCBI NO: 39546241 NR Description: OSJNBa0089N06.11 [Oryza sativa (japonica
  misc_feature (153)..(249): Homolog of NCBI NO: 18403177 NR Description: unknown protein; protein id: At3g21865.1, by cDNA: 250935., supported by cDNA: gi_20465874 [Arabidopsis
MPGLAAAEQDAVSLVRRVARALNRRFTDIVALLFSHKGAGSLGAVAGFAIAVVFAWKFLRPRRRAPKRPPPTPAAAPAATVPDAAEPIGDSGKVVTREIVVKRLKGCRKVTCQLLGVVFEEKIPEELQKHATVRPSVVELLLEISRYCDLYLMETVIDDKSEENALMALEISGLFRTGGLMKEKVLFCSSEVGRTSFVRQLESDFHIDTSLDIVSQLSRFIRCQLFISTVEGEQLAGNVFNSPSLEQFFS

SEQ ID NO: 13049 - DNA, 1385 bp, Zea mays subsp. mays
  misc_feature (1)..(1385): Ceres Seq. ID no. 12411435
  misc_feature: MA Experiment ID: 108689 Result: Up-regulated in Transcription
  misc_feature: MA Experiment 108689 PARAMETER Experiment Name: Zm_Drought_Roots_P Parameter: Age (day) Value: 9
  misc_feature: MA Experiment 108689 PARAMETER Experiment Name: Zm_Drought_Roots_P Parameter: Organism Value: Zea mays
  misc_feature: MA Experiment 108689 PARAMETER Experiment Name: Zm_Drought_Roots_P Parameter: Plant Line Value: 35A19
  misc_feature: MA Experiment 108689 PARAMETER Experiment Name: Zm_Drought_Roots_P Parameter: Timepoint (hr) Value: 24
  misc_feature: MA Experiment 108689 PARAMETER Experiment Name: Zm_Drought_Roots_P Parameter: Tissue Value: Roots
  misc_feature: MA Experiment 108689 PARAMETER Experiment Name: Zm_Drought_Roots_P Parameter: Treatment Value: Drought vs. No Drought
  misc_feature: MA Experiment ID: 20000534 Result: Up-regulated in Transcription
  misc_feature: MA Experiment 20000534 PARAMETER Experiment Name: Zm_Hybrid_Pollen_P Parameter: Age (day) Value: 8
  misc_feature: MA Experiment 20000534 PARAMETER Experiment Name: Zm_Hybrid_Pollen_P Parameter: Organism Value: Zea mays
  misc_feature: MA Experiment 20000534 PARAMETER Experiment Name: Zm_Hybrid_Pollen_P Parameter: Plant Line Value: 35A19
  misc_feature: MA Experiment 20000534 PARAMETER Experiment Name: Zm_Hybrid_Pollen_P Parameter: Tissue Value: Pollen vs. Aerial
agccgaagaaccctcgctcgagaccgaagaagacaaaatcgcatctcctcgcctcctcccctcctcccgagatccgggcaaagcgcgccgcgcgagaaccaggatatcgatttaggtatatggacaaggtgtctgaaggtactaagtgagatggataagaagaaagggaccgatggcaccgaaccaggaccagctccatctcgtgccgtcgacagatttggttttataaagccagaacaaggcaattcacctgatggaattccaaaaggcaagtctatacatgagcgtgaaagggaggaaagaaggataagaaaatggaggaagatgataggtgttggtggtaatgactggaagcattatgttagaaggaaccctcatgtggttaaaaggcgaataaggaaaggaattcctgattgtctcagaggacttgtttggcagttgatttcaggcagtcgggacctcttactaatgaacccaggggtttacgagacactggtgatatatgagacatcggcctctgaattggaaattattcgtgacatatcacgcacatttccatctcatatattctttcaacaaaggcatggtccaggccaaagatcattgtataacattttgaaagcatattctgtctatgacagggatgttggatatgtgcagggaatgggatttttagctgggctgctgcttctttatatgagtgaggaggatgcattctggttattagtcgcgttgctaaagggagctgtccatgcaccaatggaaggcttgtatcaggctggtttgccgcttgtgcagcaatatttgtctcagtttgagaaattagttattgagctcatgccaaaattgggacaacactttgttgaagaaatgataaacccaagcatgtatgcaagtcaatggtttatcacagttttctcatattccttcccatttcatctaactcttagagtttgggatgtgtttctttatgagggtattaaggttgtattccaagttggattggctctattgagactctgtcacgatgatttagtcaaattaccttttgagaaactgctctatgccttgagaaatttccctcaggaagcgacagatccagatgtattattgccgcttgccttttcatttaaggtatcgagtcgtctcgaggagcttcagaaggagtatcagaagcgacaggagggcaccagtgaaacttcaagcggcgagcggctacagcccctcgtatcgaagacgatgagcagggtcggtagccgtgttgtgtcgaacttaacgaccgctgacagaaaatgacagacacgttctcttgtttgtttgtaactcgcatgtacactgtacagaaagaacggccttataatccatccatctaacagtatttgttc

SEQ ID NO: 13050 - protein, 431 aa, Zea mays subsp. mays
  peptide (1)..(431): Ceres Seq. ID no. 12411436
  misc_feature (132)..(348): Pfam Name: TBC domain Pfam Description: TBC domain
  misc_feature (51)..(405): Homolog of NCBI NO: 15237222 NR Description: plant adhesion molecule 1 (PAM1); protein id: supported by cDNA: 39585., supported by cDNA: gi_3511222 thaliana] >gi|11358624|pir||T51376 plant adhesion plant adhesion
  misc_feature (51)..(392): Homolog of NCBI NO: 18396196 NR Description: putative plant adhesion molecule; protein id: supported by cDNA: 38942. [Arabidopsis thaliana]
  misc_feature (51)..(344): Homolog of NCBI NO: 30678579 NR Description: plant adhesion molecule -related [Arabidopsis
  misc_feature (346)..(392): Homolog of NCBI NO: 30678579 NR Description: plant adhesion molecule -related [Arabidopsis
  misc_feature (109)..(405): Homolog of NCBI NO: 22531279 NR Description: plant adhesion molecule PAM1 [Arabidopsis
  misc_feature (51)..(346): Homolog of NCBI NO: 6957709 NR Description: putative plant adhesion molecule [Arabidopsis
  misc_feature (115)..(390): Homolog of NCBI NO: 27777640 NR Description: hypothetical protein MGC29047 [Mus musculus]
  misc_feature (115)..(390): Homolog of NCBI NO: 27692588 NR Description: hypothetical protein MGC29047 [Mus musculus]
  misc_feature (115)..(390): Homolog of NCBI NO: 21687020 NR Description: similar to ecotropic viral integration site 5; stage 4S gene [Homo sapiens] >gi|15559491|gb|AAH14111.1|AAH14111
  misc_feature (170)..(394): Homolog of NCBI NO: 23487611 NR Description: plant adhesion molecule 1-related [Plasmodium
SRRTLARDRRRQNRISSPPPLLPRSGQSAPRENQDIDLGIWTRCLKVLSEMDKKKGTDGTEPGPAPSRAVDRFGFIKPEQGNSPDGIPKGKSIHEREREERRIRKWRKMIGVGGNDWKHYVRRNPHVVKRRIRKGIPDCLRGLVWQLISGSRDLLLMNPGVYETLVIYETSASELEIIRDISRTFPSHIFFQQRHGPGQRSLYNILKAYSVYDRDVGYVQGMGFLAGLLLLYMSEEDAFWLLVALLKGAVHAPMEGLYQAGLPLVQQYLSQFEKLVIELMPKLGQHFVEEMINPSMYASQWFITVFSYSFPFHLTLRVWDVFLYEGIKVVFQVGLALLRLCHDDLVKLPFEKLLYALRNFPQEATDPDVLLPLAFSFKVSSRLEELQKEYQKRQEGTSETSSGERLQPLVSKTMSRVGSRVVSNLTTADRK

SEQ ID NO: 13051 - protein, 381 aa, Zea mays subsp. mays
  peptide (1)..(381): Ceres Seq. ID no. 12411437
  misc_feature (82)..(298): Pfam Name: TBC domain Pfam Description: TBC domain
  misc_feature (1)..(355): Homolog of NCBI NO: 15237222 NR Description: plant adhesion molecule 1 (PAM1); protein id: supported by cDNA: 39585., supported by cDNA: gi_3511222 thaliana] >gi|11358624|pir||T51376 plant adhesion plant adhesion
  misc_feature (1)..(342): Homolog of NCBI NO: 18396196 NR Description: putative plant adhesion molecule; protein id: supported by cDNA: 38942. [Arabidopsis thaliana]
  misc_feature (1)..(294): Homolog of NCBI NO: 30678579 NR Description: plant adhesion molecule -related [Arabidopsis
  misc_feature (296)..(342): Homolog of NCBI NO: 30678579 NR Description: plant adhesion molecule -related [Arabidopsis
  misc_feature (59)..(355): Homolog of NCBI NO: 22531279 NR Description: plant adhesion molecule PAM1 [Arabidopsis
  misc_feature (1)..(296): Homolog of NCBI NO: 6957709 NR Description: putative plant adhesion molecule [Arabidopsis
  misc_feature (65)..(340): Homolog of NCBI NO: 27777640 NR Description: hypothetical protein MGC29047 [Mus musculus]
  misc_feature (65)..(340): Homolog of NCBI NO: 27692588 NR Description: hypothetical protein MGC29047 [Mus musculus]
  misc_feature (65)..(340): Homolog of NCBI NO: 21687020 NR Description: similar to ecotropic viral integration site 5; stage 4S gene [Homo sapiens] >gi|15559491|gb|AAH14111.1|AAH14111
  misc_feature (120)..(344): Homolog of NCBI NO: 23487611 NR Description: plant adhesion molecule 1-related [Plasmodium
MDKKKGTDGTEPGPAPSRAVDRFGFIKPEQGNSPDGIPKGKSIHEREREERRIRKWRKMIGVGGNDWKHYVRRNPHVVKRRIRKGIPDCLRGLVWQLISGSRDLLLMNPGVYETLVIYETSASELEIIRDISRTFPSHIFFQQRHGPGQRSLYNILKAYSVYDRDVGYVQGMGFLAGLLLLYMSEEDAFWLLVALLKGAVHAPMEGLYQAGLPLVQQYLSQFEKLVIELMPKLGQHFVEEMINPSMYASQWFITVFSYSFPFHLTLRVWDVFLYEGIKVVFQVGLALLRLCHDDLVKLPFEKLLYALRNFPQEATDPDVLLPLAFSFKVSSRLEELQKEYQKRQEGTSETSSGERLQPLVSKTMSRVGSRVVSNLTTADRK

SEQ ID NO: 13052 - protein, 323 aa, Zea mays subsp. mays
  peptide (1)..(323): Ceres Seq. ID no. 12411438
  misc_feature (24)..(240): Pfam Name: TBC domain Pfam Description: TBC domain
  misc_feature (1)..(297): Homolog of NCBI NO: 15237222 NR Description: plant adhesion molecule 1 (PAM1); protein id: supported by cDNA: 39585., supported by cDNA: gi_3511222 thaliana] >gi|11358624|pir||T51376 plant adhesion plant adhesion
  misc_feature (1)..(284): Homolog of NCBI NO: 18396196 NR Description: putative plant adhesion molecule; protein id: supported by cDNA: 38942. [Arabidopsis thaliana]
  misc_feature (1)..(236): Homolog of NCBI NO: 30678579 NR Description: plant adhesion molecule -related [Arabidopsis
  misc_feature (238)..(284): Homolog of NCBI NO: 30678579 NR Description: plant adhesion molecule -related [Arabidopsis
  misc_feature (1)..(297): Homolog of NCBI NO: 22531279 NR Description: plant adhesion molecule PAM1 [Arabidopsis
  misc_feature (1)..(238): Homolog of NCBI NO: 6957709 NR Description: putative plant adhesion molecule [Arabidopsis
  misc_feature (7)..(282): Homolog of NCBI NO: 27777640 NR Description: hypothetical protein MGC29047 [Mus musculus]
  misc_feature (7)..(282): Homolog of NCBI NO: 27692588 NR Description: hypothetical protein MGC29047 [Mus musculus]
  misc_feature (7)..(282): Homolog of NCBI NO: 21687020 NR Description: similar to ecotropic viral integration site 5; stage 4S gene [Homo sapiens] >gi|15559491|gb|AAH14111.1|AAH14111
  misc_feature (62)..(286): Homolog of NCBI NO: 23487611 NR Description: plant adhesion molecule 1-related [Plasmodium
MIGVGGNDWKHYVRRNPHVVKRRIRKGIPDCLRGLVWQLISGSRDLLLMNPGVYETLVIYETSASELEIIRDISRTFPSHIFFQQRHGPGQRSLYNILKAYSVYDRDVGYVQGMGFLAGLLLLYMSEEDAFWLLVALLKGAVHAPMEGLYQAGLPLVQQYLSQFEKLVIELMPKLGQHFVEEMINPSMYASQWFITVFSYSFPFHLTLRVWDVFLYEGIKVVFQVGLALLRLCHDDLVKLPFEKLLYALRNFPQEATDPDVLLPLAFSFKVSSRLEELQKEYQKRQEGTSETSSGERLQPLVSKTMSRVGSRVVSNLTTADRK

SEQ ID NO: 13053 - DNA, 903 bp, Zea mays subsp. mays
  misc_feature (1)..(903): Ceres Seq. ID no. 12355756
  misc_feature: MA Experiment ID: 108515 Result: Up-regulated in Transcription
  misc_feature: MA Experiment 108515 PARAMETER Experiment Name: Zm_2mM_SA_P Parameter: Age (day) Value: 8
  misc_feature: MA Experiment 108515 PARAMETER Experiment Name: Zm_2mM_SA_P Parameter: Organism Value: Zea mays
  misc_feature: MA Experiment 108515 PARAMETER Experiment Name: Zm_2mM_SA_P Parameter: Plant Line Value: 35A19
  misc_feature: MA Experiment 108515 PARAMETER Experiment Name: Zm_2mM_SA_P Parameter: Timepoint (hr) Value: 12
  misc_feature: MA Experiment 108515 PARAMETER Experiment Name: Zm_2mM_SA_P Parameter: Tissue Value: Aerial
  misc_feature: MA Experiment 108515 PARAMETER Experiment Name: Zm_2mM_SA_P Parameter: Treatment Value: 2mM SA vs. No Treatment
  misc_feature: MA Experiment ID: 108523 Result: Down-regulated in Transcription
  misc_feature: MA Experiment 108523 PARAMETER Experiment Name: Zm_42deg_Heat_P Parameter: Age (day) Value: 8
  misc_feature: MA Experiment 108523 PARAMETER Experiment Name: Zm_42deg_Heat_P Parameter: Organism Value: Zea mays
  misc_feature: MA Experiment 108523 PARAMETER Experiment Name: Zm_42deg_Heat_P Parameter: Plant Line Value: 35A19
  misc_feature: MA Experiment 108523 PARAMETER Experiment Name: Zm_42deg_Heat_P Parameter: Temperature (deg C) Value: 42 vs. 22
  misc_feature: MA Experiment 108523 PARAMETER Experiment Name: Zm_42deg_Heat_P Parameter: Timepoint (hr) Value: 6
  misc_feature: MA Experiment 108523 PARAMETER Experiment Name: Zm_42deg_Heat_P Parameter: Tissue Value: Aerial
  misc_feature: MA Experiment ID: 108526 Result: Up-regulated in Transcription
  misc_feature: MA Experiment 108526 PARAMETER Experiment Name: Zm_5mM_NO_P Parameter: Age (day) Value: 8
  misc_feature: MA Experiment 108526 PARAMETER Experiment Name: Zm_5mM_NO_P Parameter: Organism Value: Zea mays
  misc_feature: MA Experiment 108526 PARAMETER Experiment Name: Zm_5mM_NO_P Parameter: Plant Line Value: 35A19
  misc_feature: MA Experiment 108526 PARAMETER Experiment Name: Zm_5mM_NO_P Parameter: Timepoint (hr) Value: 1
  misc_feature: MA Experiment 108526 PARAMETER Experiment Name: Zm_5mM_NO_P Parameter: Tissue Value: Aerial
  misc_feature: MA Experiment 108526 PARAMETER Experiment Name: Zm_5mM_NO_P Parameter: Treatment Value: 5mM NO vs. No Treatment
  misc_feature: MA Experiment ID: 108527 Result: Up-regulated in Transcription
  misc_feature: MA Experiment 108527 PARAMETER Experiment Name: Zm_5mM_NO_P Parameter: Age (day) Value: 8
  misc_feature: MA Experiment 108527 PARAMETER Experiment Name: Zm_5mM_NO_P Parameter: Organism Value: Zea mays
  misc_feature: MA Experiment 108527 PARAMETER Experiment Name: Zm_5mM_NO_P Parameter: Plant Line Value: 35A19
  misc_feature: MA Experiment 108527 PARAMETER Experiment Name: Zm_5mM_NO_P Parameter: Timepoint (hr) Value: 6
  misc_feature: MA Experiment 108527 PARAMETER Experiment Name: Zm_5mM_NO_P Parameter: Tissue Value: Aerial
  misc_feature: MA Experiment 108527 PARAMETER Experiment Name: Zm_5mM_NO_P Parameter: Treatment Value: 5mM NO vs. No Treatment
  misc_feature: MA Experiment ID: 108528 Result: Down-regulated in Transcription
  misc_feature: MA Experiment 108528 PARAMETER Experiment Name: Zm_Imbibed_Seeds_P Parameter: Age (day) Value: 5 vs. 2
  misc_feature: MA Experiment 108528 PARAMETER Experiment Name: Zm_Imbibed_Seeds_P Parameter: Organism Value: Zea mays
  misc_feature: MA Experiment 108528 PARAMETER Experiment Name: Zm_Imbibed_Seeds_P Parameter: Plant Line Value: 35A19
  misc_feature: MA Experiment 108528 PARAMETER Experiment Name: Zm_Imbibed_Seeds_P Parameter: Tissue Value: Aerial vs. Embryo
  misc_feature: MA Experiment ID: 108529 Result: Down-regulated in Transcription
  misc_feature: MA Experiment 108529 PARAMETER Experiment Name: Zm_Imbibed_Seeds_P Parameter: Age (day) Value: 5 vs. 2
  misc_feature: MA Experiment 108529 PARAMETER Experiment Name: Zm_Imbibed_Seeds_P Parameter: Organism Value: Zea mays
  misc_feature: MA Experiment 108529 PARAMETER Experiment Name: Zm_Imbibed_Seeds_P Parameter: Plant Line Value: 35A19
  misc_feature: MA Experiment 108529 PARAMETER Experiment Name: Zm_Imbibed_Seeds_P Parameter: Tissue Value: Roots vs. Embryo
  misc_feature: MA Experiment ID: 108530 Result: Down-regulated in Transcription
  misc_feature: MA Experiment 108530 PARAMETER Experiment Name: Zm_Imbibed_Seeds_P Parameter: Age (day) Value: 6 vs. 2
  misc_feature: MA Experiment 108530 PARAMETER Experiment Name: Zm_Imbibed_Seeds_P Parameter: Organism Value: Zea mays
  misc_feature: MA Experiment 108530 PARAMETER Experiment Name: Zm_Imbibed_Seeds_P Parameter: Plant Line Value: 35A19
  misc_feature: MA Experiment 108530 PARAMETER Experiment Name: Zm_Imbibed_Seeds_P Parameter: Tissue Value: Aerial vs. Embryo
  misc_feature: MA Experiment ID: 108535 Result: Up-regulated in Transcription
  misc_feature: MA Experiment 108535 PARAMETER Experiment Name: Zm_Meristem_P Parameter: Age (day) Value: 8
  misc_feature: MA Experiment 108535 PARAMETER Experiment Name: Zm_Meristem_P Parameter: Organism Value: Zea mays
  misc_feature: MA Experiment 108535 PARAMETER Experiment Name: Zm_Meristem_P Parameter: Plant Line Value: 35A19
  misc_feature: MA Experiment 108535 PARAMETER Experiment Name: Zm_Meristem_P Parameter: Tissue Value: Root Meristem vs. Above Root Meristem
  misc_feature: MA Experiment ID: 108545 Result: Down-regulated in Transcription
  misc_feature: MA Experiment 108545 PARAMETER Experiment Name: Zm_Imbibed_Seeds_P Parameter: Age (day) Value: 3 vs. 2
  misc_feature: MA Experiment 108545 PARAMETER Experiment Name: Zm_Imbibed_Seeds_P Parameter: Organism Value: Zea mays
  misc_feature: MA Experiment 108545 PARAMETER Experiment Name: Zm_Imbibed_Seeds_P Parameter: Plant Line Value: 35A19
  misc_feature: MA Experiment 108545 PARAMETER Experiment Name: Zm_Imbibed_Seeds_P Parameter: Tissue Value: Aerial vs. Embryo
  misc_feature: MA Experiment ID: 108547 Result: Down-regulated in Transcription
  misc_feature: MA Experiment 108547 PARAMETER Experiment Name: Zm_Imbibed_Seeds_P Parameter: Age (day) Value: 4 vs. 2
  misc_feature: MA Experiment 108547 PARAMETER Experiment Name: Zm_Imbibed_Seeds_P Parameter: Organism Value: Zea mays
  misc_feature: MA Experiment 108547 PARAMETER Experiment Name: Zm_Imbibed_Seeds_P Parameter: Plant Line Value: 35A19
  misc_feature: MA Experiment 108547 PARAMETER Experiment Name: Zm_Imbibed_Seeds_P Parameter: Tissue Value: Aerial vs. Embryo
  misc_feature: MA Experiment ID: 108559 Result: Up-regulated in Transcription
  misc_feature: MA Experiment 108559 PARAMETER Experiment Name: Zm_5mM_NO_P Parameter: Age (day) Value: 8
  misc_feature: MA Experiment 108559 PARAMETER Experiment Name: Zm_5mM_NO_P Parameter: Organism Value: Zea mays
  misc_feature: MA Experiment 108559 PARAMETER Experiment Name: Zm_5mM_NO_P Parameter: Plant Line Value: 35A19
  misc_feature: MA Experiment 108559 PARAMETER Experiment Name: Zm_5mM_NO_P Parameter: Timepoint (hr) Value: 12
  misc_feature: MA Experiment 108559 PARAMETER Experiment Name: Zm_5mM_NO_P Parameter: Tissue Value: Aerial
  misc_feature: MA Experiment 108559 PARAMETER Experiment Name: Zm_5mM_NO_P Parameter: Treatment Value: 5mM NO vs. No Treatment
  misc_feature: MA Experiment ID: 20000477 Result: Up-regulated in Transcription
  misc_feature: MA Experiment 20000477 PARAMETER Experiment Name: Zm_5mM_SA_P Parameter: Age (day) Value: 10
  misc_feature: MA Experiment 20000477 PARAMETER Experiment Name: Zm_5mM_SA_P Parameter: Organism Value: Zea mays
  misc_feature: MA Experiment 20000477 PARAMETER Experiment Name: Zm_5mM_SA_P Parameter: Plant Line Value: 35A19
  misc_feature: MA Experiment 20000477 PARAMETER Experiment Name: Zm_5mM_SA_P Parameter: Timepoint (hr) Value: 48
  misc_feature: MA Experiment 20000477 PARAMETER Experiment Name: Zm_5mM_SA_P Parameter: Tissue Value: Aerial
  misc_feature: MA Experiment 20000477 PARAMETER Experiment Name: Zm_5mM_SA_P Parameter: Treatment Value: 5mM SA vs. No Treatment
  misc_feature: MA Experiment ID: 20000478 Result: Up-regulated in Transcription
  misc_feature: MA Experiment 20000478 PARAMETER Experiment Name: Zm_5mM_SA_P Parameter: Age (day) Value: 11
  misc_feature: MA Experiment 20000478 PARAMETER Experiment Name: Zm_5mM_SA_P Parameter: Organism Value: Zea mays
  misc_feature: MA Experiment 20000478 PARAMETER Experiment Name: Zm_5mM_SA_P Parameter: Plant Line Value: 35A19
  misc_feature: MA Experiment 20000478 PARAMETER Experiment Name: Zm_5mM_SA_P Parameter: Timepoint (hr) Value: 72
  misc_feature: MA Experiment 20000478 PARAMETER Experiment Name: Zm_5mM_SA_P Parameter: Tissue Value: Aerial
  misc_feature: MA Experiment 20000478 PARAMETER Experiment Name: Zm_5mM_SA_P Parameter: Treatment Value: 5mM SA vs. No Treatment
  misc_feature: MA Experiment ID: 20000535 Result: Up-regulated in Transcription
  misc_feature: MA Experiment 20000535 PARAMETER Experiment Name: Zm_Hybrid_Seed_Dev_P Parameter: DAP Value: 30 vs. 12
  misc_feature: MA Experiment 20000535 PARAMETER Experiment Name: Zm_Hybrid_Seed_Dev_P Parameter: Organism Value: Zea mays
  misc_feature: MA Experiment 20000535 PARAMETER Experiment Name: Zm_Hybrid_Seed_Dev_P Parameter: Plant Line Value: 35A19
  misc_feature: MA Experiment 20000535 PARAMETER Experiment Name: Zm_Hybrid_Seed_Dev_P Parameter: Tissue Value: Embryo vs. Unfert Floret
  misc_feature: MA Experiment ID: 20000633 Result: Up-regulated in Transcription
  misc_feature: MA Experiment 20000633 PARAMETER Experiment Name: Zm_Herbicide-Treatments_P Parameter: Timepoint (hr) Value: 4
  misc_feature: MA Experiment 20000633 PARAMETER Experiment Name: Zm_Herbicide-Treatments_P Parameter: Tissue Value: Aerial
  misc_feature: MA Experiment 20000633 PARAMETER Experiment Name: Zm_Herbicide-Treatments_P Parameter: Treatment Value: Trimec vs. No Treatment
agggatagcataacaccgccgaggaagcagcaagcagcaaggtcgacatgtcgtctccgccgccggtgaagctgatcggcttcttcggcagcccgtacgcgttccgcgcggaggcggcgctgtgcctgaaaggcgtgccgtacgagctgatcctggaggacctgttcggcagcaagagcgagctcctgctccaccacaaccccgtgcacaagaaggtgcccgtgctcctccacggcgacggccgggccatctccgagtccctcgtcatcgccgagtacgtcgacgaggccttcgacgggccgccgctgctccccgccgacccctacgcgcgcgccgccgcccgcttctgggccgacttcatcgagaccaggctcaccaagcccttcttcatggcgatctgggtggaggagcgcgacgcgcggctgcggttcgaggaggaggccaaggagctcgtggcgctgctggaggcgcagctcgagggaaagaggttcttcgccggcgacaggccggggtacctcgacgtggccgcgtccgcgctcgggccctggcgcagcgtcatcgaggagctcaacggtgtggcgctgctcagcgaggatgaccaccccaacctgtgccggtggaccagggactactgcgccttcgaggctctcaagccgtgcatgccggatcgggagaagctcctcgcctacttcactaagaacttcgacaggtacaaggcggccgtcaatgcgacgctatcgcagtcgcagcagtaataactgcccaactgggtacgcctctgcccggccgtatggcgggcgtttctttttttctttcttcagaataacgtagctgtgcccagtactcatgttttcaattctgcaaagtgcaaaccaacaagtcgctgtgtggtttactcttttt

SEQ ID NO: 13054 - protein, 235 aa, Zea mays subsp. mays
  peptide (1)..(235): Ceres Seq. ID no. 12355757
  misc_feature (1)..(235): Homolog of NCBI NO: 11385493 NR Description: glutathione S-transferase GST 21 [Zea mays]
  misc_feature (5)..(232): Homolog of NCBI NO: 4468798 NR Description: GST7 protein [Zea mays]
  misc_feature (1)..(228): Homolog of NCBI NO: 11385509 NR Description: glutathione S-transferase GST 29 [Zea mays]
  misc_feature (3)..(228): Homolog of NCBI NO: 19386822 NR Description: putative glutathione S-transferase GST 24 [Oryza
  misc_feature (1)..(232): Homolog of NCBI NO: 13699857 NR Description: glutathione S-transferase GST 24 [Zea mays]
  misc_feature (7)..(232): Homolog of NCBI NO: 19386820 NR Description: putative glutathione S-transferase GST 24 [Oryza
  misc_feature (6)..(232): Homolog of NCBI NO: 19386819 NR Description: putative glutathione S-transferase GST 24 [Oryza
  misc_feature (7)..(229): Homolog of NCBI NO: 11385507 NR Description: glutathione S-transferase GST 28 [Zea mays]
  misc_feature (7)..(232): Homolog of NCBI NO: 34896730 NR Description: putative glutathione transferase [Oryza sativa
  misc_feature (1)..(230): Homolog of NCBI NO: 19386816 NR Description: putative glutathione S-transferase GST 24 [Oryza
MSSPPPVKLIGFFGSPYAFRAEAALCLKGVPYELILEDLFGSKSELLLHHNPVHKKVPVLLHGDGRAISESLVIAEYVDEAFDGPPLLPADPYARAAARFWADFIETRLTKPFFMAIWVEERDARLRFEEEAKELVALLEAQLEGKRFFAGDRPGYLDVAASALGPWRSVIEELNGVALLSEDDHPNLCRWTRDYCAFEALKPCMPDREKLLAYFTKNFDRYKAAVNATLSQSQQ

SEQ ID NO: 13055 - protein, 121 aa, Zea mays subsp. mays
  peptide (1)..(121): Ceres Seq. ID no. 12355758
  misc_feature (1)..(121): Homolog of NCBI NO: 11385493 NR Description: glutathione S-transferase GST 21 [Zea mays]
  misc_feature (1)..(118): Homolog of NCBI NO: 4468798 NR Description: GST7 protein [Zea mays]
  misc_feature (1)..(114): Homolog of NCBI NO: 11385509 NR Description: glutathione S-transferase GST 29 [Zea mays]
  misc_feature (1)..(114): Homolog of NCBI NO: 19386822 NR Description: putative glutathione S-transferase GST 24 [Oryza
  misc_feature (1)..(118): Homolog of NCBI NO: 13699857 NR Description: glutathione S-transferase GST 24 [Zea mays]
  misc_feature (1)..(118): Homolog of NCBI NO: 19386820 NR Description: putative glutathione S-transferase GST 24 [Oryza
  misc_feature (1)..(118): Homolog of NCBI NO: 19386819 NR Description: putative glutathione S-transferase GST 24 [Oryza
  misc_feature (1)..(115): Homolog of NCBI NO: 11385507 NR Description: glutathione S-transferase GST 28 [Zea mays]
  misc_feature (1)..(118): Homolog of NCBI NO: 34896730 NR Description: putative glutathione transferase [Oryza sativa
  misc_feature (1)..(116): Homolog of NCBI NO: 19386816 NR Description: putative glutathione S-transferase GST 24 [Oryza
MAIWVEERDARLRFEEEAKELVALLEAQLEGKRFFAGDRPGYLDVAASALGPWRSVIEELNGVALLSEDDHPNLCRWTRDYCAFEALKPCMPDREKLLAYFTKNFDRYKAAVNATLSQSQQ

SEQ ID NO: 13056 - DNA, 1565 bp, Zea mays subsp. mays
  misc_feature (1)..(1565): Ceres Seq. ID no. 12411428
  misc_feature: MA Experiment ID: 108535 Result: Down-regulated in Transcription
  misc_feature: MA Experiment 108535 PARAMETER Experiment Name: Zm_Meristem_P Parameter: Age (day) Value: 8
  misc_feature: MA Experiment 108535 PARAMETER Experiment Name: Zm_Meristem_P Parameter: Organism Value: Zea mays
  misc_feature: MA Experiment 108535 PARAMETER Experiment Name: Zm_Meristem_P Parameter: Plant Line Value: 35A19
  misc_feature: MA Experiment 108535 PARAMETER Experiment Name: Zm_Meristem_P Parameter: Tissue Value: Root Meristem vs. Above Root Meristem
  misc_feature: MA Experiment ID: 108543 Result: Up-regulated in Transcription
  misc_feature: MA Experiment ID: 108545 Result: Up-regulated in Transcription
  misc_feature: MA Experiment 108545 PARAMETER Experiment Name: Zm_Imbibed_Seeds_P Parameter: Age (day) Value: 3 vs. 2
  misc_feature: MA Experiment 108545 PARAMETER Experiment Name: Zm_Imbibed_Seeds_P Parameter: Organism Value: Zea mays
  misc_feature: MA Experiment 108545 PARAMETER Experiment Name: Zm_Imbibed_Seeds_P Parameter: Plant Line Value: 35A19
  misc_feature: MA Experiment 108545 PARAMETER Experiment Name: Zm_Imbibed_Seeds_P Parameter: Tissue Value: Aerial vs. Embryo
  misc_feature: MA Experiment ID: 108547 Result: Up-regulated in Transcription
  misc_feature: MA Experiment 108547 PARAMETER Experiment Name: Zm_Imbibed_Seeds_P Parameter: Age (day) Value: 4 vs. 2
  misc_feature: MA Experiment 108547 PARAMETER Experiment Name: Zm_Imbibed_Seeds_P Parameter: Organism Value: Zea mays
  misc_feature: MA Experiment 108547 PARAMETER Experiment Name: Zm_Imbibed_Seeds_P Parameter: Plant Line Value: 35A19
  misc_feature: MA Experiment 108547 PARAMETER Experiment Name: Zm_Imbibed_Seeds_P Parameter: Tissue Value: Aerial vs. Embryo
aaccatcctccctccacagatctctccggggaggcagcaacagttatgtcatatcattgtcgcgtcctcgtccccgttccatttcattatccccccggagctggtgcgcgagtcggagctggtgcagggtcacccttcccctcggcctcaagagctctgcggttgccgcggccaagggcgtccgtggagaagcgggagcaggtggcggcgatggaagagcaaggcggccaggcggcgctcgggtgggcggccagggacgactccggcgtcctctccccctacagcttctccagaagggttcctaaagacgacgatgtcacgatcaaggtgctctactgcgggatctgccacaccgacctgcacgtcatcaagaacgactggcgaaacgccatgtacccagtcgtcccggggtaaccgatccaatttcgctagcctagacgccccggatgctgttgcaaaactaacagcctctgtctgtctgaccccgtcggctggcgtggcgtggcgagcaggcacgagatcgtgggcgtggtgaccggcgtcggcggcggcgtcacgcggttcaaggccggcgacacggtcggcgtgggctacttcgtggggtcctgccgctcctgcgacagctgcggcaagggggacgacaactactgcgcggggatcgtgctcacctccaacggcgtcgaccacgcgcacggcggcgcgcccaccagggggggattctccgacgtcctggtcgcgagcgagcactacgtggtccgcgtccccgacggcctggcgctggaccgcaccgcgccgctgctctcgccggcgtcaccgtgtacagccccatgatgcgccacggcctcaacgagcccggcaagcacctcggcgtcgtcggcctcggcggcctcggccacgtcgccgtcaagttcggcaaggccttcgggatgaaggtcaccgtcatcagcacgtccgccagcaagcgccaggaggccatcgagaacctcggcgcggacgagttcctcatcagccgggacaaggaccagatgaaggcggcgacggggaccatggacggcatcatcgacacggtgtcggcgtggcacccgatcacgccgctgctggcgctgctgaagccgctggggcagatggtggtcgtgggcgcgccgagcaagccgctcgagctgccggcctacgccatcgtgccgggcgggaagggcgtggctgggaacaatgtcggcagcgtcagggactgccaggccatgctcgagttcgcggggaagcacggcatcggggccgaggtcgaggtcatcaagatggactacgtcaacacggccatggagcggctcgagaagaacgacgtccgctaccgcttcgtcatcgacgtcgccggcagcctcggctctgccgcctaggcatggctgcaaaggtttcaatcagagcccagccgcaataatttgttagctaccgaatgaatgatggtctacgcttgttgatgagttggtgctttgtcgtggttttgtggatgtaataattcgatgtacaaataaaaaaaggggagacaaggtgcttgttcccttggtttggtg

SEQ ID NO: 13057 - protein, 187 aa, Zea mays subsp. mays
  peptide (1)..(187): Ceres Seq. ID no. 12411429
  misc_feature (1)..(158): Homolog of NCBI NO: 19849246 NR Description: cinnamyl alcohol dehydrogenase [Lolium perenne]
  misc_feature (1)..(185): Homolog of NCBI NO: 14279694 NR Description: sinapyl alcohol dehydrogenase [Populus
  misc_feature (1)..(183): Homolog of NCBI NO: 10720090 NR Description: Probable mannitol dehydrogenase (NAD-dependent
  misc_feature (1)..(187): Homolog of NCBI NO: 19849248 NR Description: cinnamyl alcohol dehydrogenase [Lolium perenne]
  misc_feature (1)..(183): Homolog of NCBI NO: 10720093 NR Description: Probable mannitol dehydrogenase (NAD-dependent dehydrogenase) >gi|4097522|gb|AAD10327.1| cinnamyl alcohol
  misc_feature (1)..(186): Homolog of NCBI NO: 34013695 NR Description: 10-hydroxygeraniol oxidoreductase [Catharanthus
  misc_feature (1)..(183): Homolog of NCBI NO: 16267 NR Description: Eli3-1 [Arabidopsis thaliana]
  misc_feature (1)..(183): Homolog of NCBI NO: 15233642 NR Description: cinnamyl-alcohol dehydrogenase ELI3-1; protein At4g37980.1, supported by cDNA: gi_13430625, supported by cDNA:
  misc_feature (1)..(187): Homolog of NCBI NO: 13507210 NR Description: cinnamyl alcohol dehydrogenase [Fragaria x
  misc_feature (1)..(183): Homolog of NCBI NO: 7430935 NR Description: probable cinnamyl-alcohol dehydrogenase (EC
MMRHGLNEPGKHLGVVGLGGLGHVAVKFGKAFGMKVTVISTSASKRQEAIENLGADEFLISRDKDQMKAATGTMDGIIDTVSAWHPITPLLALLKPLGQMVVVGAPSKPLELPAYAIVPGGKGVAGNNVGSVRDCQAMLEFAGKHGIGAEVEVIKMDYVNTAMERLEKNDVRYRFVIDVAGSLGSAA

SEQ ID NO: 13058 - protein, 186 aa, Zea mays subsp. mays
  peptide (1)..(186): Ceres Seq. ID no. 12411430
  misc_feature (1)..(157): Homolog of NCBI NO: 19849246 NR Description: cinnamyl alcohol dehydrogenase [Lolium perenne]
  misc_feature (1)..(184): Homolog of NCBI NO: 14279694 NR Description: sinapyl alcohol dehydrogenase [Populus
  misc_feature (1)..(182): Homolog of NCBI NO: 10720090 NR Description: Probable mannitol dehydrogenase (NAD-dependent
  misc_feature (1)..(186): Homolog of NCBI NO: 19849248 NR Description: cinnamyl alcohol dehydrogenase [Lolium perenne]
  misc_feature (1)..(182): Homolog of NCBI NO: 10720093 NR Description: Probable mannitol dehydrogenase (NAD-dependent dehydrogenase) >gi|4097522|gb|AAD10327.1| cinnamyl alcohol
  misc_feature (1)..(185): Homolog of NCBI NO: 34013695 NR Description: 10-hydroxygeraniol oxidoreductase [Catharanthus
  misc_feature (1)..(182): Homolog of NCBI NO: 16267 NR Description: Eli3-1 [Arabidopsis thaliana]
  misc_feature (1)..(182): Homolog of NCBI NO: 15233642 NR Description: cinnamyl-alcohol dehydrogenase ELI3-1; protein At4g37980.1, supported by cDNA: gi_13430625, supported by cDNA:
  misc_feature (1)..(186): Homolog of NCBI NO: 13507210 NR Description: cinnamyl alcohol dehydrogenase [Fragaria x
  misc_feature (1)..(182): Homolog of NCBI NO: 7430935 NR Description: probable cinnamyl-alcohol dehydrogenase (EC
MRHGLNEPGKHLGVVGLGGLGHVAVKFGKAFGMKVTVISTSASKRQEAIENLGADEFLISRDKDQMKAATGTMDGIIDTVSAWHPITPLLALLKPLGQMVVVGAPSKPLELPAYAIVPGGKGVAGNNVGSVRDCQAMLEFAGKHGIGAEVEVIKMDYVNTAMERLEKNDVRYRFVIDVAGSLGSAA

SEQ ID NO: 13059 - protein, 177 aa, Zea mays subsp. mays
  peptide (1)..(177): Ceres Seq. ID no. 12411431
  misc_feature (85)..(177): Pfam Name: Equine herpesvirus glycoprotein gp2 Pfam Description: Equine herpesvirus glycoprotein gp2
  misc_feature (64)..(177): Homolog of NCBI NO: 11360494 NR Description: antifreeze glycopeptide AFGP polyprotein precursor
  misc_feature (75)..(177): Homolog of NCBI NO: 11360494 NR Description: antifreeze glycopeptide AFGP polyprotein precursor
  misc_feature (87)..(177): Homolog of NCBI NO: 11360494 NR Description: antifreeze glycopeptide AFGP polyprotein precursor
  misc_feature (76)..(177): Homolog of NCBI NO: 11360494 NR Description: antifreeze glycopeptide AFGP polyprotein precursor
  misc_feature (73)..(177): Homolog of NCBI NO: 13592175 NR Description: ppg3 [Leishmania major]
  misc_feature (83)..(177): Homolog of NCBI NO: 13592175 NR Description: ppg3 [Leishmania major]
  misc_feature (73)..(177): Homolog of NCBI NO: 13592175 NR Description: ppg3 [Leishmania major]
  misc_feature (72)..(177): Homolog of NCBI NO: 13592175 NR Description: ppg3 [Leishmania major]
  misc_feature (73)..(177): Homolog of NCBI NO: 13592175 NR Description: ppg3 [Leishmania major]
  misc_feature (73)..(177): Homolog of NCBI NO: 13592175 NR Description: ppg3 [Leishmania major]
TILPPQISPGRQQQLCHIIVASSSPFHFIIPPELVRESELVQGHPSPRPQELCGCRGQGRPWRSGSRWRRWKSKAARRRSGGRPGTTPASSPPTASPEGFLKTTMSRSRCSTAGSATPTCTSSRTTGETPCTQSSRGNRSNFASLDAPDAVAKLTASVCLTPSAGVAWRAGTRSWAW

SEQ ID NO: 13060 - DNA, 1269 bp, Zea mays subsp. mays
  misc_feature (1)..(1269): Ceres Seq. ID no. 12411424
  misc_feature: MA Experiment ID: 20000108 Result: Down-regulated in Transcription
  misc_feature: MA Experiment 20000108 PARAMETER Experiment Name: Zm_Root-Tips_P Parameter: Age (day) Value: 12
  misc_feature: MA Experiment 20000108 PARAMETER Experiment Name: Zm_Root-Tips_P Parameter: Organism Value: Zea mays
  misc_feature: MA Experiment 20000108 PARAMETER Experiment Name: Zm_Root-Tips_P Parameter: Tissue Value: Root tips vs. Root mid region    35
  misc_feature: MA Experiment 20000108 PARAMETER Experiment Name: Zm_Root-Tips_P Parameter: Tissue Value: Root tips vs. Root mid region   Sequence Listing-Misc Features (4)
aaaatccggcctccacggctccacccacgagccagtggaatcttaccgattcggcaaccgtgctaatcgatatccgtgcaattccacctcccgaaccgaatccctccaccgacccaaaccctagcgcgcacccttctccgtcgtcctttcctggcgcgcgggccggtgtcggagatgcgggcgctgctcgcggacggcgggatggcactggcggtgtcgccggaggccaacgagtcgtcgggtggcgctgcggtgtcgctagggccgttatcgtgggcgtcggagtgccacggggtactgtacaacctggccttgatgctgccatcgctgggcctttgtggggttcctggcgtggcaggcgcggcggagcttccgtaggctcagctacggccgctctcacgtcgttgtcgtcgcgtactacgcgctcctctgggccgtcgccgtactcaacctcctctggtgcttcctgcaggcatggcaatgtatgcctgacagggcattctcttggaatatactgtcactgtttacaaaatcaggaatgttattcttggaagtgagtctcatagcctttctacttcaaggaaatgatgccagcggttttgaatctttggcacgaacctttgttatatctggagctgtagttgctgctgatgtattgctcaagactatatatgtttttggcttcggtgttcctttgttcattgatactgatcaaggaactagtgggaaatggggcctgtggattctccacaaacttgtgcttactggagtctatgggctgattgttttcatgcatcattcaagatggagagacaggctgcctgcaaaaccagcatactacaactatgtatgtgtgatgttgctactgaatggcatatcactgtttggatgtttccttattgcaagtggagctggatttggtttatggttatataatctcacaaccgtatgctatcattctctttaccttcccctcctatatgtgactttcttagcagacttcttccaggaggaagacatgctcctagagaacgtctactattctgaaatgaaggatgctgggttcttcgatgctgactgggattaatccgtggctactgtgctgtatgacccatcccatatgaagtacgctgtatttgtttttattttatctgtgtactctcaacgtagaacaggaaatgtatgtagctagtcgtggtagtgaatggaaatatgtaatcttactgctgcatacttcagaaaatcagaattcaagtgatttcacggctg

SEQ ID NO: 13061 - protein, 200 aa, Zea mays subsp. mays
  peptide (1)..(200): Ceres Seq. ID no. 12411425
  misc_feature (60)..(200): Homolog of NCBI NO: 21326119 NR Description: putative expressed protein [Sorghum bicolor]
  misc_feature (1)..(36): Homolog of NCBI NO: 21326119 NR Description: putative expressed protein [Sorghum bicolor]
  misc_feature (1)..(200): Homolog of NCBI NO: 18397089 NR Description: expressed protein; protein id: At3g05010.1, by cDNA: gi_15028250 [Arabidopsis thaliana]
  misc_feature (1)..(200): Homolog of NCBI NO: 12322847 NR Description: unknown protein; 15342-13483 [Arabidopsis
  misc_feature (1)..(200): Homolog of NCBI NO: 15240462 NR Description: putative protein; protein id: At5g27210.1, by cDNA: 96808., supported by cDNA: gi_14532471 [Arabidopsis
  misc_feature (1)..(200): Homolog of NCBI NO: 21618098 NR Description: unknown [Arabidopsis thaliana]
  misc_feature (1)..(200): Homolog of NCBI NO: 14532472 NR Description: AT5g27210/T21B4_120 [Arabidopsis thaliana]
  misc_feature (34)..(166): Homolog of NCBI NO: 7485300 NR Description: hypothetical protein A_TM021B04.15 - Arabidopsis >gi|2191194|gb|AAB61079.1| contains weak to the SAPB protein
  misc_feature (1)..(181): Homolog of NCBI NO: 6755859 NR Description: transmembrane domain protein regulated in transmembrane domain protein regulated in adipocytes 40 kDa [Mus >gi|4321619|gb|AAD15788.1| seven transmembrane domain orphan
  misc_feature (1)..(192): Homolog of NCBI NO: 26354422 NR Description: unnamed protein product [Mus musculus]
MPDRAFSWNILSLFTKSGMLFLEVSLIAFLLQGNDASGFESLARTFVISGAVVAADVLLKTIYVFGFGVPLFIDTDQGTSGKWGLWILHKLVLTGVYGLIVFMHHSRWRDRLPAKPAYYNYVCVMLLLNGISLFGCFLIASGAGFGLWLYNLTTVCYHSLYLPLLYVTFLADFFQEEDMLLENVYYSEMKDAGFFDADWD

SEQ ID NO: 13062 - protein, 184 aa, Zea mays subsp. mays
  peptide (1)..(184): Ceres Seq. ID no. 12411426
NPASTAPPTSQWNLTDSATVLIDIRAIPPPEPNPSTDPNPSAHPSPSSFPGARAGVGDAGAARGRRDGTGGVAGGQRVVGWRCGVARAVIVGVGVPRGTVQPGLDAAIAGPLWGSWRGRRGGASVGSATAALTSLSSRTTRSSGPSPYSTSSGASCRHGNVCLTGHSLGIYCHCLQNQECYSWK

SEQ ID NO: 13063 - protein, 182 aa, Zea mays subsp. mays; identical to SEQ ID NO: 12760
  peptide (1)..(182): Ceres Seq. ID no. 12411427
  misc_feature (42)..(182): Homolog of NCBI NO: 21326119 NR Description: putative expressed protein [Sorghum bicolor]
  misc_feature (1)..(18): Homolog of NCBI NO: 21326119 NR Description: putative expressed protein [Sorghum bicolor]
  misc_feature (1)..(182): Homolog of NCBI NO: 18397089 NR Description: expressed protein; protein id: At3g05010.1, by cDNA: gi_15028250 [Arabidopsis thaliana]
  misc_feature (1)..(182): Homolog of NCBI NO: 12322847 NR Description: unknown protein; 15342-13483 [Arabidopsis
  misc_feature (1)..(182): Homolog of NCBI NO: 15240462 NR Description: putative protein; protein id: At5g27210.1, by cDNA: 96808., supported by cDNA: gi_14532471 [Arabidopsis
  misc_feature (1)..(182): Homolog of NCBI NO: 21618098 NR Description: unknown [Arabidopsis thaliana]
  misc_feature (1)..(182): Homolog of NCBI NO: 14532472 NR Description: AT5g27210/T21B4_120 [Arabidopsis thaliana]
  misc_feature (16)..(148): Homolog of NCBI NO: 7485300 NR Description: hypothetical protein A_TM021B04.15 - Arabidopsis >gi|2191194|gb|AAB61079.1| contains weak to the SAPB protein
  misc_feature (1)..(163): Homolog of NCBI NO: 6755859 NR Description: transmembrane domain protein regulated in transmembrane domain protein regulated in adipocytes 40 kDa [Mus >gi|4321619|gb|AAD15788.1| seven transmembrane domain orphan
  misc_feature (1)..(174): Homolog of NCBI NO: 26354422 NR Description: unnamed protein product [Mus musculus]

SEQ ID NO: 13064 - DNA, 1852 bp, Zea mays subsp. mays
  misc_feature (1)..(1852): Ceres Seq. ID no. 12342422
  misc_feature: MA Experiment ID: 108527 Result: Down-regulated in Transcription
  misc_feature: MA Experiment 108527 PARAMETER Experiment Name: Zm_5mM_NO_P Parameter: Age (day) Value: 8
  misc_feature: MA Experiment 108527 PARAMETER Experiment Name: Zm_5mM_NO_P Parameter: Organism Value: Zea mays
  misc_feature: MA Experiment 108527 PARAMETER Experiment Name: Zm_5mM_NO_P Parameter: Plant Line Value: 35A19
  misc_feature: MA Experiment 108527 PARAMETER Experiment Name: Zm_5mM_NO_P Parameter: Timepoint (hr) Value: 6
  misc_feature: MA Experiment 108527 PARAMETER Experiment Name: Zm_5mM_NO_P Parameter: Tissue Value: Aerial
  misc_feature: MA Experiment 108527 PARAMETER Experiment Name: Zm_5mM_NO_P Parameter: Treatment Value: 5mM NO vs. No Treatment
  misc_feature: MA Experiment ID: 108528 Result: Up-regulated in Transcription
  misc_feature: MA Experiment 108528 PARAMETER Experiment Name: Zm_Imbibed_Seeds_P Parameter: Age (day) Value: 5 vs. 2
  misc_feature: MA Experiment 108528 PARAMETER Experiment Name: Zm_Imbibed_Seeds_P Parameter: Organism Value: Zea mays
  misc_feature: MA Experiment 108528 PARAMETER Experiment Name: Zm_Imbibed_Seeds_P Parameter: Plant Line Value: 35A19
  misc_feature: MA Experiment 108528 PARAMETER Experiment Name: Zm_Imbibed_Seeds_P Parameter: Tissue Value: Aerial vs. Embryo
  misc_feature: MA Experiment ID: 108530 Result: Up-regulated in Transcription
  misc_feature: MA Experiment 108530 PARAMETER Experiment Name: Zm_Imbibed_Seeds_P Parameter: Age (day) Value: 6 vs. 2
  misc_feature: MA Experiment 108530 PARAMETER Experiment Name: Zm_Imbibed_Seeds_P Parameter: Organism Value: Zea mays
  misc_feature: MA Experiment 108530 PARAMETER Experiment Name: Zm_Imbibed_Seeds_P Parameter: Plant Line Value: 35A19
  misc_feature: MA Experiment 108530 PARAMETER Experiment Name: Zm_Imbibed_Seeds_P Parameter: Tissue Value: Aerial vs. Embryo
  misc_feature: MA Experiment ID: 108535 Result: Up-regulated in Transcription
  misc_feature: MA Experiment 108535 PARAMETER Experiment Name: Zm_Meristem_P Parameter: Age (day) Value: 8
  misc_feature: MA Experiment 108535 PARAMETER Experiment Name: Zm_Meristem_P Parameter: Organism Value: Zea mays
  misc_feature: MA Experiment 108535 PARAMETER Experiment Name: Zm_Meristem_P Parameter: Plant Line Value: 35A19
  misc_feature: MA Experiment 108535 PARAMETER Experiment Name: Zm_Meristem_P Parameter: Tissue Value: Root Meristem vs. Above Root Meristem
  misc_feature: MA Experiment ID: 108547 Result: Up-regulated in Transcription
  misc_feature: MA Experiment 108547 PARAMETER Experiment Name: Zm_Imbibed_Seeds_P Parameter: Age (day) Value: 4 vs. 2
  misc_feature: MA Experiment 108547 PARAMETER Experiment Name: Zm_Imbibed_Seeds_P Parameter: Organism Value: Zea mays
  misc_feature: MA Experiment 108547 PARAMETER Experiment Name: Zm_Imbibed_Seeds_P Parameter: Plant Line Value: 35A19
  misc_feature: MA Experiment 108547 PARAMETER Experiment Name: Zm_Imbibed_Seeds_P Parameter: Tissue Value: Aerial vs. Embryo
  misc_feature: MA Experiment ID: 20000535 Result: Up-regulated in Transcription
  misc_feature: MA Experiment 20000535 PARAMETER Experiment Name: Zm_Hybrid_Seed_Dev_P Parameter: DAP Value: 30 vs. 12
  misc_feature: MA Experiment 20000535 PARAMETER Experiment Name: Zm_Hybrid_Seed_Dev_P Parameter: Organism Value: Zea mays
  misc_feature: MA Experiment 20000535 PARAMETER Experiment Name: Zm_Hybrid_Seed_Dev_P Parameter: Plant Line Value: 35A19
  misc_feature: MA Experiment 20000535 PARAMETER Experiment Name: Zm_Hybrid_Seed_Dev_P Parameter: Tissue Value: Embryo vs. Unfert Floret
actcaaaaaaggaaaaggaaacggaaaaactcccagttcgtgacggagacaccgaggccagcgccatccacccgctcccctccgctcggccttcatctccccacagccgcaagcgacgggcgtcatatcccatcctgatctctcctcccttcttcagtgcagcagcaggccagcggcacgccacccgcctcactcccgcctccgatccgctgcttactcgccacccggagatggccaccgccgccgccttctccgtctcctcgccggcggcctccgccgtcgccgcgcgatccaaggtgtttggaggagttaaccaggcgagaactagaactggctgccgcgtcggcatcacgcggaagaactttggccgtgtcatgatggcccttgcagtggatgtttctcgttttgaaggagtgccaatggctcctccagacccaattcttggggtttctgaggcctttaaagcagataaaagcgagctgaagctcaatcttggtgttggtgcctataggacagaagagctgcagccctacgtgctcaatgtagtcaagaaggctgaaaatcttatgttggagaaaggagaaaacaaagagtatcttcccattgaaggtttagccgcgtttaacaaagcaacagcagagctattgcttggagctgataaccctgttattaatcaaggactggttgctacacttcagtctctctcgggcactggatcactgcgtctcgctgcagcattcatacaaagatactttcctgaagctaaagtgctgatatcgtcgcctacctggggtaaccacaagaatatcttcaatgatgctagggtaccttggtcagagtaccggtattatgaccccaagactgttgggttggattttgagggaataatagctgacattgaggctgctcctgaaggttcttttgttctgctacatggttgtgctcacaacccaactggaatagacccaactcctgaacagtgggagaaaattgcagatgtcattcaagagaaaaagcatatgccattctttgatgttgcatatcagggttttgccagtggaagccttgatgaagatgcattttctgtcaggctttttgttaagcgtggcatggaagtgtttgttgcacaatcttacagcaagaaccttggtttatattctgaaagggttggtgcaataaatgtcgtgtgctcagcaccagaagttgcagatagggtaaatagccagctgaaacgattggcacgtcccatgtactcgaacccccctattcacggtgccaagatagttgccaacgttgttggtgatccaaccatgtttggtgaatggaaacaagagatggagctaatggctggacggatcaagaatgtaagacagaagctctacgacagtttgtctgccaaggacaagagcggcaaggactggtctttcattctgaggcagattggcatgttctcctacaccggcttgaacaaagcgcagagtgacaacatgacggataaatggcatatttacatgaccaaggatgggcggatctcgttagctgggctgtccctggctaagtgtgattatcttgccgacgccatcatcgattccttccataatgtgaactaggctgaggtacgatagttgagggtcaagctattgatgtttagttccgtggacgctaggctgggatttttgggtccttccagctatacagctcttccgttgtgctccatctggtgtaacttggataaataaaatttttgtcgctgaactaaaactcgtgtgcttttttacctgtaactgtaaggtcagcgcgtggctacagacttgtaaacacttgaatgaaaaaaaaacaatgacattaccgg

SEQ ID NO: 13065 - protein, 535 aa, Zea mays subsp. mays
  peptide (1)..(535): Ceres Seq. ID no. 12342423
  misc_feature (213)..(531): Pfam Name: Aminotransferase class I and II Pfam Description: Aminotransferase class I and II
  misc_feature (80)..(535): Homolog of NCBI NO: 2130091 NR Description: aspartate transaminase (EC 2.6.1.1) - proso >gi|633095|dbj|BAA08106.1| plastidic aspartate aminotransferase
  misc_feature (122)..(535): Homolog of NCBI NO: 29468084 NR Description: aspartate aminotransferase [Oryza sativa]
  misc_feature (77)..(535): Homolog of NCBI NO: 445118 NR Description: Asp aminotransferase
  misc_feature (79)..(535): Homolog of NCBI NO: 485495 NR Description: aspartate transaminase (EC 2.6.1.1) AAT5
  misc_feature (77)..(535): Homolog of NCBI NO: 2605932 NR Description: aspartate aminotransferase [Lotus corniculatus]
SKKEKETEKLPVRDGDTEASAIHPLPSARPSSPHSRKRRASYPILISPPFFSAAAGQRHATRLTPASDPLLTRHPEMATAAAFSVSSPAASAVAARSKVFGGVNQARTRTGCRVGITRKNFGRVMMALAVDVSRFEGVPMAPPDPILGVSEAFKADKSELKLNLGVGAYRTEELQPYVLNVVKKAENLMLEKGENKEYLPIEGLAAFNKATAELLLGADNPVINQGLVATLQSLSGTGSLRLAAAFIQRYFPEAKVLISSPTWGNHKNIFNDARVPWSEYRYYDPKTVGLDFEGIIADIEAAPEGSFVLLHGCAHNPTGIDPTPEQWEKIADVIQEKKHMPFFDVAYQGFASGSLDEDAFSVRLFVKRGMEVFVAQSYSKNLGLYSERVGAINVVCSAPEVADRVNSQLKRLARPMYSNPPIHGAKIVANVVGDPTMFGEWKQEMELMAGRIKNVRQKLYDSLSAKDKSGKDWSFILRQIGMFSYTGLNKAQSDNMTDKWHIYMTKDGRISLAGLSLAKCDYLADAIIDSFHNVN

SEQ ID NO: 13066 - protein, 459 aa, Zea mays subsp. mays
  peptide (1)..(459): Ceres Seq. ID no. 12342424
  misc_feature (137)..(455): Pfam Name: Aminotransferase class I and II Pfam Description: Aminotransferase class I and II
  misc_feature (4)..(459): Homolog of NCBI NO: 2130091 NR Description: aspartate transaminase (EC 2.6.1.1) - proso >gi|633095|dbj|BAA08106.1| plastidic aspartate aminotransferase
  misc_feature (46)..(459): Homolog of NCBI NO: 29468084 NR Description: aspartate aminotransferase [Oryza sativa]
  misc_feature (1)..(459): Homolog of NCBI NO: 445118 NR Description: Asp aminotransferase
  misc_feature (3)..(459): Homolog of NCBI NO: 485495 NR Description: aspartate transaminase (EC 2.6.1.1) AAT5
  misc_feature (1)..(459): Homolog of NCBI NO: 2605932 NR Description: aspartate aminotransferase [Lotus corniculatus]
MATAAAFSVSSPAASAVAARSKVFGGVNQARTRTGCRVGITRKNFGRVMMALAVDVSRFEGVPMAPPDPILGVSEAFKADKSELKLNLGVGAYRTEELQPYVLNVVKKAENLMLEKGENKEYLPIEGLAAFNKATAELLLGADNPVINQGLVATLQSLSGTGSLRLAAAFIQRYFPEAKVLISSPTWGNHKNIFNDARVPWSEYRYYDPKTVGLDFEGIIADIEAAPEGSFVLLHGCAHNPTGIDPTPEQWEKIADVIQEKKHMPFFDVAYQGFASGSLDEDAFSVRLFVKRGMEVFVAQSYSKNLGLYSERVGAINVVCSAPEVADRVNSQLKRLARPMYSNPPIHGAKIVANVVGDPTMFGEWKQEMELMAGRIKNVRQKLYDSLSAKDKSGKDWSFILRQIGMFSYTGLNKAQSDNMTDKWHIYMTKDGRISLAGLSLAKCDYLADAIIDSFHNVN

SEQ ID NO: 13067 - protein, 411 aa, Zea mays subsp. mays
  peptide (1)..(411): Ceres Seq. ID no. 12342425
  misc_feature (89)..(407): Pfam Name: Aminotransferase class I and II Pfam Description: Aminotransferase class I and II
  misc_feature (1)..(411): Homolog of NCBI NO: 2130091 NR Description: aspartate transaminase (EC 2.6.1.1) - proso >gi|633095|dbj|BAA08106.1| plastidic aspartate aminotransferase
  misc_feature (1)..(411): Homolog of NCBI NO: 29468084 NR Description: aspartate aminotransferase [Oryza sativa]
  misc_feature (1)..(411): Homolog of NCBI NO: 445118 NR Description: Asp aminotransferase
  misc_feature (1)..(411): Homolog of NCBI NO: 485495 NR Description: aspartate transaminase (EC 2.6.1.1) AAT5
  misc_feature (1)..(411): Homolog of NCBI NO: 2605932 NR Description: aspartate aminotransferase [Lotus corniculatus]
MMALAVDVSRFEGVPMAPPDPILGVSEAFKADKSELKLNLGVGAYRTEELQPYVLNVVKKAENLMLEKGENKEYLPIEGLAAFNKATAELLLGADNPVINQGLVATLQSLSGTGSLRLAAAFIQRYFPEAKVLISSPTWGNHKNIFNDARVPWSEYRYYDPKTVGLDFEGIIADIEAAPEGSFVLLHGCAHNPTGIDPTPEQWEKIADVIQEKKHMPFFDVAYQGFASGSLDEDAFSVRLFVKRGMEVFVAQSYSKNLGLYSERVGAINVVCSAPEVADRVNSQLKRLARPMYSNPPIHGAKIVANVVGDPTMFGEWKQEMELMAGRIKNVRQKLYDSLSAKDKSGKDWSFILRQIGMFSYTGLNKAQSDNMTDKWHIYMTKDGRISLAGLSLAKCDYLADAIIDSFHNVN

SEQ ID NO: 13068 - DNA, 1340 bp, Zea mays subsp. mays
  misc_feature (1)..(1340): Ceres Seq. ID no. 12355829
  misc_feature: MA Experiment ID: 20000479 Result: Down-regulated in Transcription
  misc_feature: MA Experiment 20000479 PARAMETER Experiment Name: Zm_Drought_P Parameter: Age (day) Value: 10
  misc_feature: MA Experiment 20000479 PARAMETER Experiment Name: Zm_Drought_P Parameter: Organism Value: Zea mays
  misc_feature: MA Experiment 20000479 PARAMETER Experiment Name: Zm_Drought_P Parameter: Plant Line Value: 35A19
  misc_feature: MA Experiment 20000479 PARAMETER Experiment Name: Zm_Drought_P Parameter: Timepoint (hr) Value: 48
  misc_feature: MA Experiment 20000479 PARAMETER Experiment Name: Zm_Drought_P Parameter: Tissue Value: Aerial
  misc_feature: MA Experiment 20000479 PARAMETER Experiment Name: Zm_Drought_P Parameter: Treatment Value: Drought vs. No Drought
  misc_feature: MA Experiment ID: 20000480 Result: Down-regulated in Transcription
  misc_feature: MA Experiment 20000480 PARAMETER Experiment Name: Zm_Drought_P Parameter: Age (day) Value: 11
  misc_feature: MA Experiment 20000480 PARAMETER Experiment Name: Zm_Drought_P Parameter: Organism Value: Zea mays
  misc_feature: MA Experiment 20000480 PARAMETER Experiment Name: Zm_Drought_P Parameter: Plant Line Value: 35A19
  misc_feature: MA Experiment 20000480 PARAMETER Experiment Name: Zm_Drought_P Parameter: Timepoint (hr) Value: 72
  misc_feature: MA Experiment 20000480 PARAMETER Experiment Name: Zm_Drought_P Parameter: Tissue Value: Aerial
  misc_feature: MA Experiment 20000480 PARAMETER Experiment Name: Zm_Drought_P Parameter: Treatment Value: Drought vs. No Drought
  misc_feature: MA Experiment ID: 20000492 Result: Down-regulated in Transcription
  misc_feature: MA Experiment 20000492 PARAMETER Experiment Name: Zm_Hybrid_Seed_Dev_P Parameter: DAP Value: 12
  misc_feature: MA Experiment 20000492 PARAMETER Experiment Name: Zm_Hybrid_Seed_Dev_P Parameter: Organism Value: Zea mays
  misc_feature: MA Experiment 20000492 PARAMETER Experiment Name: Zm_Hybrid_Seed_Dev_P Parameter: Plant Line Value: 35A19
  misc_feature: MA Experiment 20000492 PARAMETER Experiment Name: Zm_Hybrid_Seed_Dev_P Parameter: Tissue Value: Fert Kernel vs. Unfert Floret
  misc_feature: MA Experiment ID: 20000626 Result: Down-regulated in Transcription
  misc_feature: MA Experiment 20000626 PARAMETER Experiment Name: Zm_Herbicide-Treatments_P Parameter: Timepoint (hr) Value: 12
  misc_feature: MA Experiment 20000626 PARAMETER Experiment Name: Zm_Herbicide-Treatments_P Parameter: Tissue Value: Aerial
  misc_feature: MA Experiment 20000626 PARAMETER Experiment Name: Zm_Herbicide-Treatments_P Parameter: Treatment Value: Roundup vs. No Treatment
gcagctcagttactcactccggcctccagcttttcctttgcgccccagggccggaagagcccacacaccaccaccaccactagatagccagcgacgatcgagccgcgcgccggtggacgcgcacatacacgcggtagcttccttctcaagcctagctagccccatcctgcgcgcaggcgggcggcagcgagaattgacgtgcgacgacgagcttgtgcttgctagctagagagcgaggatgtcgagccggaggccgtcgtcgcgtggcaacatctccgaggacgagatcaacgagctcatctccaagctgcaggccctgctccccagctcccgccgccgcggctccggccaggtgcgtcgttgcgaacacacatgaccgctcaactaattaactcccgttcgcctgctgcgccctttttttccgttttaaaacgtctaatgcgcgcggcgcggaatgtaatgcaggcgtcgacgacgaagctgctcaaggagacctgcagctacatcaagagcctgcaccgggaggtggacgacctgagcgaccggctgtccgacctcatggccaccatggaccacaacagccccggcgcggagatcatccgcagcatcctccgctcctgatcgcccacgcgcctcctactgcggcggcgccggccggcgcgcgagagagcgaggtcggcgacgacctcgatcgccgacaacgacgaccgcgcgcgcccgcgccccccggcccatctgttctctccaccggctggccgccgggagccgagctcaattagctagggtatatctcaacctctctctctctctctctctcgctcgctctacatgtgtgtgtacctttctcttcctttcacctgcctgtctcctccctagatctgagatcatgtggctagctctcccatatcaaaatgtactagctacacgcgcacgtatggtggtggtctctgctaagcctaagcttcactgggtagtagggtactagtagcactaggggcttaagcaagctaagcttatcctcctcatcagaatcacattagctcgcaccgcactctctggcttctcgtcgatcgtcttcgtcgtcctcgctcctccgacccacatgatggctagctctccatgtgccgcttctcctctcgcacgtgccgcttctcctcttgtgttcgatatgttgtattgtttccatgtaaatttagtcggtggcctggatcgagttggctagctctctctacaggcaagagacaaccgaccgaccactactatcctagagcaaattgattatcgtcatgatggtgtactgttcaagcttttattaacgacttttaatttacttgctacgt

SEQ ID NO: 13069 - protein, 82 aa, Zea mays subsp. mays
  peptide (1)..(82): Ceres Seq. ID no. 12355830
  misc_feature (31)..(80): Homolog of NCBI NO: 30689711 NR Description: expressed protein [Arabidopsis thaliana] unknown protein [Arabidopsis thaliana]
  misc_feature (17)..(81): Homolog of NCBI NO: 37534170 NR Description: hypothetical protein similar to putative DNA
  misc_feature (31)..(80): Homolog of NCBI NO: 9294226 NR Description: DNA-binding protein-like [Arabidopsis thaliana]
  misc_feature (31)..(80): Homolog of NCBI NO: 15242499 NR Description: bHLH protein; protein id: At5g39860.1
  misc_feature (31)..(80): Homolog of NCBI NO: 21617952 NR Description: DNA-binding protein-like [Arabidopsis thaliana]
  misc_feature (23)..(80): Homolog of NCBI NO: 15242227 NR Description: bHLH protein; protein id: At5g15160.1
  misc_feature (1)..(80): Homolog of NCBI NO: 10241623 NR Description: putative DNA binding protein [Oryza sativa
  misc_feature (23)..(80): Homolog of NCBI NO: 15221264 NR Description: bHLH protein; protein id: At1g74500.1, supported
MTAQLINSRSPAAPFFSVLKRLMRAARNVMQASTTKLLKETCSYIKSLHREVDDLSDRLSDLMATMDHNSPGAEIIRSILRS

SEQ ID NO: 13070 - protein, 75 aa, Zea mays subsp. mays
  peptide (1)..(75): Ceres Seq. ID no. 12355831
QLSYSLRPPAFPLRPRAGRAHTPPPPLDSQRRSSRAPVDAHIHAVASFSSLASPILRAGGRQRELTCDDELVLAS

SEQ ID NO: 13071 - protein, 60 aa, Zea mays subsp. mays
  peptide (1)..(60): Ceres Seq. ID no. 12355832
  misc_feature (9)..(58): Homolog of NCBI NO: 30689711 NR Description: expressed protein [Arabidopsis thaliana] unknown protein [Arabidopsis thaliana]
  misc_feature (1)..(59): Homolog of NCBI NO: 37534170 NR Description: hypothetical protein similar to putative DNA
  misc_feature (9)..(58): Homolog of NCBI NO: 9294226 NR Description: DNA-binding protein-like [Arabidopsis thaliana]
  misc_feature (9)..(58): Homolog of NCBI NO: 15242499 NR Description: bHLH protein; protein id: At5g39860.1
  misc_feature (9)..(58): Homolog of NCBI NO: 21617952 NR Description: DNA-binding protein-like [Arabidopsis thaliana]
  misc_feature (1)..(58): Homolog of NCBI NO: 15242227 NR Description: bHLH protein; protein id: At5g15160.1
  misc_feature (1)..(58): Homolog of NCBI NO: 10241623 NR Description: putative DNA binding protein [Oryza sativa
  misc_feature (1)..(58): Homolog of NCBI NO: 15221264 NR Description: bHLH protein; protein id: At1g74500.1, supported
MRAARNVMQASTTKLLKETCSYIKSLHREVDDLSDRLSDLMATMDHNSPGAEIIRSILRS

SEQ ID NO: 13072 - DNA, 1887 bp, Zea mays subsp. mays
  misc_feature (1)..(1887): Ceres Seq. ID no. 12348859
  misc_feature: MA Experiment ID: 108535 Result: Up-regulated in Transcription
  misc_feature: MA Experiment 108535 PARAMETER Experiment Name: Zm_Meristem_P Parameter: Age (day) Value: 8
  misc_feature: MA Experiment 108535 PARAMETER Experiment Name: Zm_Meristem_P Parameter: Organism Value: Zea mays
  misc_feature: MA Experiment 108535 PARAMETER Experiment Name: Zm_Meristem_P Parameter: Plant Line Value: 35A19
  misc_feature: MA Experiment 108535 PARAMETER Experiment Name: Zm_Meristem_P Parameter: Tissue Value: Root Meristem vs. Above Root Meristem
aaaccgtcggaaccctagatctctctcgcccgcgctccgaaaccccagatccgccatgcaccagcctagagctcgctacccacccggctatggctccggcggtggaggcggagccggacgtggcggtggaggcggaaatggaggaggtggcggaaaccacaactactacggccgaaacccgcagcaacaccactaccaccagcagcagcagtcgcagcactctcataggaactcttcgtaccagcaacagtggctgcggcgagaccaggcccccgccgttgcgggggcagcgtccggaaacgctgtggccaagacggcgtctcagcttgacgccgtaggctcgagctcccaagactggaaggctcaactaaatataccagctccagatacacgctacaggacagaggatgtcactgcaacaaaaggcaatgagtttgaagattatttcttgaaacgtgaactgcttatgggaatctacgaaaagggatttgaaagaccatctcctattcaagaagaaagcattcctattgcgctgactggaagtgatattcttgcaagggcaaaaaatggcactggaaagactgctgccttttgcattccggcacttgaaaaaattgatcctgaaaaaaatgctattcaagttgttatactagtaccaacaagggaactggctctgcaaacttcgcaagtctgtaaagagctcgggaagtaccttaacattcaagttatggttagcactggaggaactagcttgaaggatgacatcatgcgtttataccaacctgttcatttacttgttgggactcctggccgaatacttgatcttaccaggaagggcatttgtgtgttgaaagactgttcaatgcttgtcatggatgaggcagacaagctattagctccagagttccagccttctgtggaggcacttattcatttccttccacctagtcggcagctgttgatgttttcagcaacctttcctgtaactgtcaaggaattcaaagataaatatctgcctagaccttatgtgattaatctaatggatgaactgaccctgaaaggaatcacacaatattatgcttttgtcgaagaaaggcaaaaagttcattgcctgaatacacttttctcaaagcttcaaattaatcaatccattatattctgcaactctgttaatagagttgagctactggctaagaaaataactgaactcggttattcatgcttctacattcatgctaagatgttgcaagaccacagaaaccgagtgtttcatgattttcgtaatggtgcttgcagaaaccttgtgtgcacagatctgtttaccagaggaattgatatccaggctgttaatgtggtcattaattttgacttccctaagacatctgagacatacttacacagggttggccgttctgggagatatggacaccttggtttggcagtgaacttgatcacttatgaagaccgtttcaacttatataggattgagcaagaacttggaacggaaattaagacaatacccccacagattgacctgtccatatactgccaatgatatgtgacagtttcaatgagcatcggacacattttatttattttgagaacatctgtacatagcaacccatcaagtgagttctccaactaaggcgcaactatttcagaagctacctaaatggctacattcctttgtcgtcacacatcaatttctcccccattctcgtcgggttttgttttaatgccttgatgtcgtttgtaagcttacttggattagtagaggaagtgtttcctgtaggctctgatctggtactaacctgtttagctgaggacatgcacattgggtgggctgcttggggcccaaaactatgatgagatgagacattatcttac

SEQ ID NO: 13073 - protein, 517 aa, Zea mays subsp. mays
  peptide (1)..(517): Ceres Seq. ID no. 12348860
  misc_feature (156)..(358): Pfam Name: DEAD/DEAH box helicase Pfam Description: DEAD/DEAH box helicase
  misc_feature (12)..(517): Homolog of NCBI NO: 37535822 NR Description: putative RNA helicase [Oryza sativa (japonica group)] >gi|10140782|gb|AAG13612.1| putative RNA helicase [Oryza
  misc_feature (12)..(517): Homolog of NCBI NO: 22758337 NR Description: putative RNA helicase [Oryza sativa (japonica
  misc_feature (22)..(517): Homolog of NCBI NO: 32489827 NR Description: OSJNBb0039L24.10 [Oryza sativa (japonica
  misc_feature (23)..(517): Homolog of NCBI NO: 22328183 NR Description: DEAD/DEAH box RNA helicase, putative; protein id: supported by cDNA: gi_19423938, supported by cDNA: gi_21280838 thaliana] >gi|19423939|gb|AAL87312.1| putative RNA putative RNA
  misc_feature (23)..(517): Homolog of NCBI NO: 11267537 NR Description: RNA helicase RH8 [imported] - Arabidopsis
  misc_feature (19)..(517): Homolog of NCBI NO: 15233064 NR Description: DEAD/DEAH box RNA helicase, putative; protein id:
  misc_feature (23)..(517): Homolog of NCBI NO: 7436453 NR Description: probable RNA helicase (EC 3.6.1.-) F6N23.6 -
  misc_feature (19)..(517): Homolog of NCBI NO: 11267538 NR Description: RNA helicase RH12 [imported] - Arabidopsis
  misc_feature (60)..(517): Homolog of NCBI NO: 15225898 NR Description: DEAD/DEAH box RNA helicase, putative; protein id:
  misc_feature (60)..(517): Homolog of NCBI NO: 14532476 NR Description: At2g45810/F4I18.21 [Arabidopsis thaliana]
NRRNPRSLSPALRNPRSAMHQPRARYPPGYGSGGGGGAGRGGGGGNGGGGGNHNYYGRNPQQHHYHQQQQSQHSHRNSSYQQQWLRRDQAPAVAGAASGNAVAKTASQLDAVGSSSQDWKAQLNIPAPDTRYRTEDVTATKGNEFEDYFLKRELLMGIYEKGFERPSPIQEESIPIALTGSDILARAKNGTGKTAAFCIPALEKIDPEKNAIQVVILVPTRELALQTSQVCKELGKYLNIQVMVSTGGTSLKDDIMRLYQPVHLLVGTPGRILDLTRKGICVLKDCSMLVMDEADKLLAPEFQPSVEALIHFLPPSRQLLMFSATFPVTVKEFKDKYLPRPYVINLMDELTLKGITQYYAFVEERQKVHCLNTLFSKLQINQSIIFCNSVNRVELLAKKITELGYSCFYIHAKMLQDHRNRVFHDFRNGACRNLVCTDLFTRGIDIQAVNVVINFDFPKTSETYLHRVGRSGRYGHLGLAVNLITYEDRFNLYRIEQELGTEIKTIPPQIDLSIYCQ

SEQ ID NO: 13074 - protein, 499 aa, Zea mays subsp. mays
  peptide (1)..(499): Ceres Seq. ID no. 12348861
  misc_feature (138)..(340): Pfam Name: DEAD/DEAH box helicase Pfam Description: DEAD/DEAH box helicase
  misc_feature (1)..(499): Homolog of NCBI NO: 37535822 NR Description: putative RNA helicase [Oryza sativa (japonica group)] >gi|10140782|gb|AAG13612.1| putative RNA helicase [Oryza
  misc_feature (1)..(499): Homolog of NCBI NO: 22758337 NR Description: putative RNA helicase [Oryza sativa (japonica
  misc_feature (4)..(499): Homolog of NCBI NO: 32489827 NR Description: OSJNBb0039L24.10 [Oryza sativa (japonica
  misc_feature (5)..(499): Homolog of NCBI NO: 22328183 NR Description: DEAD/DEAH box RNA helicase, putative; protein id: supported by cDNA: gi_19423938, supported by cDNA: gi_21280838 thaliana] >gi|19423939|gb|AAL87312.1| putative RNA putative RNA
  misc_feature (5)..(499): Homolog of NCBI NO: 11267537 NR Description: RNA helicase RH8 [imported] - Arabidopsis
  misc_feature (1)..(499): Homolog of NCBI NO: 15233064 NR Description: DEAD/DEAH box RNA helicase, putative; protein id:
  misc_feature (5)..(499): Homolog of NCBI NO: 7436453 NR Description: probable RNA helicase (EC 3.6.1.-) F6N23.6 -
  misc_feature (1)..(499): Homolog of NCBI NO: 11267538 NR Description: RNA helicase RH12 [imported] - Arabidopsis
  misc_feature (42)..(499): Homolog of NCBI NO: 15225898 NR Description: DEAD/DEAH box RNA helicase, putative; protein id:
  misc_feature (42)..(499): Homolog of NCBI NO: 14532476 NR Description: At2g45810/F4I18.21 [Arabidopsis thaliana]
MHQPRARYPPGYGSGGGGGAGRGGGGGNGGGGGNHNYYGRNPQQHHYHQQQQSQHSHRNSSYQQQWLRRDQAPAVAGAASGNAVAKTASQLDAVGSSSQDWKAQLNIPAPDTRYRTEDVTATKGNEFEDYFLKRELLMGIYEKGFERPSPIQEESIPIALTGSDILARAKNGTGKTAAFCIPALEKIDPEKNAIQVVILVPTRELALQTSQVCKELGKYLNIQVMVSTGGTSLKDDIMRLYQPVHLLVGTPGRILDLTRKGICVLKDCSMLVMDEADKLLAPEFQPSVEALIHFLPPSRQLLMFSATFPVTVKEFKDKYLPRPYVINLMDELTLKGITQYYAFVEERQKVHCLNTLFSKLQINQSIIFCNSVNRVELLAKKITELGYSCFYIHAKMLQDHRNRVFHDFRNGACRNLVCTDLFTRGIDIQAVNVVINFDFPKTSETYLHRVGRSGRYGHLGLAVNLITYEDRFNLYRIEQELGTEIKTIPPQIDLSIYCQ

SEQ ID NO: 13075 - protein, 362 aa, Zea mays subsp. mays
  peptide (1)..(362): Ceres Seq. ID no. 12348862
  misc_feature (1)..(203): Pfam Name: DEAD/DEAH box helicase Pfam Description: DEAD/DEAH box helicase
  misc_feature (1)..(362): Homolog of NCBI NO: 37535822 NR Description: putative RNA helicase [Oryza sativa (japonica group)] >gi|10140782|gb|AAG13612.1| putative RNA helicase [Oryza
  misc_feature (1)..(362): Homolog of NCBI NO: 22758337 NR Description: putative RNA helicase [Oryza sativa (japonica
  misc_feature (1)..(362): Homolog of NCBI NO: 32489827 NR Description: OSJNBb0039L24.10 [Oryza sativa (japonica
  misc_feature (1)..(362): Homolog of NCBI NO: 22328183 NR Description: DEAD/DEAH box RNA helicase, putative; protein id: supported by cDNA: gi_19423938, supported by cDNA: gi_21280838 thaliana] >gi|19423939|gb|AAL87312.1| putative RNA putative RNA
  misc_feature (1)..(362): Homolog of NCBI NO: 11267537 NR Description: RNA helicase RH8 [imported] - Arabidopsis
  misc_feature (1)..(362): Homolog of NCBI NO: 15233064 NR Description: DEAD/DEAH box RNA helicase, putative; protein id:
  misc_feature (1)..(362): Homolog of NCBI NO: 7436453 NR Description: probable RNA helicase (EC 3.6.1.-) F6N23.6 -
  misc_feature (1)..(362): Homolog of NCBI NO: 11267538 NR Description: RNA helicase RH12 [imported] - Arabidopsis
  misc_feature (1)..(362): Homolog of NCBI NO: 15225898 NR Description: DEAD/DEAH box RNA helicase, putative; protein id:
  misc_feature (1)..(362): Homolog of NCBI NO: 14532476 NR Description: At2g45810/F4I18.21 [Arabidopsis thaliana]
MGIYEKGFERPSPIQEESIPIALTGSDILARAKNGTGKTAAFCIPALEKIDPEKNAIQVVILVPTRELALQTSQVCKELGKYLNIQVMVSTGGTSLKDDIMRLYQPVHLLVGTPGRILDLTRKGICVLKDCSMLVMDEADKLLAPEFQPSVEALIHFLPPSRQLLMFSATFPVTVKEFKDKYLPRPYVINLMDELTLKGITQYYAFVEERQKVHCLNTLFSKLQINQSIIFCNSVNRVELLAKKITELGYSCFYIHAKMLQDHRNRVFHDFRNGACRNLVCTDLFTRGIDIQAVNVVINFDFPKTSETYLHRVGRSGRYGHLGLAVNLITYEDRFNLYRIEQELGTEIKTIPPQIDLSIYCQ

SEQ ID NO: 13076 - DNA, 670 bp, Zea mays subsp. mays
  misc_feature (1)..(670): Ceres Seq. ID no. 12345755
  misc_feature: MA Experiment ID: 108522 Result: Up-regulated in Transcription
  misc_feature: MA Experiment 108522 PARAMETER Experiment Name: Zm_42deg_Heat_P Parameter: Age (day) Value: 8
  misc_feature: MA Experiment 108522 PARAMETER Experiment Name: Zm_42deg_Heat_P Parameter: Organism Value: Zea mays
  misc_feature: MA Experiment 108522 PARAMETER Experiment Name: Zm_42deg_Heat_P Parameter: Plant Line Value: 35A19
  misc_feature: MA Experiment 108522 PARAMETER Experiment Name: Zm_42deg_Heat_P Parameter: Temperature (deg C) Value: 42 vs. 22
  misc_feature: MA Experiment 108522 PARAMETER Experiment Name: Zm_42deg_Heat_P Parameter: Timepoint (hr) Value: 1
  misc_feature: MA Experiment 108522 PARAMETER Experiment Name: Zm_42deg_Heat_P Parameter: Tissue Value: Aerial
  misc_feature: MA Experiment ID: 108528 Result: Up-regulated in Transcription
  misc_feature: MA Experiment 108528 PARAMETER Experiment Name: Zm_Imbibed_Seeds_P Parameter: Age (day) Value: 5 vs. 2
  misc_feature: MA Experiment 108528 PARAMETER Experiment Name: Zm_Imbibed_Seeds_P Parameter: Organism Value: Zea mays
  misc_feature: MA Experiment 108528 PARAMETER Experiment Name: Zm_Imbibed_Seeds_P Parameter: Plant Line Value: 35A19
  misc_feature: MA Experiment 108528 PARAMETER Experiment Name: Zm_Imbibed_Seeds_P Parameter: Tissue Value: Aerial vs. Embryo
  misc_feature: MA Experiment ID: 108530 Result: Up-regulated in Transcription
  misc_feature: MA Experiment 108530 PARAMETER Experiment Name: Zm_Imbibed_Seeds_P Parameter: Age (day) Value: 6 vs. 2
  misc_feature: MA Experiment 108530 PARAMETER Experiment Name: Zm_Imbibed_Seeds_P Parameter: Organism Value: Zea mays
  misc_feature: MA Experiment 108530 PARAMETER Experiment Name: Zm_Imbibed_Seeds_P Parameter: Plant Line Value: 35A19
  misc_feature: MA Experiment 108530 PARAMETER Experiment Name: Zm_Imbibed_Seeds_P Parameter: Tissue Value: Aerial vs. Embryo
  misc_feature: MA Experiment ID: 108536 Result: Down-regulated in Transcription
  misc_feature: MA Experiment 108536 PARAMETER Experiment Name: Zm_Meristem_P Parameter: Age (day) Value: 8
  misc_feature: MA Experiment 108536 PARAMETER Experiment Name: Zm_Meristem_P Parameter: Organism Value: Zea mays
  misc_feature: MA Experiment 108536 PARAMETER Experiment Name: Zm_Meristem_P Parameter: Plant Line Value: 35A19
  misc_feature: MA Experiment 108536 PARAMETER Experiment Name: Zm_Meristem_P Parameter: Tissue Value: Shoot Meristem vs. Above Shoot Meristem
  misc_feature: MA Experiment ID: 108543 Result: Up-regulated in Transcription
  misc_feature: MA Experiment ID: 108545 Result: Up-regulated in Transcription
  misc_feature: MA Experiment 108545 PARAMETER Experiment Name: Zm_Imbibed_Seeds_P Parameter: Age (day) Value: 3 vs. 2
  misc_feature: MA Experiment 108545 PARAMETER Experiment Name: Zm_Imbibed_Seeds_P Parameter: Organism Value: Zea mays
  misc_feature: MA Experiment 108545 PARAMETER Experiment Name: Zm_Imbibed_Seeds_P Parameter: Plant Line Value: 35A19
  misc_feature: MA Experiment 108545 PARAMETER Experiment Name: Zm_Imbibed_Seeds_P Parameter: Tissue Value: Aerial vs. Embryo
  misc_feature: MA Experiment ID: 108546 Result: Down-regulated in Transcription
  misc_feature: MA Experiment 108546 PARAMETER Experiment Name: Zm_Imbibed_Seeds_P Parameter: Age (day) Value: 3 vs. 2
  misc_feature: MA Experiment 108546 PARAMETER Experiment Name: Zm_Imbibed_Seeds_P Parameter: Organism Value: Zea mays
  misc_feature: MA Experiment 108546 PARAMETER Experiment Name: Zm_Imbibed_Seeds_P Parameter: Plant Line Value: 35A19
  misc_feature: MA Experiment 108546 PARAMETER Experiment Name: Zm_Imbibed_Seeds_P Parameter: Tissue Value: Roots vs. Embryo
  misc_feature: MA Experiment ID: 108547 Result: Up-regulated in Transcription
  misc_feature: MA Experiment 108547 PARAMETER Experiment Name: Zm_Imbibed_Seeds_P Parameter: Age (day) Value: 4 vs. 2
  misc_feature: MA Experiment 108547 PARAMETER Experiment Name: Zm_Imbibed_Seeds_P Parameter: Organism Value: Zea mays
  misc_feature: MA Experiment 108547 PARAMETER Experiment Name: Zm_Imbibed_Seeds_P Parameter: Plant Line Value: 35A19
  misc_feature: MA Experiment 108547 PARAMETER Experiment Name: Zm_Imbibed_Seeds_P Parameter: Tissue Value: Aerial vs. Embryo
atattggctagcttttggctcggcagctaacgacctgcagccaaccatctaccagcgactcagcgagcgagagcagcacacactgcacgcagctagctaggagcagcagcagcggcggcgatggcggcctccatgatctcctcgtcagctctggcggtggcgcctcagggcctgccgcccctcggccgccgcgcctcctccttcgccgtcgtctgctccaagaagaagatcaagaccgacaagccctacgggattgggggtggcctgaccgtcgacgtcgacgccaacgggagaaagggcaagggcaagggcgtgtaccagttcgtcgacaagtacggcgcgaacgtcgacggatacagcccaatctacaacgaggatgactggtctcccaccggcgacgtctacgtcggtggaaccactgggcttctgatctgggccgtcaccctcgctgggatcctcggcggcggcgccctcctcgtctacaacaccagcgccctctccggctaaggatatccaatgcatgcgcttcttgcgattcgtcatgtaaaatcagggtgtctgtctataatctagcctccatggatgctcaaccttcgtcatgtaacaataatcagtgctactcttcattacataattttgatgctatatatatataccccatccctccctt

SEQ ID NO: 13077 - protein, 128 aa, Zea mays subsp. mays
  peptide (1)..(128): Ceres Seq. ID no. 12345756
  misc_feature (35)..(128): Pfam Name: Photosystem II 10 kDa polypeptide PsbR Pfam Description: Photosystem II 10 kDa polypeptide PsbR
  misc_feature (1)..(128): Homolog of NCBI NO: 38636958 NR Description: putative photosystem II 10K protein [Oryza sativa
  misc_feature (5)..(128): Homolog of NCBI NO: 7443194 NR Description: photosystem II 10K protein - rice
  misc_feature (1)..(127): Homolog of NCBI NO: 3914472 NR Description: Photosystem II 10 kDa polypeptide, chloroplast
  misc_feature (1)..(127): Homolog of NCBI NO: 131399 NR Description: Photosystem II 10 kDa polypeptide, chloroplast
  misc_feature (1)..(127): Homolog of NCBI NO: 3914471 NR Description: Photosystem II 10 kDa polypeptide, chloroplast >gi|1217642|emb|CAA65231.1| PSII polypeptide [Lycopersicon
  misc_feature (1)..(127): Homolog of NCBI NO: 25989650 NR Description: photosystem II 10 kDa protein [Xerophyta humilis]
  misc_feature (1)..(127): Homolog of NCBI NO: 131400 NR Description: Photosystem II 10 kDa polypeptide, chloroplast
  misc_feature (13)..(127): Homolog of NCBI NO: 1418984 NR Description: photosystem II 10 kD polypeptide [Lycopersicon
  misc_feature (1)..(127): Homolog of NCBI NO: 21491 NR Description: ST-LS1 protein (AA 1-138) [Solanum tuberosum]
  misc_feature (1)..(127): Homolog of NCBI NO: 33694227 NR Description: 10 kDa photosystem II polypeptide [Trifolium
MAASMISSSALAVAPQGLPPLGRRASSFAVVCSKKKIKTDKPYGIGGGLTVDVDANGRKGKGKGVYQFVDKYGANVDGYSPIYNEDDWSPTGDVYVGGTTGLLIWAVTLAGILGGGALLVYNTSALSG

SEQ ID NO: 13078 - protein, 124 aa, Zea mays subsp. mays
  peptide (1)..(124): Ceres Seq. ID no. 12345757
  misc_feature (31)..(124): Pfam Name: Photosystem II 10 kDa polypeptide PsbR Pfam Description: Photosystem II 10 kDa polypeptide PsbR
  misc_feature (1)..(124): Homolog of NCBI NO: 38636958 NR Description: putative photosystem II 10K protein [Oryza sativa
  misc_feature (1)..(124): Homolog of NCBI NO: 7443194 NR Description: photosystem II 10K protein - rice
  misc_feature (1)..(123): Homolog of NCBI NO: 3914472 NR Description: Photosystem II 10 kDa polypeptide, chloroplast
  misc_feature (1)..(123): Homolog of NCBI NO: 131399 NR Description: Photosystem II 10 kDa polypeptide, chloroplast
  misc_feature (1)..(123): Homolog of NCBI NO: 3914471 NR Description: Photosystem II 10 kDa polypeptide, chloroplast >gi|1217642|emb|CAA65231.1| PSII polypeptide [Lycopersicon
  misc_feature (1)..(123): Homolog of NCBI NO: 25989650 NR Description: photosystem II 10 kDa protein [Xerophyta humilis]
  misc_feature (1)..(123): Homolog of NCBI NO: 131400 NR Description: Photosystem II 10 kDa polypeptide, chloroplast
  misc_feature (9)..(123): Homolog of NCBI NO: 1418984 NR Description: photosystem II 10 kD polypeptide [Lycopersicon
  misc_feature (1)..(123): Homolog of NCBI NO: 21491 NR Description: ST-LS1 protein (AA 1-138) [Solanum tuberosum]
  misc_feature (1)..(123): Homolog of NCBI NO: 33694227 NR Description: 10 kDa photosystem II polypeptide [Trifolium
MISSSALAVAPQGLPPLGRRASSFAVVCSKKKIKTDKPYGIGGGLTVDVDANGRKGKGKGVYQFVDKYGANVDGYSPIYNEDDWSPTGDVYVGGTTGLLIWAVTLAGILGGGALLVYNTSALSG

SEQ ID NO: 13079 - DNA, 1482 bp, Zea mays subsp. mays
  misc_feature (1)..(1482): Ceres Seq. ID no. 13492673
  misc_feature: MA Experiment ID: 108523 Result: Up-regulated in Transcription
  misc_feature: MA Experiment 108523 PARAMETER Experiment Name: Zm_42deg_Heat_P Parameter: Age (day) Value: 8
  misc_feature: MA Experiment 108523 PARAMETER Experiment Name: Zm_42deg_Heat_P Parameter: Organism Value: Zea mays
  misc_feature: MA Experiment 108523 PARAMETER Experiment Name: Zm_42deg_Heat_P Parameter: Plant Line Value: 35A19
  misc_feature: MA Experiment 108523 PARAMETER Experiment Name: Zm_42deg_Heat_P Parameter: Temperature (deg C) Value: 42 vs. 22
  misc_feature: MA Experiment 108523 PARAMETER Experiment Name: Zm_42deg_Heat_P Parameter: Timepoint (hr) Value: 6
  misc_feature: MA Experiment 108523 PARAMETER Experiment Name: Zm_42deg_Heat_P Parameter: Tissue Value: Aerial
atcgcctccaccgttctctcttcctctgctcttctctgcctgcctgagctcaccgcacctcgcctcctcaccgcgtttcctccgttaatccggtaaccgtctctcaccatctctgcggtcaccctagagtccctctctgcctgcccctgccagcgcgggggcgcggtgtggctctcccagatccgcctggcattgctcgctcggggtcgtgccaagccgatccgatctcgcgcttgcgcgctcctgccgcggatccggctggatctcgctggaattggggcgcgcgtttatttgaaatgcagcagatccgcgtgcttgcgcgcgtgatctggcgtcgtcgcgggcctttctttaacgaaatggcccgatctgtggtttggtggtcaatgccatgtttttttttattattactgtcttatgctgggagaaaaataggaacagagaatagcttcaattgatgccttttagaacggattctatagagcaactcatggatactttctgcttgttttaacaaaatgtggcatcgggcgagctctgctgtaggtagaaaatggccgatgccgaggatatccagcccctcgtctgcgacaacggaactggcatggtcaaggctgggttcgccggcgacgacgccccgagggccgtcttccccagcatcgtggggcgcccgcgccacactggtgtcatggtcgggatggggcagaaggacgcctacgtcggtgacgaggcgcagtccaagaggggtatcctgaccctcaagtaccccatcgagcacgggatcgtcagcaactgggacgacatggagaagatctggcatcacaccttctacaacgagctccgcgtggctcccgaggagcaccccgtcctcctcaccgaggcgcccctgaaccccaaggctaacagggagaagatgacccagatcatgttcgagaccttcaacacccccgctatgtacgtcgccatccaggccgtgctctctctgtatgccagtggccgtaccacaggtatcgtgctcgactcgggagatggtgtgagccacaccgtccccatctacgagggatacgccctcccccacgccatccttcgccttgatctggccggtcgcgacctcaccgactacctgatgaagatcctgactgagcgcggctactccttcaccaccaccgctgagcgggaaatcgtgagggacatgaaggagaagctcgcctacatcgccctggactacgaccaggagatggagaccgccaagaccagcagtttgagctgtatatgtaggtagtaggtaatagggtagttgccaaaaggacggctcccttttcctattgggaattgcgaatttttgtaggaactaataccttgcacagcaatgcctcgatgccaagatacagactttaaatttaatgttggattagatgctggaagagaaacatcctggtgtatattgcagtggaatgtactgctggaatacatgtttttccg

SEQ ID NO: 13080 - protein, 242 aa, Zea mays subsp. mays
  peptide (1)..(242): Ceres Seq. ID no. 13492674
  misc_feature (1)..(236): Pfam Name: Actin Pfam Description: Actin
  misc_feature (1)..(236): Homolog of NCBI NO: 1703107 NR Description: ACTIN 1 >gi|7441414|pir||JE0147 actin 1 - sorghum
  misc_feature (1)..(236): Homolog of NCBI NO: 28301928 NR Description: actin [Oryza sativa (japonica cultivar-group)]
  misc_feature (1)..(236): Homolog of NCBI NO: 71634 NR Description: actin 1 - rice
  misc_feature (1)..(236): Homolog of NCBI NO: 113222 NR Description: ACTIN 1 >gi|295885|emb|CAA33874.1| actin [Oryza
  misc_feature (1)..(236): Homolog of NCBI NO: 15229955 NR Description: actin 11 (ACT11) [Arabidopsis thaliana]
  misc_feature (1)..(236): Homolog of NCBI NO: 20322 NR Description: Actin (AA 1-377) [Oryza sativa]
  misc_feature (1)..(236): Homolog of NCBI NO: 11276978 NR Description: actin ACT2 [imported] - Striga asiatica
  misc_feature (1)..(236): Homolog of NCBI NO: 11276977 NR Description: actin [imported] - Striga asiatica
  misc_feature (1)..(236): Homolog of NCBI NO: 11276969 NR Description: actin 1 [imported] - small naked oat
  misc_feature (1)..(236): Homolog of NCBI NO: 15231447 NR Description: actin 12 [Arabidopsis thaliana]
MADAEDIQPLVCDNGTGMVKAGFAGDDAPRAVFPSIVGRPRHTGVMVGMGQKDAYVGDEAQSKRGILTLKYPIEHGIVSNWDDMEKIWHHTFYNELRVAPEEHPVLLTEAPLNPKANREKMTQIMFETFNTPAMYVAIQAVLSLYASGRTTGIVLDSGDGVSHTVPIYEGYALPHAILRLDLAGRDLTDYLMKILTERGYSFTTTAEREIVRDMKEKLAYIALDYDQEMETAKTSSLSCICR

SEQ ID NO: 13081 - protein, 225 aa, Zea mays subsp. mays
  peptide (1)..(225): Ceres Seq. ID no. 13492675
  misc_feature (1)..(219): Pfam Name: Actin Pfam Description: Actin
  misc_feature (1)..(219): Homolog of NCBI NO: 1703107 NR Description: ACTIN 1 >gi|7441414|pir||JE0147 actin 1 - sorghum
  misc_feature (1)..(219): Homolog of NCBI NO: 28301928 NR Description: actin [Oryza sativa (japonica cultivar-group)]
  misc_feature (1)..(219): Homolog of NCBI NO: 71634 NR Description: actin 1 - rice
  misc_feature (1)..(219): Homolog of NCBI NO: 113222 NR Description: ACTIN 1 >gi|295885|emb|CAA33874.1| actin [Oryza
  misc_feature (1)..(219): Homolog of NCBI NO: 15229955 NR Description: actin 11 (ACT11) [Arabidopsis thaliana]
  misc_feature (1)..(219): Homolog of NCBI NO: 20322 NR Description: Actin (AA 1-377) [Oryza sativa]
  misc_feature (1)..(219): Homolog of NCBI NO: 11276978 NR Description: actin ACT2 [imported] - Striga asiatica
  misc_feature (1)..(219): Homolog of NCBI NO: 11276977 NR Description: actin [imported] - Striga asiatica
  misc_feature (1)..(219): Homolog of NCBI NO: 11276969 NR Description: actin 1 [imported] - small naked oat
  misc_feature (1)..(219): Homolog of NCBI NO: 15231447 NR Description: actin 12 [Arabidopsis thaliana]
MVKAGFAGDDAPRAVFPSIVGRPRHTGVMVGMGQKDAYVGDEAQSKRGILTLKYPIEHGIVSNWDDMEKIWHHTFYNELRVAPEEHPVLLTEAPLNPKANREKMTQIMFETFNTPAMYVAIQAVLSLYASGRTTGIVLDSGDGVSHTVPIYEGYALPHAILRLDLAGRDLTDYLMKILTERGYSFTTTAEREIVRDMKEKLAYIALDYDQEMETAKTSSLSCICR

SEQ ID NO: 13082 - protein, 197 aa, Zea mays subsp. mays
  peptide (1)..(197): Ceres Seq. ID no. 13492676
  misc_feature (1)..(191): Pfam Name: Actin Pfam Description: Actin
  misc_feature (1)..(191): Homolog of NCBI NO: 1703107 NR Description: ACTIN 1 >gi|7441414|pir||JE0147 actin 1 - sorghum
  misc_feature (1)..(191): Homolog of NCBI NO: 28301928 NR Description: actin [Oryza sativa (japonica cultivar-group)]
  misc_feature (1)..(191): Homolog of NCBI NO: 71634 NR Description: actin 1 - rice
  misc_feature (1)..(191): Homolog of NCBI NO: 113222 NR Description: ACTIN 1 >gi|295885|emb|CAA33874.1| actin [Oryza
  misc_feature (1)..(191): Homolog of NCBI NO: 15229955 NR Description: actin 11 (ACT11) [Arabidopsis thaliana]
  misc_feature (1)..(191): Homolog of NCBI NO: 20322 NR Description: Actin (AA 1-377) [Oryza sativa]
  misc_feature (1)..(191): Homolog of NCBI NO: 11276978 NR Description: actin ACT2 [imported] - Striga asiatica
  misc_feature (1)..(191): Homolog of NCBI NO: 11276977 NR Description: actin [imported] - Striga asiatica
  misc_feature (1)..(191): Homolog of NCBI NO: 11276969 NR Description: actin 1 [imported] - small naked oat
  misc_feature (1)..(191): Homolog of NCBI NO: 15231447 NR Description: actin 12 [Arabidopsis thaliana]
MVGMGQKDAYVGDEAQSKRGILTLKYPIEHGIVSNWDDMEKIWHHTFYNELRVAPEEHPVLLTEAPLNPKANREKMTQIMFETFNTPAMYVAIQAVLSLYASGRTTGIVLDSGDGVSHTVPIYEGYALPHAILRLDLAGRDLTDYLMKILTERGYSFTTTAEREIVRDMKEKLAYIALDYDQEMETAKTSSLSCICR

SEQ ID NO: 13083 - DNA, 1858 bp, Zea mays subsp. mays
  misc_feature (1)..(1858): Ceres Seq. ID no. 12355801
  misc_feature: MA Experiment ID: 108522 Result: Up-regulated in Transcription
  misc_feature: MA Experiment 108522 PARAMETER Experiment Name: Zm_42deg_Heat_P Parameter: Age (day) Value: 8
  misc_feature: MA Experiment 108522 PARAMETER Experiment Name: Zm_42deg_Heat_P Parameter: Organism Value: Zea mays
  misc_feature: MA Experiment 108522 PARAMETER Experiment Name: Zm_42deg_Heat_P Parameter: Plant Line Value: 35A19
  misc_feature: MA Experiment 108522 PARAMETER Experiment Name: Zm_42deg_Heat_P Parameter: Temperature (deg C) Value: 42 vs. 22
  misc_feature: MA Experiment 108522 PARAMETER Experiment Name: Zm_42deg_Heat_P Parameter: Timepoint (hr) Value: 1
  misc_feature: MA Experiment 108522 PARAMETER Experiment Name: Zm_42deg_Heat_P Parameter: Tissue Value: Aerial
  misc_feature: MA Experiment ID: 108529 Result: Up-regulated in Transcription
  misc_feature: MA Experiment 108529 PARAMETER Experiment Name: Zm_Imbibed_Seeds_P Parameter: Age (day) Value: 5 vs. 2
  misc_feature: MA Experiment 108529 PARAMETER Experiment Name: Zm_Imbibed_Seeds_P Parameter: Organism Value: Zea mays
  misc_feature: MA Experiment 108529 PARAMETER Experiment Name: Zm_Imbibed_Seeds_P Parameter: Plant Line Value: 35A19
  misc_feature: MA Experiment 108529 PARAMETER Experiment Name: Zm_Imbibed_Seeds_P Parameter: Tissue Value: Roots vs. Embryo
  misc_feature: MA Experiment ID: 108546 Result: Up-regulated in Transcription
  misc_feature: MA Experiment 108546 PARAMETER Experiment Name: Zm_Imbibed_Seeds_P Parameter: Age (day) Value: 3 vs. 2
  misc_feature: MA Experiment 108546 PARAMETER Experiment Name: Zm_Imbibed_Seeds_P Parameter: Organism Value: Zea mays
  misc_feature: MA Experiment 108546 PARAMETER Experiment Name: Zm_Imbibed_Seeds_P Parameter: Plant Line Value: 35A19
  misc_feature: MA Experiment 108546 PARAMETER Experiment Name: Zm_Imbibed_Seeds_P Parameter: Tissue Value: Roots vs. Embryo
  misc_feature: MA Experiment ID: 20000108 Result: Down-regulated in Transcription
  misc_feature: MA Experiment 20000108 PARAMETER Experiment Name: Zm_Root-Tips_P Parameter: Age (day) Value: 12
  misc_feature: MA Experiment 20000108 PARAMETER Experiment Name: Zm_Root-Tips_P Parameter: Organism Value: Zea mays
  misc_feature: MA Experiment 20000108 PARAMETER Experiment Name: Zm_Root-Tips_P Parameter: Tissue Value: Root tips vs. Root mid region    35
  misc_feature: MA Experiment 20000108 PARAMETER Experiment Name: Zm_Root-Tips_P Parameter: Tissue Value: Root tips vs. Root mid region   Sequence Listing-Misc Features (4)
tttacaagcttaaaacgcaccggcatggccattgtacaggacaacggtgtcctgcacttgcacccttatgccgtcgccgcggcggcagcggcattgatctcggcgtacatggtgtggttctgggcgctgacgcgacggctgtccgggccgcggatgtggcccctcgtcggcagcctgcccagcgtcgtcctgaaccgggcgcgggttcacgactggatcgtcgacaacctgcgctccaagggggaagcggccacgtaccagacgtgcatcttgccgctgccgttcttggcgcggcgccaggggctggtgaccgtcacgtgcaacccgcggaacctggagcacatcctgcgcgcgcgtttcgacaactaccccaagggccccatgtggcaggcggcgttccacgatctcctaggccagggcatcttcaactccgacggcgagacgtggctgctccagcgcaagacggcggcgctcgagttcaccacgaggaccttgcgccaggcgatggcgcgctgggccaaccgcatcatcaagtaccgcctgtggagtatcctcgcagaacactgcgaggccgcggcgagcgtcgacctccaggacctgctcttgcgcctcaccttcgacaacatctgcggcctcaccttcggcaaggaccccgagacactgtcgccggggttgcaggagaaccccttcgccaacgccttcgactccgccaccgaggcgacgctgcagaggttcctgttccccagcttcctgtggcgcgtcaagaaggcgctcggcgtcggcagcgagcggagcctccgcgagagcctcgcgatcgtggaccagtacatgacggaggccatcgcggcgcgcaaggcgaatccgtcggacgacctgctctccaggttcatgaagaagcgcgacggcagcggcagggcgttccccgaggacgtgctccagtgggtcgcgctcaacttcgtgctcgcgggacgcgacacgtcgtccgtcgcgctcagctggttcttctggatgctcatgctgcggcgcgacgtcgagcgcaaggtggtcctggagatcgcctccgtcctcagggagacgcgtggcgacgacagcgggaggtggaccgaggagccgctggacttcgacgagctggaccgcctcgtgtacctgaaggcggcattggcggagacgctgcggctgtacccttcggtgccgcaggactccaagtacgtggtggaggacgacgtgttgcccgatggcaccgtggtgccggccggctcagcggtcacctactccatctactcggttggacgaatggagagcatctggggaaaagactgctctgagttccggcctgagcggtggctctcggctgacgggacccggttcgagccggccaaggacgcgtaccgcttcgtggcgttcaacggcgggccgcggacgtgcctgggcaaggacctggcgtacttgcagatgaagtccatcgcttccgctgtgctactgcgccactcggtggagctcgtccctggacacaaggtggagcagaagatgtcgctcactctgttcatgaagaacggcctccgagtgcacgtcaagccgcgggacctcgccggctacgtcgtggcaccggaggaagccccgcagctgggagcctttgtgatctcgaccacaactgcagcagctgcataagcctgcatgtgcccgcgcgtattggcactggtttcttcgtgctgaagttcttctgtatgcctctgctgtcaaagtcatatcgttttcgtttctccctcttcattagactgttaggtttgtgggtacctggcgtcatattggttgtacctgtgtagtttttgtgtggatgaatcggtttgtgtacttctgt

SEQ ID NO: 13084 - protein, 555 aa, Zea mays subsp. mays
  peptide (1)..(555): Ceres Seq. ID no. 12355802
  misc_feature (26)..(533): Homolog of NCBI NO: 15223436 NR Description: cytochrome P450, putative; protein id: [Arabidopsis thaliana] >gi|25282633|pir||G86146 hypothetical
  misc_feature (26)..(533): Homolog of NCBI NO: 26449891 NR Description: unknown protein [Arabidopsis thaliana]
  misc_feature (24)..(529): Homolog of NCBI NO: 15225914 NR Description: cytochrome P450, putative; protein id: supported by cDNA: gi_17473519 [Arabidopsis thaliana]
  misc_feature (29)..(527): Homolog of NCBI NO: 19698839 NR Description: cytochrome P450 [Arabidopsis thaliana]
  misc_feature (29)..(527): Homolog of NCBI NO: 15237768 NR Description: cytochrome p450 family; protein id: At5g58860.1, by cDNA: gi_19698838 [Arabidopsis thaliana]
  misc_feature (29)..(527): Homolog of NCBI NO: 7430725 NR Description: cytochrome P450 CYP86A1 - Arabidopsis thaliana
  misc_feature (27)..(555): Homolog of NCBI NO: 10442763 NR Description: cytochrome P450 [Triticum aestivum]
  misc_feature (31)..(529): Homolog of NCBI NO: 15236789 NR Description: cytochrome p450, putative; protein id: supported by cDNA: gi_18650606 [Arabidopsis thaliana]
  misc_feature (27)..(555): Homolog of NCBI NO: 38345840 NR Description: OSJNBa0084K11.4 [Oryza sativa (japonica
  misc_feature (31)..(529): Homolog of NCBI NO: 18650607 NR Description: AT4g00360/A_IG005I10_21 [Arabidopsis thaliana]
FTSLKRTGMAIVQDNGVLHLHPYAVAAAAAALISAYMVWFWALTRRLSGPRMWPLVGSLPSVVLNRARVHDWIVDNLRSKGEAATYQTCILPLPFLARRQGLVTVTCNPRNLEHILRARFDNYPKGPMWQAAFHDLLGQGIFNSDGETWLLQRKTAALEFTTRTLRQAMARWANRIIKYRLWSILAEHCEAAASVDLQDLLLRLTFDNICGLTFGKDPETLSPGLQENPFANAFDSATEATLQRFLFPSFLWRVKKALGVGSERSLRESLAIVDQYMTEAIAARKANPSDDLLSRFMKKRDGSGRAFPEDVLQWVALNFVLAGRDTSSVALSWFFWMLMLRRDVERKVVLEIASVLRETRGDDSGRWTEEPLDFDELDRLVYLKAALAETLRLYPSVPQDSKYVVEDDVLPDGTVVPAGSAVTYSIYSVGRMESIWGKDCSEFRPERWLSADGTRFEPAKDAYRFVAFNGGPRTCLGKDLAYLQMKSIASAVLLRHSVELVPGHKVEQKMSLTLFMKNGLRVHVKPRDLAGYVVAPEEAPQLGAFVISTTTAAAA

SEQ ID NO: 13085 - protein, 547 aa, Zea mays subsp. mays
  peptide (1)..(547): Ceres Seq. ID no. 12355803
  misc_feature (21)..(519): Homolog of NCBI NO: 19698839 NR Description: cytochrome P450 [Arabidopsis thaliana]
  misc_feature (21)..(519): Homolog of NCBI NO: 15237768 NR Description: cytochrome p450 family; protein id: At5g58860.1, by cDNA: gi_19698838 [Arabidopsis thaliana]
  misc_feature (21)..(519): Homolog of NCBI NO: 7430725 NR Description: cytochrome P450 CYP86A1 - Arabidopsis thaliana
  misc_feature (19)..(547): Homolog of NCBI NO: 10442763 NR Description: cytochrome P450 [Triticum aestivum]
  misc_feature (23)..(521): Homolog of NCBI NO: 15236789 NR Description: cytochrome p450, putative; protein id: supported by cDNA: gi_18650606 [Arabidopsis thaliana]
  misc_feature (19)..(547): Homolog of NCBI NO: 38345840 NR Description: OSJNBa0084K11.4 [Oryza sativa (japonica
  misc_feature (23)..(521): Homolog of NCBI NO: 18650607 NR Description: AT4g00360/A_IG005I10_21 [Arabidopsis thaliana]
  misc_feature (18)..(525): Homolog of NCBI NO: 15223436 NR Description: cytochrome P450, putative; protein id: [Arabidopsis thaliana] >gi|25282633|pir||G86146 hypothetical
  misc_feature (18)..(525): Homolog of NCBI NO: 26449891 NR Description: unknown protein [Arabidopsis thaliana]
  misc_feature (16)..(521): Homolog of NCBI NO: 15225914 NR Description: cytochrome P450, putative; protein id: supported by cDNA: gi_17473519 [Arabidopsis thaliana]
MAIVQDNGVLHLHPYAVAAAAAALISAYMVWFWALTRRLSGPRMWPLVGSLPSVVLNRARVHDWIVDNLRSKGEAATYQTCILPLPFLARRQGLVTVTCNPRNLEHILRARFDNYPKGPMWQAAFHDLLGQGIFNSDGETWLLQRKTAALEFTTRTLRQAMARWANRIIKYRLWSILAEHCEAAASVDLQDLLLRLTFDNICGLTFGKDPETLSPGLQENPFANAFDSATEATLQRFLFPSFLWRVKKALGVGSERSLRESLAIVDQYMTEAIAARKANPSDDLLSRFMKKRDGSGRAFPEDVLQWVALNFVLAGRDTSSVALSWFFWMLMLRRDVERKVVLEIASVLRETRGDDSGRWTEEPLDFDELDRLVYLKAALAETLRLYPSVPQDSKYVVEDDVLPDGTVVPAGSAVTYSIYSVGRMESIWGKDCSEFRPERWLSADGTRFEPAKDAYRFVAFNGGPRTCLGKDLAYLQMKSIASAVLLRHSVELVPGHKVEQKMSLTLFMKNGLRVHVKPRDLAGYVVAPEEAPQLGAFVISTTTAAAA

SEQ ID NO: 13086 - protein, 519 aa, Zea mays subsp. mays
  peptide (1)..(519): Ceres Seq. ID no. 12355804
  misc_feature (1)..(491): Homolog of NCBI NO: 19698839 NR Description: cytochrome P450 [Arabidopsis thaliana]
  misc_feature (1)..(491): Homolog of NCBI NO: 15237768 NR Description: cytochrome p450 family; protein id: At5g58860.1, by cDNA: gi_19698838 [Arabidopsis thaliana]
  misc_feature (1)..(491): Homolog of NCBI NO: 7430725 NR Description: cytochrome P450 CYP86A1 - Arabidopsis thaliana
  misc_feature (1)..(519): Homolog of NCBI NO: 10442763 NR Description: cytochrome P450 [Triticum aestivum]
  misc_feature (1)..(493): Homolog of NCBI NO: 15236789 NR Description: cytochrome p450, putative; protein id: supported by cDNA: gi_18650606 [Arabidopsis thaliana]
  misc_feature (1)..(519): Homolog of NCBI NO: 38345840 NR Description: OSJNBa0084K11.4 [Oryza sativa (japonica
  misc_feature (1)..(493): Homolog of NCBI NO: 18650607 NR Description: AT4g00360/A_IG005I10_21 [Arabidopsis thaliana]
  misc_feature (1)..(497): Homolog of NCBI NO: 15223436 NR Description: cytochrome P450, putative; protein id: [Arabidopsis thaliana] >gi|25282633|pir||G86146 hypothetical
  misc_feature (1)..(497): Homolog of NCBI NO: 26449891 NR Description: unknown protein [Arabidopsis thaliana]
  misc_feature (1)..(493): Homolog of NCBI NO: 15225914 NR Description: cytochrome P450, putative; protein id: supported by cDNA: gi_17473519 [Arabidopsis thaliana]
MVWFWALTRRLSGPRMWPLVGSLPSVVLNRARVHDWIVDNLRSKGEAATYQTCILPLPFLARRQGLVTVTCNPRNLEHILRARFDNYPKGPMWQAAFHDLLGQGIFNSDGETWLLQRKTAALEFTTRTLRQAMARWANRIIKYRLWSILAEHCEAAASVDLQDLLLRLTFDNICGLTFGKDPETLSPGLQENPFANAFDSATEATLQRFLFPSFLWRVKKALGVGSERSLRESLAIVDQYMTEAIAARKANPSDDLLSRFMKKRDGSGRAFPEDVLQWVALNFVLAGRDTSSVALSWFFWMLMLRRDVERKVVLEIASVLRETRGDDSGRWTEEPLDFDELDRLVYLKAALAETLRLYPSVPQDSKYVVEDDVLPDGTVVPAGSAVTYSIYSVGRMESIWGKDCSEFRPERWLSADGTRFEPAKDAYRFVAFNGGPRTCLGKDLAYLQMKSIASAVLLRHSVELVPGHKVEQKMSLTLFMKNGLRVHVKPRDLAGYVVAPEEAPQLGAFVISTTTAAAA

SEQ ID NO: 13087 - DNA, 1671 bp, Zea mays subsp. mays
  misc_feature (1)..(1671): Ceres Seq. ID no. 12405914
  misc_feature: MA Experiment ID: 20000492 Result: Down-regulated in Transcription
  misc_feature: MA Experiment 20000492 PARAMETER Experiment Name: Zm_Hybrid_Seed_Dev_P Parameter: DAP Value: 12
  misc_feature: MA Experiment 20000492 PARAMETER Experiment Name: Zm_Hybrid_Seed_Dev_P Parameter: Organism Value: Zea mays
  misc_feature: MA Experiment 20000492 PARAMETER Experiment Name: Zm_Hybrid_Seed_Dev_P Parameter: Plant Line Value: 35A19
  misc_feature: MA Experiment 20000492 PARAMETER Experiment Name: Zm_Hybrid_Seed_Dev_P Parameter: Tissue Value: Fert Kernel vs. Unfert Floret
  misc_feature: MA Experiment ID: 20000535 Result: Down-regulated in Transcription
  misc_feature: MA Experiment 20000535 PARAMETER Experiment Name: Zm_Hybrid_Seed_Dev_P Parameter: DAP Value: 30 vs. 12
  misc_feature: MA Experiment 20000535 PARAMETER Experiment Name: Zm_Hybrid_Seed_Dev_P Parameter: Organism Value: Zea mays
  misc_feature: MA Experiment 20000535 PARAMETER Experiment Name: Zm_Hybrid_Seed_Dev_P Parameter: Plant Line Value: 35A19
  misc_feature: MA Experiment 20000535 PARAMETER Experiment Name: Zm_Hybrid_Seed_Dev_P Parameter: Tissue Value: Embryo vs. Unfert Floret
  misc_feature: MA Experiment ID: 20000626 Result: Up-regulated in Transcription
  misc_feature: MA Experiment 20000626 PARAMETER Experiment Name: Zm_Herbicide-Treatments_P Parameter: Timepoint (hr) Value: 12
  misc_feature: MA Experiment 20000626 PARAMETER Experiment Name: Zm_Herbicide-Treatments_P Parameter: Tissue Value: Aerial
  misc_feature: MA Experiment 20000626 PARAMETER Experiment Name: Zm_Herbicide-Treatments_P Parameter: Treatment Value: Roundup vs. No Treatment
gtttccacattttgttgcgctcctttagcgccggcggcccgtagcctcatcatcatttccattccatccggtttcttccgacgacggtgtgtacagagagcaggatcggacaagtctctgctggtagaagcatggcgcagcgccggctgttgggcacggcgccggcgcccgcgggcgatgcggcgtcgcacggctcgggctccagccccgacgcgatgcggatcatggtgggcgtgctggtaacggtcatcgtctgcacgctgctctactgcgtctactgctggcggtggcggaagcgcaatggtgaaactgcgctctgctgccatccgagatccctgctggacagcctatggcggcggtcgagctcggacctgccgctcatggacctcgcctccatcctcgctgccaccgacaacttctccaaggccaacaagctcggcgagggcggcttcggccccgtctacagaggcgtgctgagcggcggctccgagatcgccgtgaagcgtctgtcggcgcggtcgcggcagggcgcggcggagttccggaacgaggtggagctcatcgccaagctgcagcaccgcaacctagtgcggctgctgggctggtgcgccgagcgcgaggagaagctgctggtgtacgagtacctccccaaccgcagcctcgacgccttcctcttcgatccgagcaagagtgcgcagcttgggtggagcacccggcacaacgtgatcctgggcatcgcccgcggcctgctgtacctccacgaggactcgctgctgaaggtggtccaccgggacctcaaggccagcaacgtgctgctcgaccacaagatgagcccaaagatctccgacttcggcatggccaagatcttcgaggacgactccgacgcgatcaacacgggccgcgtcgtcgggacctacgggtacatggcgcccgagttcgcgttggacggcgtcttctcggtgaagtcggacgtgttcagcttcggggtcctcctgctggagatcttgagcgggcaacggaacggcgctttgtacctcgaggaacaccagcagtccctcatccaagacgcatggaagctgtggagtgaagaccgcgcggccgagttcatggaccagtcgctggggcggtcctactccaaggacgaggcgtggcggtgctaccacgtcggcctgctctgcgtgcaggaggaccccgacgtccgccccaccatgtccaacgtcctgctcatgctcatcagcgaccacaccaagttacccgagccagccatgccgcccttgttcgcgcggctcaggaacatctccttgctggcgccgccactcactaccaaaaccgagtccaccacgtctccgctgtcgatcaacgacgtctccatcaccatgatcgaaccgcgatgagctcatgcgttttctacttctgacaactgagggagaggcttcgagtgtaaatttataagactgcaatcgttcagaatgactactcctatgtactagtaagtttttttttatgctgtgcacaagtgtgggatttaactactagactagaacatgcggcgcccgtaatcgggtcataacagatttttttttatgtttatgcattctcctatgtgatccaatggactaaaatgtgtcaccactgctagcaaagaccatataactattttaattagtttgt

SEQ ID NO: 13088 - protein, 420 aa, Zea mays subsp. mays
  peptide (1)..(420): Ceres Seq. ID no. 12405915
  misc_feature (22)..(420): Homolog of NCBI NO: 24417476 NR Description: unknown [Arabidopsis thaliana]
  misc_feature (22)..(420): Homolog of NCBI NO: 30686087 NR Description: serine/threonine kinase -related protein
  misc_feature (80)..(420): Homolog of NCBI NO: 836954 NR Description: receptor protein kinase [Ipomoea trifida]
  misc_feature (31)..(420): Homolog of NCBI NO: 13506745 NR Description: receptor-like protein kinase 4 [Arabidopsis
  misc_feature (77)..(420): Homolog of NCBI NO: 7488195 NR Description: probable serine/threonine-specific protein kinase
  misc_feature (30)..(420): Homolog of NCBI NO: 38344785 NR Description: OSJNBa0043L09.5 [Oryza sativa (japonica
  misc_feature (7)..(420): Homolog of NCBI NO: 30686073 NR Description: serine/threonine kinase - like protein thaliana] >gi|22136670|gb|AAM91654.1| putative serine/threonine
  misc_feature (23)..(420): Homolog of NCBI NO: 7488193 NR Description: probable serine/threonine-specific protein kinase
  misc_feature (23)..(420): Homolog of NCBI NO: 18416076 NR Description: serine threonine kinase - like protein; protein At4g23140.1, supported by cDNA: gi_13506746 [Arabidopsis
  misc_feature (1)..(420): Homolog of NCBI NO: 33146545 NR Description: putative receptor-like protein kinase 4 [Oryza
MAQRRLLGTAPAPAGDAASHGSGSSPDAMRIMVGVLVTVIVCTLLYCVYCWRWRKRNGETALCCHPRSLLDSLWRRSSSDLPLMDLASILAATDNFSKANKLGEGGFGPVYRGVLSGGSEIAVKRLSARSRQGAAEFRNEVELIAKLQHRNLVRLLGWCAEREEKLLVYEYLPNRSLDAFLFDPSKSAQLGWSTRHNVILGIARGLLYLHEDSLLKVVHRDLKASNVLLDHKMSPKISDFGMAKIFEDDSDAINTGRVVGTYGYMAPEFALDGVFSVKSDVFSFGVLLLEILSGQRNGALYLEEHQQSLIQDAWKLWSEDRAAEFMDQSLGRSYSKDEAWRCYHVGLLCVQEDPDVRPTMSNVLLMLISDHTKLPEPAMPPLFARLRNISLLAPPLTTKTESTTSPLSINDVSITMIEPR

SEQ ID NO: 13089 - protein, 392 aa, Zea mays subsp. mays
  peptide (1)..(392): Ceres Seq. ID no. 12405916
  misc_feature (1)..(392): Homolog of NCBI NO: 24417476 NR Description: unknown [Arabidopsis thaliana]
  misc_feature (1)..(392): Homolog of NCBI NO: 30686087 NR Description: serine/threonine kinase -related protein
  misc_feature (52)..(392): Homolog of NCBI NO: 836954 NR Description: receptor protein kinase [Ipomoea trifida]
  misc_feature (3)..(392): Homolog of NCBI NO: 13506745 NR Description: receptor-like protein kinase 4 [Arabidopsis
  misc_feature (49)..(392): Homolog of NCBI NO: 7488195 NR Description: probable serine/threonine-specific protein kinase
  misc_feature (2)..(392): Homolog of NCBI NO: 38344785 NR Description: OSJNBa0043L09.5 [Oryza sativa (japonica
  misc_feature (1)..(392): Homolog of NCBI NO: 30686073 NR Description: serine/threonine kinase - like protein thaliana] >gi|22136670|gb|AAM91654.1| putative serine/threonine
  misc_feature (1)..(392): Homolog of NCBI NO: 7488193 NR Description: probable serine/threonine-specific protein kinase
  misc_feature (1)..(392): Homolog of NCBI NO: 18416076 NR Description: serine threonine kinase - like protein; protein At4g23140.1, supported by cDNA: gi_13506746 [Arabidopsis
  misc_feature (1)..(392): Homolog of NCBI NO: 33146545 NR Description: putative receptor-like protein kinase 4 [Oryza
MRIMVGVLVTVIVCTLLYCVYCWRWRKRNGETALCCHPRSLLDSLWRRSSSDLPLMDLASILAATDNFSKANKLGEGGFGPVYRGVLSGGSEIAVKRLSARSRQGAAEFRNEVELIAKLQHRNLVRLLGWCAEREEKLLVYEYLPNRSLDAFLFDPSKSAQLGWSTRHNVILGIARGLLYLHEDSLLKVVHRDLKASNVLLDHKMSPKISDFGMAKIFEDDSDAINTGRVVGTYGYMAPEFALDGVFSVKSDVFSFGVLLLEILSGQRNGALYLEEHQQSLIQDAWKLWSEDRAAEFMDQSLGRSYSKDEAWRCYHVGLLCVQEDPDVRPTMSNVLLMLISDHTKLPEPAMPPLFARLRNISLLAPPLTTKTESTTSPLSINDVSITMIEPR

SEQ ID NO: 13090 - protein, 389 aa, Zea mays subsp. mays
  peptide (1)..(389): Ceres Seq. ID no. 12405917
  misc_feature (1)..(389): Homolog of NCBI NO: 24417476 NR Description: unknown [Arabidopsis thaliana]
  misc_feature (1)..(389): Homolog of NCBI NO: 30686087 NR Description: serine/threonine kinase -related protein
  misc_feature (49)..(389): Homolog of NCBI NO: 836954 NR Description: receptor protein kinase [Ipomoea trifida]
  misc_feature (1)..(389): Homolog of NCBI NO: 13506745 NR Description: receptor-like protein kinase 4 [Arabidopsis
  misc_feature (46)..(389): Homolog of NCBI NO: 7488195 NR Description: probable serine/threonine-specific protein kinase
  misc_feature (1)..(389): Homolog of NCBI NO: 38344785 NR Description: OSJNBa0043L09.5 [Oryza sativa (japonica
  misc_feature (1)..(389): Homolog of NCBI NO: 30686073 NR Description: serine/threonine kinase - like protein thaliana] >gi|22136670|gb|AAM91654.1| putative serine/threonine
  misc_feature (1)..(389): Homolog of NCBI NO: 7488193 NR Description: probable serine/threonine-specific protein kinase
  misc_feature (1)..(389): Homolog of NCBI NO: 18416076 NR Description: serine threonine kinase - like protein; protein At4g23140.1, supported by cDNA: gi_13506746 [Arabidopsis
  misc_feature (1)..(389): Homolog of NCBI NO: 33146545 NR Description: putative receptor-like protein kinase 4 [Oryza
MVGVLVTVIVCTLLYCVYCWRWRKRNGETALCCHPRSLLDSLWRRSSSDLPLMDLASILAATDNFSKANKLGEGGFGPVYRGVLSGGSEIAVKRLSARSRQGAAEFRNEVELIAKLQHRNLVRLLGWCAEREEKLLVYEYLPNRSLDAFLFDPSKSAQLGWSTRHNVILGIARGLLYLHEDSLLKVVHRDLKASNVLLDHKMSPKISDFGMAKIFEDDSDAINTGRVVGTYGYMAPEFALDGVFSVKSDVFSFGVLLLEILSGQRNGALYLEEHQQSLIQDAWKLWSEDRAAEFMDQSLGRSYSKDEAWRCYHVGLLCVQEDPDVRPTMSNVLLMLISDHTKLPEPAMPPLFARLRNISLLAPPLTTKTESTTSPLSINDVSITMIEPR

SEQ ID NO: 13091 - DNA, 1635 bp, Zea mays subsp. mays
  misc_feature (1)..(1635): Ceres Seq. ID no. 13493312
  misc_feature: MA Experiment ID: 108556 Result: Up-regulated in Transcription
  misc_feature: MA Experiment 108556 PARAMETER Experiment Name: Zm_Drought_P Parameter: Age (day) Value: 9
  misc_feature: MA Experiment 108556 PARAMETER Experiment Name: Zm_Drought_P Parameter: Organism Value: Zea mays
  misc_feature: MA Experiment 108556 PARAMETER Experiment Name: Zm_Drought_P Parameter: Plant Line Value: 35A19
  misc_feature: MA Experiment 108556 PARAMETER Experiment Name: Zm_Drought_P Parameter: Timepoint (hr) Value: 24
  misc_feature: MA Experiment 108556 PARAMETER Experiment Name: Zm_Drought_P Parameter: Tissue Value: Aerial
  misc_feature: MA Experiment 108556 PARAMETER Experiment Name: Zm_Drought_P Parameter: Treatment Value: Drought vs. No Drought
  misc_feature: MA Experiment ID: 108687 Result: Down-regulated in Transcription
  misc_feature: MA Experiment 108687 PARAMETER Experiment Name: Zm_Embryos-Flowers__P Parameter: Tissue Value: Embryo vs. Aerial+
  misc_feature: MA Experiment ID: 20000478 Result: Up-regulated in Transcription
  misc_feature: MA Experiment 20000478 PARAMETER Experiment Name: Zm_5mM_SA_P Parameter: Age (day) Value: 11
  misc_feature: MA Experiment 20000478 PARAMETER Experiment Name: Zm_5mM_SA_P Parameter: Organism Value: Zea mays
  misc_feature: MA Experiment 20000478 PARAMETER Experiment Name: Zm_5mM_SA_P Parameter: Plant Line Value: 35A19
  misc_feature: MA Experiment 20000478 PARAMETER Experiment Name: Zm_5mM_SA_P Parameter: Timepoint (hr) Value: 72
  misc_feature: MA Experiment 20000478 PARAMETER Experiment Name: Zm_5mM_SA_P Parameter: Tissue Value: Aerial
  misc_feature: MA Experiment 20000478 PARAMETER Experiment Name: Zm_5mM_SA_P Parameter: Treatment Value: 5mM SA vs. No Treatment
  misc_feature: MA Experiment ID: 20000479 Result: Up-regulated in Transcription
  misc_feature: MA Experiment 20000479 PARAMETER Experiment Name: Zm_Drought_P Parameter: Age (day) Value: 10
  misc_feature: MA Experiment 20000479 PARAMETER Experiment Name: Zm_Drought_P Parameter: Organism Value: Zea mays
  misc_feature: MA Experiment 20000479 PARAMETER Experiment Name: Zm_Drought_P Parameter: Plant Line Value: 35A19
  misc_feature: MA Experiment 20000479 PARAMETER Experiment Name: Zm_Drought_P Parameter: Timepoint (hr) Value: 48
  misc_feature: MA Experiment 20000479 PARAMETER Experiment Name: Zm_Drought_P Parameter: Tissue Value: Aerial
  misc_feature: MA Experiment 20000479 PARAMETER Experiment Name: Zm_Drought_P Parameter: Treatment Value: Drought vs. No Drought
  misc_feature: MA Experiment ID: 20000480 Result: Up-regulated in Transcription
  misc_feature: MA Experiment 20000480 PARAMETER Experiment Name: Zm_Drought_P Parameter: Age (day) Value: 11
  misc_feature: MA Experiment 20000480 PARAMETER Experiment Name: Zm_Drought_P Parameter: Organism Value: Zea mays
  misc_feature: MA Experiment 20000480 PARAMETER Experiment Name: Zm_Drought_P Parameter: Plant Line Value: 35A19
  misc_feature: MA Experiment 20000480 PARAMETER Experiment Name: Zm_Drought_P Parameter: Timepoint (hr) Value: 72
  misc_feature: MA Experiment 20000480 PARAMETER Experiment Name: Zm_Drought_P Parameter: Tissue Value: Aerial
  misc_feature: MA Experiment 20000480 PARAMETER Experiment Name: Zm_Drought_P Parameter: Treatment Value: Drought vs. No Drought
actgcagcaatcacagacagacacgagcaagtgtgagtgaggaggtttgcctgcccatctccatcggccatcgctgcctccccagtccccacatccgcacacatttttacccctcgcggcggccccaccgaccgccggggcgcagcggcgtcgccgcgggcaacgccgtcacgtcacgtgcatcacgacaatctcctcctccgcctcgtcttcctgccaggccgcgggagcaccagcccagcggcagatcagtcgaggcgggcgattccagggtttagagaggagcggagatggtgaaggtcatccaggggcgcccggccgagatggggttccggatgccggcggagtgggagccgcacgagcagtgctggatgggatggcctgagcgtccagataactggagggagaatgctggtccagctcaagaggtatttgctnnaactgcaattgccatttcaaagtttgaacccgtcacgttatgtgcaagtgccaagcagtaccccaaagtccacgagctgatggaacatgaaaccaacatcagggtcgttgagatgagcatgaacgattcctggttccgcgacatgggccccacttttgtcactcataaaggggattcaggaattgcagaacaaacaatagcaggaattgattggcaattcaatgcctggggaggaatctatgacgactggagtcttgacagcgatgttgccaagaaaatagtcgagatcgagaggatccctaggtttccccaaaaaaattatccttgagggtggaagcattcatgtagatggagaaggtacatgcattacaacggaagaatgcttgctgaatcctaataggaaccccaacatgaccaaactagagatagagaatgagctgaaggattttcttggagtctcgaaggtcatctggatacctcgtggactttatggtgacgaggatacaaacggccacgttgacaacctgtgctgcttcatcaaacccggtgtgatcctgctgtcgtggaccgacgacgagaaggaccatcagtacgaacggtcggtcgaggcgctgtctgttctctcccagtccgtcgacgcgaaagggcggcagctccaagtggtgaagatccacgtccccgggcctctgtacatgacagaggaataggcacagggcgttgtttcatcggggcattctgtaccgaggccagcgggcacgaggttggccgcctcgtacgtcaacttctacatcgccaatggggggatcatagcgccttccttcggtgacaggtgggacgaggaggcgtatgcggttctccagaaggcgtttcctgatcacgaggtggtgatggtcgaaggcggacgggagatcgcgctgggaggtgggaacattcactgcatcacgcagcagcagcccgtgcgcccgtcctaggtgaaaccggcgtcgacgcgaagcgatgaagagtatgctgctcctgtgtttaagcaggtgggttggtcccctgtcgttattacgctcaccaatacgcgcgcgaaataagccgtaggtacaagttccttgacaaatactgtatgagtactattaggccttgttggtgggtcggaacgattcctaaccgaattgtttatctaatttatataaattttgattagctgg

SEQ ID NO: 13092 - protein, 158 aa, Zea mays subsp. mays
  peptide (1)..(158): Ceres Seq. ID no. 13493313
  misc_feature (14)..(152): Pfam Name: Porphyromonas-type peptidyl-arginine deiminase Pfam Description: Porphyromonas-type peptidyl-arginine deiminase
  misc_feature (5)..(153): Homolog of NCBI NO: 38606518 NR Description: OSJNBa0016O02.3 [Oryza sativa (japonica
  misc_feature (9)..(152): Homolog of NCBI NO: 15241536 NR Description: expressed protein [Arabidopsis thaliana]
  misc_feature (9)..(152): Homolog of NCBI NO: 26452202 NR Description: unknown protein [Arabidopsis thaliana]
  misc_feature (9)..(152): Homolog of NCBI NO: 14289303 NR Description: hypothetical protein [Arabidopsis thaliana]
  misc_feature (9)..(152): Homolog of NCBI NO: 15595489 NR Description: conserved hypothetical protein [Pseudomonas
  misc_feature (5)..(157): Homolog of NCBI NO: 23472721 NR Description: hypothetical protein [Pseudomonas syringae pv.
  misc_feature (5)..(157): Homolog of NCBI NO: 28872501 NR Description: conserved hypothetical protein [Pseudomonas pv. tomato str. DC3000] >gi|28855756|gb|AAO58815.1| conserved
  misc_feature (1)..(157): Homolog of NCBI NO: 23105724 NR Description: hypothetical protein [Azotobacter vinelandii]
  misc_feature (2)..(157): Homolog of NCBI NO: 26987008 NR Description: conserved hypothetical protein [Pseudomonas KT2440] >gi|24981625|gb|AAN65897.1|AE016217_9 conserved
  misc_feature (5)..(157): Homolog of NCBI NO: 23061592 NR Description: hypothetical protein [Pseudomonas fluorescens
  misc_feature (50)..(50): Xaa is any aa, unknown or other
MVKVIQGRPAEMGFRMPAEWEPHEQCWMGWPERPDNWRENAGPAQEVFAXTAIAISKFEPVTLCASAKQYPKVHELMEHETNIRVVEMSMNDSWFRDMGPTFVTHKGDSGIAEQTIAGIDWQFNAWGGIYDDWSLDSDVAKKIVEIERIPRFPQKNYP

SEQ ID NO: 13093 - protein, 147 aa, Zea mays subsp. mays
  peptide (1)..(147): Ceres Seq. ID no. 13493314
  misc_feature (3)..(141): Pfam Name: Porphyromonas-type peptidyl-arginine deiminase Pfam Description: Porphyromonas-type peptidyl-arginine deiminase
  misc_feature (1)..(142): Homolog of NCBI NO: 38606518 NR Description: OSJNBa0016O02.3 [Oryza sativa (japonica
  misc_feature (1)..(141): Homolog of NCBI NO: 15241536 NR Description: expressed protein [Arabidopsis thaliana]
  misc_feature (1)..(141): Homolog of NCBI NO: 26452202 NR Description: unknown protein [Arabidopsis thaliana]
  misc_feature (1)..(141): Homolog of NCBI NO: 14289303 NR Description: hypothetical protein [Arabidopsis thaliana]
  misc_feature (1)..(141): Homolog of NCBI NO: 15595489 NR Description: conserved hypothetical protein [Pseudomonas
  misc_feature (1)..(146): Homolog of NCBI NO: 23472721 NR Description: hypothetical protein [Pseudomonas syringae pv.
  misc_feature (1)..(146): Homolog of NCBI NO: 28872501 NR Description: conserved hypothetical protein [Pseudomonas pv. tomato str. DC3000] >gi|28855756|gb|AAO58815.1| conserved
  misc_feature (1)..(146): Homolog of NCBI NO: 23105724 NR Description: hypothetical protein [Azotobacter vinelandii]
  misc_feature (1)..(146): Homolog of NCBI NO: 26987008 NR Description: conserved hypothetical protein [Pseudomonas KT2440] >gi|24981625|gb|AAN65897.1|AE016217_9 conserved
  misc_feature (1)..(146): Homolog of NCBI NO: 23061592 NR Description: hypothetical protein [Pseudomonas fluorescens
  misc_feature (39)..(39): Xaa is any aa, unknown or other
MGFRMPAEWEPHEQCWMGWPERPDNWRENAGPAQEVFAXTAIAISKFEPVTLCASAKQYPKVHELMEHETNIRVVEMSMNDSWFRDMGPTFVTHKGDSGIAEQTIAGIDWQFNAWGGIYDDWSLDSDVAKKIVEIERIPRFPQKNYP

SEQ ID NO: 13094 - protein, 143 aa, Zea mays subsp. mays
  peptide (1)..(143): Ceres Seq. ID no. 13493315
  misc_feature (1)..(137): Pfam Name: Porphyromonas-type peptidyl-arginine deiminase Pfam Description: Porphyromonas-type peptidyl-arginine deiminase
  misc_feature (1)..(138): Homolog of NCBI NO: 38606518 NR Description: OSJNBa0016O02.3 [Oryza sativa (japonica
  misc_feature (1)..(137): Homolog of NCBI NO: 15241536 NR Description: expressed protein [Arabidopsis thaliana]
  misc_feature (1)..(137): Homolog of NCBI NO: 26452202 NR Description: unknown protein [Arabidopsis thaliana]
  misc_feature (1)..(137): Homolog of NCBI NO: 14289303 NR Description: hypothetical protein [Arabidopsis thaliana]
  misc_feature (1)..(137): Homolog of NCBI NO: 15595489 NR Description: conserved hypothetical protein [Pseudomonas
  misc_feature (1)..(142): Homolog of NCBI NO: 23472721 NR Description: hypothetical protein [Pseudomonas syringae pv.
  misc_feature (1)..(142): Homolog of NCBI NO: 28872501 NR Description: conserved hypothetical protein [Pseudomonas pv. tomato str. DC3000] >gi|28855756|gb|AAO58815.1| conserved
  misc_feature (1)..(142): Homolog of NCBI NO: 23105724 NR Description: hypothetical protein [Azotobacter vinelandii]
  misc_feature (1)..(142): Homolog of NCBI NO: 26987008 NR Description: conserved hypothetical protein [Pseudomonas KT2440] >gi|24981625|gb|AAN65897.1|AE016217_9 conserved
  misc_feature (1)..(142): Homolog of NCBI NO: 23061592 NR Description: hypothetical protein [Pseudomonas fluorescens
  misc_feature (35)..(35): Xaa is any aa, unknown or other
MPAEWEPHEQCWMGWPERPDNWRENAGPAQEVFAXTAIAISKFEPVTLCASAKQYPKVHELMEHETNIRVVEMSMNDSWFRDMGPTFVTHKGDSGIAEQTIAGIDWQFNAWGGIYDDWSLDSDVAKKIVEIERIPRFPQKNYP

SEQ ID NO: 13095 - DNA, 1323 bp, Zea mays subsp. mays
  misc_feature (1)..(1323): Ceres Seq. ID no. 12344625
  misc_feature: MA Experiment ID: 108543 Result: Down-regulated in Transcription
  misc_feature: MA Experiment ID: 20000492 Result: Up-regulated in Transcription
  misc_feature: MA Experiment 20000492 PARAMETER Experiment Name: Zm_Hybrid_Seed_Dev_P Parameter: DAP Value: 12
  misc_feature: MA Experiment 20000492 PARAMETER Experiment Name: Zm_Hybrid_Seed_Dev_P Parameter: Organism Value: Zea mays
  misc_feature: MA Experiment 20000492 PARAMETER Experiment Name: Zm_Hybrid_Seed_Dev_P Parameter: Plant Line Value: 35A19
  misc_feature: MA Experiment 20000492 PARAMETER Experiment Name: Zm_Hybrid_Seed_Dev_P Parameter: Tissue Value: Fert Kernel vs. Unfert Floret
gcatcggtccaccgagccacaccacaccaccgtctcgcggagaaactcctccaaaacccccaaaccctttcaatcggcggcaatggcggcgccggtggccgacgatgcctcggcatccccaggctacgtcctccgctccacacttgaggggcaccgccgcgccgtatcaacagttaagttctccccggatggccgccttctcgcctccgcctccgccgacaagcttcttcgcgtgtggtcttcctccgatctcacccccgttgcggagctcgagggccatggagagggtgtctcagacctctctttctcccccgacggccgcctccttgcctccgcctccgatgatcgcaccgtccgcatctgggacctcgccgtcggcggaggggcccgcctcgtcaagacgctcacgggccacaccaactacgccttctgcgtctccttcagcccccatggcaacgtcctcgcctccgggtcctttgacgagacggtgcgcgtgtgggaggtcaggtccggtaagtgcctccgcgtgctgccggcccattctgaacccgtcaccgccgtggacttcgatcgcgagggcgacatgattgtgtcagggagctacgacgggctctgccgcgtctgggactcggccaccggtcactgcgtcaaaaccctcatcgacgacgagagcccaccagtgtcctttgccaagttctcccccaatggcaagtttatcctcgcggcaacgcttgacagcaccttgaggctttggaatttctcagctggaaagtttctgaagacatataccggacatgttaacacaaagtactgcatcccagcggcgttttctatcacgaatagcaagtatattgtcagtggctccgaggacaaatgtgtctacctatgggacctccagtcaagaagaatagtgcagaaactggaaggccatactgatactgtcattgcggtctcatgtcatcccaaggaaaacatgatcgcatccggggcgcttgacaatgacaagaccgtgaaagtttgggtccaaaaggaagaagattgatgagcggcctggttacgctcttatctacattggctgtcatgtggactgactaatggtaagcaaaatatgcagcttcccaagcaactaaagtttgctgcagtggagaatgtgatgctcctggcatgtgtaactgagtgagtgctatattgtctattcagcagctcggcgatgatattagtgaactcaagtgttctgtagagctattcctgggaggctgggatcatgtaagaaagactcaacacaacaatgcttgaacttcatttgttgtgtttctgattccc

SEQ ID NO: 13096 - protein, 346 aa, Zea mays subsp. mays
  peptide (1)..(346): Ceres Seq. ID no. 12344626
  misc_feature (28)..(345): Homolog of NCBI NO: 15229187 NR Description: G-protein beta-subunit (transducin) family;
  misc_feature (4)..(340): Homolog of NCBI NO: 17864654 NR Description: will die slowly CG17437-PA Will die slowly protein >gi|6946677|emb|CAB72292.1| version:''084'',
  misc_feature (20)..(340): Homolog of NCBI NO: 31196347 NR Description: ENSANGP00000012135 [Anopheles gambiae] ENSANGP00000011204 [Anopheles gambiae] ENSANGP00000012135 [Anopheles gambiae str. PEST]
  misc_feature (10)..(340): Homolog of NCBI NO: 30353827 NR Description: Unknown (protein for MGC:56591) [Danio rerio]
  misc_feature (20)..(340): Homolog of NCBI NO: 6714707 NR Description: hypothetical protein [Homo sapiens]
  misc_feature (20)..(340): Homolog of NCBI NO: 16554627 NR Description: WD repeat domain 5 protein; WD-repeat protein 5
  misc_feature (20)..(340): Homolog of NCBI NO: 34853150 NR Description: similar to hypothetical protein [Rattus
  misc_feature (40)..(340): Homolog of NCBI NO: 20302740 NR Description: unknown [Branchiostoma floridae]
  misc_feature (17)..(341): Homolog of NCBI NO: 23199987 NR Description: WD repeat domain 5B [Homo sapiens]
  misc_feature (17)..(341): Homolog of NCBI NO: 7023854 NR Description: unnamed protein product [Homo sapiens]
HRSTEPHHTTVSRRNSSKTPKPFQSAAMAAPVADDASASPGYVLRSTLEGHRRAVSTVKFSPDGRLLASASADKLLRVWSSSDLTPVAELEGHGEGVSDLSFSPDGRLLASASDDRTVRIWDLAVGGGARLVKTLTGHTNYAFCVSFSPHGNVLASGSFDETVRVWEVRSGKCLRVLPAHSEPVTAVDFDREGDMIVSGSYDGLCRVWDSATGHCVKTLIDDESPPVSFAKFSPNGKFILAATLDSTLRLWNFSAGKFLKTYTGHVNTKYCIPAAFSITNSKYIVSGSEDKCVYLWDLQSRRIVQKLEGHTDTVIAVSCHPKENMIASGALDNDKTVKVWVQKEED

SEQ ID NO: 13097 - protein, 319 aa, Zea mays subsp. mays
  peptide (1)..(319): Ceres Seq. ID no. 12344627
  misc_feature (1)..(318): Homolog of NCBI NO: 15229187 NR Description: G-protein beta-subunit (transducin) family;
  misc_feature (1)..(313): Homolog of NCBI NO: 17864654 NR Description: will die slowly CG17437-PA Will die slowly protein >gi|6946677|emb|CAB72292.1| version:''084'',
  misc_feature (1)..(313): Homolog of NCBI NO: 31196347 NR Description: ENSANGP00000012135 [Anopheles gambiae] ENSANGP00000011204 [Anopheles gambiae] ENSANGP00000012135 [Anopheles gambiae str. PEST]
  misc_feature (1)..(313): Homolog of NCBI NO: 30353827 NR Description: Unknown (protein for MGC:56591) [Danio rerio]
  misc_feature (1)..(313): Homolog of NCBI NO: 6714707 NR Description: hypothetical protein [Homo sapiens]
  misc_feature (1)..(313): Homolog of NCBI NO: 16554627 NR Description: WD repeat domain 5 protein; WD-repeat protein 5
  misc_feature (1)..(313): Homolog of NCBI NO: 34853150 NR Description: similar to hypothetical protein [Rattus
  misc_feature (13)..(313): Homolog of NCBI NO: 20302740 NR Description: unknown [Branchiostoma floridae]
  misc_feature (1)..(314): Homolog of NCBI NO: 23199987 NR Description: WD repeat domain 5B [Homo sapiens]
  misc_feature (1)..(314): Homolog of NCBI NO: 7023854 NR Description: unnamed protein product [Homo sapiens]
MAAPVADDASASPGYVLRSTLEGHRRAVSTVKFSPDGRLLASASADKLLRVWSSSDLTPVAELEGHGEGVSDLSFSPDGRLLASASDDRTVRIWDLAVGGGARLVKTLTGHTNYAFCVSFSPHGNVLASGSFDETVRVWEVRSGKCLRVLPAHSEPVTAVDFDREGDMIVSGSYDGLCRVWDSATGHCVKTLIDDESPPVSFAKFSPNGKFILAATLDSTLRLWNFSAGKFLKTYTGHVNTKYCIPAAFSITNSKYIVSGSEDKCVYLWDLQSRRIVQKLEGHTDTVIAVSCHPKENMIASGALDNDKTVKVWVQKEED

SEQ ID NO: 13098 - protein, 194 aa, Zea mays subsp. mays
  peptide (1)..(194): Ceres Seq. ID no. 12344628
  misc_feature (4)..(194): Pfam Name: Formin Homology 2 Domain Pfam Description: Formin Homology 2 Domain
IGPPSHTTPPSRGETPPKPPNPFNRRQWRRRWPTMPRHPQATSSAPHLRGTAAPYQQLSSPRMAAFSPPPPPTSFFACGLPPISPPLRSSRAMERVSQTSLSPPTAASLPPPPMIAPSASGTSPSAEGPASSRRSRATPTTPSASPSAPMATSSPPGPLTRRCACGRSGPVSASACCRPILNPSPPWTSIARAT

SEQ ID NO: 13099 - DNA, 1485 bp, Zea mays subsp. mays
  misc_feature (1)..(1485): Ceres Seq. ID no. 12364144
  misc_feature: MA Experiment ID: 108523 Result: Down-regulated in Transcription
  misc_feature: MA Experiment 108523 PARAMETER Experiment Name: Zm_42deg_Heat_P Parameter: Age (day) Value: 8
  misc_feature: MA Experiment 108523 PARAMETER Experiment Name: Zm_42deg_Heat_P Parameter: Organism Value: Zea mays
  misc_feature: MA Experiment 108523 PARAMETER Experiment Name: Zm_42deg_Heat_P Parameter: Plant Line Value: 35A19
  misc_feature: MA Experiment 108523 PARAMETER Experiment Name: Zm_42deg_Heat_P Parameter: Temperature (deg C) Value: 42 vs. 22
  misc_feature: MA Experiment 108523 PARAMETER Experiment Name: Zm_42deg_Heat_P Parameter: Timepoint (hr) Value: 6
  misc_feature: MA Experiment 108523 PARAMETER Experiment Name: Zm_42deg_Heat_P Parameter: Tissue Value: Aerial
  misc_feature: MA Experiment ID: 108527 Result: Down-regulated in Transcription
  misc_feature: MA Experiment 108527 PARAMETER Experiment Name: Zm_5mM_NO_P Parameter: Age (day) Value: 8
  misc_feature: MA Experiment 108527 PARAMETER Experiment Name: Zm_5mM_NO_P Parameter: Organism Value: Zea mays
  misc_feature: MA Experiment 108527 PARAMETER Experiment Name: Zm_5mM_NO_P Parameter: Plant Line Value: 35A19
  misc_feature: MA Experiment 108527 PARAMETER Experiment Name: Zm_5mM_NO_P Parameter: Timepoint (hr) Value: 6
  misc_feature: MA Experiment 108527 PARAMETER Experiment Name: Zm_5mM_NO_P Parameter: Tissue Value: Aerial
  misc_feature: MA Experiment 108527 PARAMETER Experiment Name: Zm_5mM_NO_P Parameter: Treatment Value: 5mM NO vs. No Treatment
  misc_feature: MA Experiment ID: 108528 Result: Up-regulated in Transcription
  misc_feature: MA Experiment 108528 PARAMETER Experiment Name: Zm_Imbibed_Seeds_P Parameter: Age (day) Value: 5 vs. 2
  misc_feature: MA Experiment 108528 PARAMETER Experiment Name: Zm_Imbibed_Seeds_P Parameter: Organism Value: Zea mays
  misc_feature: MA Experiment 108528 PARAMETER Experiment Name: Zm_Imbibed_Seeds_P Parameter: Plant Line Value: 35A19
  misc_feature: MA Experiment 108528 PARAMETER Experiment Name: Zm_Imbibed_Seeds_P Parameter: Tissue Value: Aerial vs. Embryo
  misc_feature: MA Experiment ID: 108529 Result: Up-regulated in Transcription
  misc_feature: MA Experiment 108529 PARAMETER Experiment Name: Zm_Imbibed_Seeds_P Parameter: Age (day) Value: 5 vs. 2
  misc_feature: MA Experiment 108529 PARAMETER Experiment Name: Zm_Imbibed_Seeds_P Parameter: Organism Value: Zea mays
  misc_feature: MA Experiment 108529 PARAMETER Experiment Name: Zm_Imbibed_Seeds_P Parameter: Plant Line Value: 35A19
  misc_feature: MA Experiment 108529 PARAMETER Experiment Name: Zm_Imbibed_Seeds_P Parameter: Tissue Value: Roots vs. Embryo
  misc_feature: MA Experiment ID: 108530 Result: Up-regulated in Transcription
  misc_feature: MA Experiment 108530 PARAMETER Experiment Name: Zm_Imbibed_Seeds_P Parameter: Age (day) Value: 6 vs. 2
  misc_feature: MA Experiment 108530 PARAMETER Experiment Name: Zm_Imbibed_Seeds_P Parameter: Organism Value: Zea mays
  misc_feature: MA Experiment 108530 PARAMETER Experiment Name: Zm_Imbibed_Seeds_P Parameter: Plant Line Value: 35A19
  misc_feature: MA Experiment 108530 PARAMETER Experiment Name: Zm_Imbibed_Seeds_P Parameter: Tissue Value: Aerial vs. Embryo
  misc_feature: MA Experiment ID: 108534 Result: Down-regulated in Transcription
  misc_feature: MA Experiment 108534 PARAMETER Experiment Name: Zm_4deg_Cold_P Parameter: Age (hr) Value: 8
  misc_feature: MA Experiment 108534 PARAMETER Experiment Name: Zm_4deg_Cold_P Parameter: Organism Value: Zea mays
  misc_feature: MA Experiment 108534 PARAMETER Experiment Name: Zm_4deg_Cold_P Parameter: Plant Line Value: 35A19
  misc_feature: MA Experiment 108534 PARAMETER Experiment Name: Zm_4deg_Cold_P Parameter: Temperature (deg C) Value: 4 vs. 22
  misc_feature: MA Experiment 108534 PARAMETER Experiment Name: Zm_4deg_Cold_P Parameter: Timepoint (hr) Value: 6
  misc_feature: MA Experiment 108534 PARAMETER Experiment Name: Zm_4deg_Cold_P Parameter: Tissue Value: Aerial
  misc_feature: MA Experiment ID: 108535 Result: Down-regulated in Transcription
  misc_feature: MA Experiment 108535 PARAMETER Experiment Name: Zm_Meristem_P Parameter: Age (day) Value: 8
  misc_feature: MA Experiment 108535 PARAMETER Experiment Name: Zm_Meristem_P Parameter: Organism Value: Zea mays
  misc_feature: MA Experiment 108535 PARAMETER Experiment Name: Zm_Meristem_P Parameter: Plant Line Value: 35A19
  misc_feature: MA Experiment 108535 PARAMETER Experiment Name: Zm_Meristem_P Parameter: Tissue Value: Root Meristem vs. Above Root Meristem
  misc_feature: MA Experiment ID: 108536 Result: Up-regulated in Transcription
  misc_feature: MA Experiment 108536 PARAMETER Experiment Name: Zm_Meristem_P Parameter: Age (day) Value: 8
  misc_feature: MA Experiment 108536 PARAMETER Experiment Name: Zm_Meristem_P Parameter: Organism Value: Zea mays
  misc_feature: MA Experiment 108536 PARAMETER Experiment Name: Zm_Meristem_P Parameter: Plant Line Value: 35A19
  misc_feature: MA Experiment 108536 PARAMETER Experiment Name: Zm_Meristem_P Parameter: Tissue Value: Shoot Meristem vs. Above Shoot Meristem
  misc_feature: MA Experiment ID: 108545 Result: Up-regulated in Transcription
  misc_feature: MA Experiment 108545 PARAMETER Experiment Name: Zm_Imbibed_Seeds_P Parameter: Age (day) Value: 3 vs. 2
  misc_feature: MA Experiment 108545 PARAMETER Experiment Name: Zm_Imbibed_Seeds_P Parameter: Organism Value: Zea mays
  misc_feature: MA Experiment 108545 PARAMETER Experiment Name: Zm_Imbibed_Seeds_P Parameter: Plant Line Value: 35A19
  misc_feature: MA Experiment 108545 PARAMETER Experiment Name: Zm_Imbibed_Seeds_P Parameter: Tissue Value: Aerial vs. Embryo
  misc_feature: MA Experiment ID: 108547 Result: Up-regulated in Transcription
  misc_feature: MA Experiment 108547 PARAMETER Experiment Name: Zm_Imbibed_Seeds_P Parameter: Age (day) Value: 4 vs. 2
  misc_feature: MA Experiment 108547 PARAMETER Experiment Name: Zm_Imbibed_Seeds_P Parameter: Organism Value: Zea mays
  misc_feature: MA Experiment 108547 PARAMETER Experiment Name: Zm_Imbibed_Seeds_P Parameter: Plant Line Value: 35A19
  misc_feature: MA Experiment 108547 PARAMETER Experiment Name: Zm_Imbibed_Seeds_P Parameter: Tissue Value: Aerial vs. Embryo
  misc_feature: MA Experiment ID: 108559 Result: Down-regulated in Transcription
  misc_feature: MA Experiment 108559 PARAMETER Experiment Name: Zm_5mM_NO_P Parameter: Age (day) Value: 8
  misc_feature: MA Experiment 108559 PARAMETER Experiment Name: Zm_5mM_NO_P Parameter: Organism Value: Zea mays
  misc_feature: MA Experiment 108559 PARAMETER Experiment Name: Zm_5mM_NO_P Parameter: Plant Line Value: 35A19
  misc_feature: MA Experiment 108559 PARAMETER Experiment Name: Zm_5mM_NO_P Parameter: Timepoint (hr) Value: 12
  misc_feature: MA Experiment 108559 PARAMETER Experiment Name: Zm_5mM_NO_P Parameter: Tissue Value: Aerial
  misc_feature: MA Experiment 108559 PARAMETER Experiment Name: Zm_5mM_NO_P Parameter: Treatment Value: 5mM NO vs. No Treatment
  misc_feature: MA Experiment ID: 20000478 Result: Down-regulated in Transcription
  misc_feature: MA Experiment 20000478 PARAMETER Experiment Name: Zm_5mM_SA_P Parameter: Age (day) Value: 11
  misc_feature: MA Experiment 20000478 PARAMETER Experiment Name: Zm_5mM_SA_P Parameter: Organism Value: Zea mays
  misc_feature: MA Experiment 20000478 PARAMETER Experiment Name: Zm_5mM_SA_P Parameter: Plant Line Value: 35A19
  misc_feature: MA Experiment 20000478 PARAMETER Experiment Name: Zm_5mM_SA_P Parameter: Timepoint (hr) Value: 72
  misc_feature: MA Experiment 20000478 PARAMETER Experiment Name: Zm_5mM_SA_P Parameter: Tissue Value: Aerial
  misc_feature: MA Experiment 20000478 PARAMETER Experiment Name: Zm_5mM_SA_P Parameter: Treatment Value: 5mM SA vs. No Treatment
  misc_feature: MA Experiment ID: 20000487 Result: Down-regulated in Transcription
  misc_feature: MA Experiment 20000487 PARAMETER Experiment Name: Zm_50mM_NH4NO3_L_to_H_P Parameter: Organism Value: Zea mays
  misc_feature: MA Experiment 20000487 PARAMETER Experiment Name: Zm_50mM_NH4NO3_L_to_H_P Parameter: Timepoint (hr) Value: 4
  misc_feature: MA Experiment 20000487 PARAMETER Experiment Name: Zm_50mM_NH4NO3_L_to_H_P Parameter: Tissue Value: Leaves
  misc_feature: MA Experiment 20000487 PARAMETER Experiment Name: Zm_50mM_NH4NO3_L_to_H_P Parameter: Treatment Value: 50mM NH4NO3 vs. 100mM Mannitol
  misc_feature: MA Experiment ID: 20000535 Result: Down-regulated in Transcription
  misc_feature: MA Experiment 20000535 PARAMETER Experiment Name: Zm_Hybrid_Seed_Dev_P Parameter: DAP Value: 30 vs. 12
  misc_feature: MA Experiment 20000535 PARAMETER Experiment Name: Zm_Hybrid_Seed_Dev_P Parameter: Organism Value: Zea mays
  misc_feature: MA Experiment 20000535 PARAMETER Experiment Name: Zm_Hybrid_Seed_Dev_P Parameter: Plant Line Value: 35A19
  misc_feature: MA Experiment 20000535 PARAMETER Experiment Name: Zm_Hybrid_Seed_Dev_P Parameter: Tissue Value: Embryo vs. Unfert Floret
  misc_feature: MA Experiment ID: 20000626 Result: Down-regulated in Transcription
  misc_feature: MA Experiment 20000626 PARAMETER Experiment Name: Zm_Herbicide-Treatments_P Parameter: Timepoint (hr) Value: 12
  misc_feature: MA Experiment 20000626 PARAMETER Experiment Name: Zm_Herbicide-Treatments_P Parameter: Tissue Value: Aerial
  misc_feature: MA Experiment 20000626 PARAMETER Experiment Name: Zm_Herbicide-Treatments_P Parameter: Treatment Value: Roundup vs. No Treatment
  misc_feature: MA Experiment ID: 20000629 Result: Down-regulated in Transcription
  misc_feature: MA Experiment 20000629 PARAMETER Experiment Name: Zm_Herbicide-Treatments_P Parameter: Timepoint (hr) Value: 12
  misc_feature: MA Experiment 20000629 PARAMETER Experiment Name: Zm_Herbicide-Treatments_P Parameter: Tissue Value: Aerial
  misc_feature: MA Experiment 20000629 PARAMETER Experiment Name: Zm_Herbicide-Treatments_P Parameter: Treatment Value: Trimec vs. No Treatment
  misc_feature: MA Experiment ID: 20000630 Result: Down-regulated in Transcription
  misc_feature: MA Experiment 20000630 PARAMETER Experiment Name: Zm_Herbicide-Treatments_P Parameter: Timepoint (hr) Value: 4
  misc_feature: MA Experiment 20000630 PARAMETER Experiment Name: Zm_Herbicide-Treatments_P Parameter: Tissue Value: Aerial
  misc_feature: MA Experiment 20000630 PARAMETER Experiment Name: Zm_Herbicide-Treatments_P Parameter: Treatment Value: Roundup vs. No Treatment
gcacgagaccattacctagaacatcctaatcgaaaaatcgcaactcatactagaacatacagcatttcacaagacacaacataagcaatagccatgggagctgtgaagcatacattgaaaatgctttcatggctcctactcttcgcacaattggctgcggccaccacctccaagtgcacaaatgccacaaatgggactgagactgacagcctgggtgcaatgaaactgaagctgattgccattgcatccatcctcacagctggagcagctggtgtgctagtgccagtacttggccgctccatggccgcgctacatcctgatggtgacatttttttcgctgtcaaggcatttgcagccggtgtcatcctggccacgggcatggtccacattctgccagcagcatttgatgggctgacatccccatgcctctacaaaggtggcagtggtgggaacattttcccctttgcaggactcattgcaatgtctgctgcaatggccactatggtgatagactcactagctgctgggtactaccgccggtctcacttcaagaaggcacggccaatcgacatcctagagatccatgaacaaccaggagatgaggaaaggtctgggcatgcacaacatgtgcatgtgcacacccatgcaacacatgggcattcacacggagaggtggatgtcatcagttcaccagaggaggcttcaatagctgacacgatccggcacagggtggtatctcaggtccttgagctcggaattttggtgcattcagtgataattggggtgtccttaggtgcatctgtgaggtcatcgaccataaggcctcttgttggtgcccttagcttccatcaattctttgaaggcattggcctgggtggttgcattgtgcaggcaaatttcaagttgagggctaccgtcatgatggcaatttttttctccctgactgcacccattggcattgcattagggattggaatttcatcaagctacaatggccatagcactacagcgttcattgttgaaggagtgttcaactcagcctcagcaggaattttgatctacatgtcattagtcgatcttctggccacagatttcaataagcccaaactgcagacgaatacaaagcttcagctgatgacatatcttgcacttttcttaggtgcagggatgatgtccatgcttgctatatgggcatagattttcagaccatcaaaggatggctagagttgaagaaataagtttatttgtccaagagttctccattttctcaaacaagatgcccttggtgaagggttcatcatattaatccacgagttctccatcttccgtacgatatagcctcagatagtccttttgtacttcataatgtgagattacatgatttgtcatttgttggcatagtccattatcctaaagctatgatagtcattagctgtggttcatgtgctgaacattcagtcataaagacagagctaagccaattct

SEQ ID NO: 13100 - protein, 367 aa, Zea mays subsp. mays
  peptide (1)..(367): Ceres Seq. ID no. 12364145
  misc_feature (44)..(197): Pfam Name: ZIP Zinc transporter Pfam Description: ZIP Zinc transporter
  misc_feature (1)..(367): Homolog of NCBI NO: 32492894 NR Description: zinc transporter ZIP3 [Oryza sativa (japonica group)] >gi|38347354|emb|CAE05208.2| OSJNBa0070C17.15 [Oryza
  misc_feature (38)..(367): Homolog of NCBI NO: 40888860 NR Description: TPA: putative ZIP-like protein [Oryza sativa
  misc_feature (169)..(367): Homolog of NCBI NO: 15230588 NR Description: putative zinc transporter; protein id: supported by cDNA: gi_3252865 [Arabidopsis thaliana]
  misc_feature (8)..(197): Homolog of NCBI NO: 15230588 NR Description: putative zinc transporter; protein id: supported by cDNA: gi_3252865 [Arabidopsis thaliana]
  misc_feature (164)..(367): Homolog of NCBI NO: 32816615 NR Description: putative zinc transporter [Oryza sativa (japonica
  misc_feature (164)..(367): Homolog of NCBI NO: 40888854 NR Description: TPA: putative ZIP-like protein [Oryza sativa
  misc_feature (38)..(192): Homolog of NCBI NO: 32816615 NR Description: putative zinc transporter [Oryza sativa (japonica
  misc_feature (38)..(192): Homolog of NCBI NO: 40888854 NR Description: TPA: putative ZIP-like protein [Oryza sativa
MGAVKHTLKMLSWLLLFAQLAAATTSKCTNATNGTETDSLGAMKLKLIAIASILTAGAAGVLVPVLGRSMAALHPDGDIFFAVKAFAAGVILATGMVHILPAAFDGLTSPCLYKGGSGGNIFPFAGLIAMSAAMATMVIDSLAAGYYRRSHFKKARPIDILEIHEQPGDEERSGHAQHVHVHTHATHGHSHGEVDVISSPEEASIADTIRHRVVSQVLELGILVHSVIIGVSLGASVRSSTIRPLVGALSFHQFFEGIGLGGCIVQANFKLRATVMMAIFFSLTAPIGIALGIGISSSYNGHSTTAFIVEGVFNSASAGILIYMSLVDLLATDFNKPKLQTNTKLQLMTYLALFLGAGMMSMLAIWA

SEQ ID NO: 13101 - protein, 358 aa, Zea mays subsp. mays
  peptide (1)..(358): Ceres Seq. ID no. 12364146
  misc_feature (35)..(188): Pfam Name: ZIP Zinc transporter Pfam Description: ZIP Zinc transporter
  misc_feature (155)..(358): Homolog of NCBI NO: 32816615 NR Description: putative zinc transporter [Oryza sativa (japonica
  misc_feature (155)..(358): Homolog of NCBI NO: 40888854 NR Description: TPA: putative ZIP-like protein [Oryza sativa
  misc_feature (1)..(358): Homolog of NCBI NO: 32492894 NR Description: zinc transporter ZIP3 [Oryza sativa (japonica group)] >gi|38347354|emb|CAE05208.2| OSJNBa0070C17.15 [Oryza
  misc_feature (160)..(358): Homolog of NCBI NO: 15230588 NR Description: putative zinc transporter; protein id: supported by cDNA: gi_3252865 [Arabidopsis thaliana]
  misc_feature (1)..(188): Homolog of NCBI NO: 15230588 NR Description: putative zinc transporter; protein id: supported by cDNA: gi_3252865 [Arabidopsis thaliana]
  misc_feature (29)..(358): Homolog of NCBI NO: 40888860 NR Description: TPA: putative ZIP-like protein [Oryza sativa
  misc_feature (29)..(183): Homolog of NCBI NO: 32816615 NR Description: putative zinc transporter [Oryza sativa (japonica
  misc_feature (29)..(183): Homolog of NCBI NO: 40888854 NR Description: TPA: putative ZIP-like protein [Oryza sativa
MLSWLLLFAQLAAATTSKCTNATNGTETDSLGAMKLKLIAIASILTAGAAGVLVPVLGRSMAALHPDGDIFFAVKAFAAGVILATGMVHILPAAFDGLTSPCLYKGGSGGNIFPFAGLIAMSAAMATMVIDSLAAGYYRRSHFKKARPIDILEIHEQPGDEERSGHAQHVHVHTHATHGHSHGEVDVISSPEEASIADTIRHRVVSQVLELGILVHSVIIGVSLGASVRSSTIRPLVGALSFHQFFEGIGLGGCIVQANFKLRATVMMAIFFSLTAPIGIALGIGISSSYNGHSTTAFIVEGVFNSASAGILIYMSLVDLLATDFNKPKLQTNTKLQLMTYLALFLGAGMMSMLAIWA

SEQ ID NO: 13102 - protein, 325 aa, Zea mays subsp. mays
  peptide (1)..(325): Ceres Seq. ID no. 12364147
  misc_feature (2)..(155): Pfam Name: ZIP Zinc transporter Pfam Description: ZIP Zinc transporter
  misc_feature (1)..(325): Homolog of NCBI NO: 32492894 NR Description: zinc transporter ZIP3 [Oryza sativa (japonica group)] >gi|38347354|emb|CAE05208.2| OSJNBa0070C17.15 [Oryza
  misc_feature (1)..(325): Homolog of NCBI NO: 40888860 NR Description: TPA: putative ZIP-like protein [Oryza sativa
  misc_feature (127)..(325): Homolog of NCBI NO: 15230588 NR Description: putative zinc transporter; protein id: supported by cDNA: gi_3252865 [Arabidopsis thaliana]
  misc_feature (1)..(155): Homolog of NCBI NO: 15230588 NR Description: putative zinc transporter; protein id: supported by cDNA: gi_3252865 [Arabidopsis thaliana]
  misc_feature (122)..(325): Homolog of NCBI NO: 32816615 NR Description: putative zinc transporter [Oryza sativa (japonica
  misc_feature (122)..(325): Homolog of NCBI NO: 40888854 NR Description: TPA: putative ZIP-like protein [Oryza sativa
  misc_feature (1)..(150): Homolog of NCBI NO: 32816615 NR Description: putative zinc transporter [Oryza sativa (japonica
  misc_feature (1)..(150): Homolog of NCBI NO: 40888854 NR Description: TPA: putative ZIP-like protein [Oryza sativa
MKLKLIAIASILTAGAAGVLVPVLGRSMAALHPDGDIFFAVKAFAAGVILATGMVHILPAAFDGLTSPCLYKGGSGGNIFPFAGLIAMSAAMATMVIDSLAAGYYRRSHFKKARPIDILEIHEQPGDEERSGHAQHVHVHTHATHGHSHGEVDVISSPEEASIADTIRHRVVSQVLELGILVHSVIIGVSLGASVRSSTIRPLVGALSFHQFFEGIGLGGCIVQANFKLRATVMMAIFFSLTAPIGIALGIGISSSYNGHSTTAFIVEGVFNSASAGILIYMSLVDLLATDFNKPKLQTNTKLQLMTYLALFLGAGMMSMLAIWA

SEQ ID NO: 13103 - DNA, 1594 bp, Zea mays subsp. mays; identical to SEQ ID NO: 2660
  misc_feature (1)..(1594): Ceres Seq. ID no. 12387222
  misc_feature: MA Experiment ID: 108528 Result: Down-regulated in Transcription
  misc_feature: MA Experiment 108528 PARAMETER Experiment Name: Zm_Imbibed_Seeds_P Parameter: Age (day) Value: 5 vs. 2
  misc_feature: MA Experiment 108528 PARAMETER Experiment Name: Zm_Imbibed_Seeds_P Parameter: Organism Value: Zea mays
  misc_feature: MA Experiment 108528 PARAMETER Experiment Name: Zm_Imbibed_Seeds_P Parameter: Plant Line Value: 35A19
  misc_feature: MA Experiment 108528 PARAMETER Experiment Name: Zm_Imbibed_Seeds_P Parameter: Tissue Value: Aerial vs. Embryo
  misc_feature: MA Experiment ID: 108530 Result: Down-regulated in Transcription
  misc_feature: MA Experiment 108530 PARAMETER Experiment Name: Zm_Imbibed_Seeds_P Parameter: Age (day) Value: 6 vs. 2
  misc_feature: MA Experiment 108530 PARAMETER Experiment Name: Zm_Imbibed_Seeds_P Parameter: Organism Value: Zea mays
  misc_feature: MA Experiment 108530 PARAMETER Experiment Name: Zm_Imbibed_Seeds_P Parameter: Plant Line Value: 35A19
  misc_feature: MA Experiment 108530 PARAMETER Experiment Name: Zm_Imbibed_Seeds_P Parameter: Tissue Value: Aerial vs. Embryo
  misc_feature: MA Experiment ID: 108535 Result: Up-regulated in Transcription
  misc_feature: MA Experiment 108535 PARAMETER Experiment Name: Zm_Meristem_P Parameter: Age (day) Value: 8
  misc_feature: MA Experiment 108535 PARAMETER Experiment Name: Zm_Meristem_P Parameter: Organism Value: Zea mays
  misc_feature: MA Experiment 108535 PARAMETER Experiment Name: Zm_Meristem_P Parameter: Plant Line Value: 35A19
  misc_feature: MA Experiment 108535 PARAMETER Experiment Name: Zm_Meristem_P Parameter: Tissue Value: Root Meristem vs. Above Root Meristem
  misc_feature: MA Experiment ID: 108543 Result: Up-regulated in Transcription
  misc_feature: MA Experiment ID: 108544 Result: Down-regulated in Transcription
  misc_feature: MA Experiment ID: 108688 Result: Down-regulated in Transcription
  misc_feature: MA Experiment 108688 PARAMETER Experiment Name: Zm_Embryos-Flowers__P Parameter: Tissue Value: Immature Flowers vs. Aerial+
  misc_feature: MA Experiment ID: 20000108 Result: Up-regulated in Transcription
  misc_feature: MA Experiment 20000108 PARAMETER Experiment Name: Zm_Root-Tips_P Parameter: Age (day) Value: 12
  misc_feature: MA Experiment 20000108 PARAMETER Experiment Name: Zm_Root-Tips_P Parameter: Organism Value: Zea mays
  misc_feature: MA Experiment 20000108 PARAMETER Experiment Name: Zm_Root-Tips_P Parameter: Tissue Value: Root tips vs. Root mid region    35
  misc_feature: MA Experiment 20000108 PARAMETER Experiment Name: Zm_Root-Tips_P Parameter: Tissue Value: Root tips vs. Root mid region   Sequence Listing-Misc Features (4)
  misc_feature: MA Experiment ID: 20000487 Result: Down-regulated in Transcription
  misc_feature: MA Experiment 20000487 PARAMETER Experiment Name: Zm_50mM_NH4NO3_L_to_H_P Parameter: Organism Value: Zea mays
  misc_feature: MA Experiment 20000487 PARAMETER Experiment Name: Zm_50mM_NH4NO3_L_to_H_P Parameter: Timepoint (hr) Value: 4
  misc_feature: MA Experiment 20000487 PARAMETER Experiment Name: Zm_50mM_NH4NO3_L_to_H_P Parameter: Tissue Value: Leaves
  misc_feature: MA Experiment 20000487 PARAMETER Experiment Name: Zm_50mM_NH4NO3_L_to_H_P Parameter: Treatment Value: 50mM NH4NO3 vs. 100mM Mannitol
  misc_feature: MA Experiment ID: 20000535 Result: Up-regulated in Transcription
  misc_feature: MA Experiment 20000535 PARAMETER Experiment Name: Zm_Hybrid_Seed_Dev_P Parameter: DAP Value: 30 vs. 12
  misc_feature: MA Experiment 20000535 PARAMETER Experiment Name: Zm_Hybrid_Seed_Dev_P Parameter: Organism Value: Zea mays
  misc_feature: MA Experiment 20000535 PARAMETER Experiment Name: Zm_Hybrid_Seed_Dev_P Parameter: Plant Line Value: 35A19
  misc_feature: MA Experiment 20000535 PARAMETER Experiment Name: Zm_Hybrid_Seed_Dev_P Parameter: Tissue Value: Embryo vs. Unfert Floret
  misc_feature: MA Experiment ID: 20000626 Result: Up-regulated in Transcription
  misc_feature: MA Experiment 20000626 PARAMETER Experiment Name: Zm_Herbicide-Treatments_P Parameter: Timepoint (hr) Value: 12
  misc_feature: MA Experiment 20000626 PARAMETER Experiment Name: Zm_Herbicide-Treatments_P Parameter: Tissue Value: Aerial
  misc_feature: MA Experiment 20000626 PARAMETER Experiment Name: Zm_Herbicide-Treatments_P Parameter: Treatment Value: Roundup vs. No Treatment
  misc_feature: MA Experiment ID: 20000632 Result: Down-regulated in Transcription
  misc_feature: MA Experiment 20000632 PARAMETER Experiment Name: Zm_Herbicide-Treatments_P Parameter: Timepoint (hr) Value: 4
  misc_feature: MA Experiment 20000632 PARAMETER Experiment Name: Zm_Herbicide-Treatments_P Parameter: Tissue Value: Aerial
  misc_feature: MA Experiment 20000632 PARAMETER Experiment Name: Zm_Herbicide-Treatments_P Parameter: Treatment Value: Glean vs. No Treatment

SEQ ID NO: 13104 - protein, 454 aa, Zea mays subsp. mays; identical to SEQ ID NO: 2661
  peptide (1)..(454): Ceres Seq. ID no. 12387223
  misc_feature (146)..(417): Pfam Name: Polyprenyl synthetase Pfam Description: Polyprenyl synthetase
  misc_feature (146)..(417): Pfam Name: Polyprenyl synthetase Pfam Description: Polyprenyl synthetase
  misc_feature (105)..(454): Homolog of NCBI NO: 1346033 NR Description: Farnesyl pyrophosphate synthetase (FPP (FPS) (Farnesyl diphosphate synthetase) [Includes:
  misc_feature (104)..(454): Homolog of NCBI NO: 34911542 NR Description: putative farnesyl-pyrophosphate synthetase [Oryza
  misc_feature (158)..(454): Homolog of NCBI NO: 25458583 NR Description: probable farnesyl pyrophosphate synthase - rice >gi|4680193|gb|AAD27558.1|AF111710_4 putative farnesyl
  misc_feature (21)..(151): Homolog of NCBI NO: 25458583 NR Description: probable farnesyl pyrophosphate synthase - rice >gi|4680193|gb|AAD27558.1|AF111710_4 putative farnesyl
  misc_feature (106)..(454): Homolog of NCBI NO: 18958450 NR Description: farnesyl pyrophosphare synthase [Musa acuminata]
  misc_feature (104)..(454): Homolog of NCBI NO: 34911542 NR Description: putative farnesyl-pyrophosphate synthetase [Oryza
  misc_feature (21)..(151): Homolog of NCBI NO: 25458583 NR Description: probable farnesyl pyrophosphate synthase - rice >gi|4680193|gb|AAD27558.1|AF111710_4 putative farnesyl
  misc_feature (115)..(454): Homolog of NCBI NO: 25452945 NR Description: Farnesyl pyrophosphate synthetase 1 (FPP
  misc_feature (117)..(454): Homolog of NCBI NO: 13537421 NR Description: farnesyl pyrophosphate synthase [Humulus lupulus]
  misc_feature (115)..(454): Homolog of NCBI NO: 1346029 NR Description: Farnesyl pyrophosphate synthetase 2 (FPP
  misc_feature (115)..(454): Homolog of NCBI NO: 7433992 NR Description: farnesyl-pyrophosphate synthetase - Para rubber >gi|22676905|gb|AAM98379.1| farnesyl diphosphate synthase [Hevea
  misc_feature (115)..(454): Homolog of NCBI NO: 1346028 NR Description: Farnesyl pyrophosphate synthetase 1 (FPP
  misc_feature (106)..(454): Homolog of NCBI NO: 18958450 NR Description: farnesyl pyrophosphare synthase [Musa acuminata]
  misc_feature (158)..(454): Homolog of NCBI NO: 25458583 NR Description: probable farnesyl pyrophosphate synthase - rice >gi|4680193|gb|AAD27558.1|AF111710_4 putative farnesyl
  misc_feature (105)..(454): Homolog of NCBI NO: 1346033 NR Description: Farnesyl pyrophosphate synthetase (FPP (FPS) (Farnesyl diphosphate synthetase) [Includes:
  misc_feature (115)..(454): Homolog of NCBI NO: 1346028 NR Description: Farnesyl pyrophosphate synthetase 1 (FPP
  misc_feature (115)..(454): Homolog of NCBI NO: 7433992 NR Description: farnesyl-pyrophosphate synthetase - Para rubber >gi|22676905|gb|AAM98379.1| farnesyl diphosphate synthase [Hevea
  misc_feature (115)..(454): Homolog of NCBI NO: 1346029 NR Description: Farnesyl pyrophosphate synthetase 2 (FPP
  misc_feature (117)..(454): Homolog of NCBI NO: 13537421 NR Description: farnesyl pyrophosphate synthase [Humulus lupulus]
  misc_feature (115)..(454): Homolog of NCBI NO: 25452945 NR Description: Farnesyl pyrophosphate synthetase 1 (FPP

SEQ ID NO: 13105 - protein, 350 aa, Zea mays subsp. mays; identical to SEQ ID NO: 2662
  peptide (1)..(350): Ceres Seq. ID no. 12387224
  misc_feature (42)..(313): Pfam Name: Polyprenyl synthetase Pfam Description: Polyprenyl synthetase
  misc_feature (42)..(313): Pfam Name: Polyprenyl synthetase Pfam Description: Polyprenyl synthetase
  misc_feature (1)..(350): Homolog of NCBI NO: 1346033 NR Description: Farnesyl pyrophosphate synthetase (FPP (FPS) (Farnesyl diphosphate synthetase) [Includes:
  misc_feature (1)..(350): Homolog of NCBI NO: 34911542 NR Description: putative farnesyl-pyrophosphate synthetase [Oryza
  misc_feature (54)..(350): Homolog of NCBI NO: 25458583 NR Description: probable farnesyl pyrophosphate synthase - rice >gi|4680193|gb|AAD27558.1|AF111710_4 putative farnesyl
  misc_feature (1)..(47): Homolog of NCBI NO: 25458583 NR Description: probable farnesyl pyrophosphate synthase - rice >gi|4680193|gb|AAD27558.1|AF111710_4 putative farnesyl
  misc_feature (2)..(350): Homolog of NCBI NO: 18958450 NR Description: farnesyl pyrophosphare synthase [Musa acuminata]
  misc_feature (1)..(350): Homolog of NCBI NO: 34911542 NR Description: putative farnesyl-pyrophosphate synthetase [Oryza
  misc_feature (1)..(47): Homolog of NCBI NO: 25458583 NR Description: probable farnesyl pyrophosphate synthase - rice >gi|4680193|gb|AAD27558.1|AF111710_4 putative farnesyl
  misc_feature (11)..(350): Homolog of NCBI NO: 25452945 NR Description: Farnesyl pyrophosphate synthetase 1 (FPP
  misc_feature (13)..(350): Homolog of NCBI NO: 13537421 NR Description: farnesyl pyrophosphate synthase [Humulus lupulus]
  misc_feature (11)..(350): Homolog of NCBI NO: 1346029 NR Description: Farnesyl pyrophosphate synthetase 2 (FPP
  misc_feature (11)..(350): Homolog of NCBI NO: 7433992 NR Description: farnesyl-pyrophosphate synthetase - Para rubber >gi|22676905|gb|AAM98379.1| farnesyl diphosphate synthase [Hevea
  misc_feature (11)..(350): Homolog of NCBI NO: 1346028 NR Description: Farnesyl pyrophosphate synthetase 1 (FPP
  misc_feature (2)..(350): Homolog of NCBI NO: 18958450 NR Description: farnesyl pyrophosphare synthase [Musa acuminata]
  misc_feature (54)..(350): Homolog of NCBI NO: 25458583 NR Description: probable farnesyl pyrophosphate synthase - rice >gi|4680193|gb|AAD27558.1|AF111710_4 putative farnesyl
  misc_feature (1)..(350): Homolog of NCBI NO: 1346033 NR Description: Farnesyl pyrophosphate synthetase (FPP (FPS) (Farnesyl diphosphate synthetase) [Includes:
  misc_feature (11)..(350): Homolog of NCBI NO: 1346028 NR Description: Farnesyl pyrophosphate synthetase 1 (FPP
  misc_feature (11)..(350): Homolog of NCBI NO: 7433992 NR Description: farnesyl-pyrophosphate synthetase - Para rubber >gi|22676905|gb|AAM98379.1| farnesyl diphosphate synthase [Hevea
  misc_feature (11)..(350): Homolog of NCBI NO: 1346029 NR Description: Farnesyl pyrophosphate synthetase 2 (FPP
  misc_feature (13)..(350): Homolog of NCBI NO: 13537421 NR Description: farnesyl pyrophosphate synthase [Humulus lupulus]
  misc_feature (11)..(350): Homolog of NCBI NO: 25452945 NR Description: Farnesyl pyrophosphate synthetase 1 (FPP

SEQ ID NO: 13106 - protein, 305 aa, Zea mays subsp. mays; identical to SEQ ID NO: 2663
  peptide (1)..(305): Ceres Seq. ID no. 12387225
  misc_feature (1)..(268): Pfam Name: Polyprenyl synthetase Pfam Description: Polyprenyl synthetase
  misc_feature (1)..(268): Pfam Name: Polyprenyl synthetase Pfam Description: Polyprenyl synthetase
  misc_feature (1)..(305): Homolog of NCBI NO: 1346033 NR Description: Farnesyl pyrophosphate synthetase (FPP (FPS) (Farnesyl diphosphate synthetase) [Includes:
  misc_feature (1)..(305): Homolog of NCBI NO: 34911542 NR Description: putative farnesyl-pyrophosphate synthetase [Oryza
  misc_feature (9)..(305): Homolog of NCBI NO: 25458583 NR Description: probable farnesyl pyrophosphate synthase - rice >gi|4680193|gb|AAD27558.1|AF111710_4 putative farnesyl
  misc_feature (1)..(305): Homolog of NCBI NO: 18958450 NR Description: farnesyl pyrophosphare synthase [Musa acuminata]
  misc_feature (1)..(305): Homolog of NCBI NO: 1346028 NR Description: Farnesyl pyrophosphate synthetase 1 (FPP
  misc_feature (1)..(305): Homolog of NCBI NO: 34911542 NR Description: putative farnesyl-pyrophosphate synthetase [Oryza
  misc_feature (1)..(305): Homolog of NCBI NO: 18958450 NR Description: farnesyl pyrophosphare synthase [Musa acuminata]
  misc_feature (1)..(305): Homolog of NCBI NO: 14279425 NR Description: farnesyl pyrophosphate synthase [Humulus lupulus]
  misc_feature (1)..(305): Homolog of NCBI NO: 25452945 NR Description: Farnesyl pyrophosphate synthetase 1 (FPP
  misc_feature (1)..(305): Homolog of NCBI NO: 13537421 NR Description: farnesyl pyrophosphate synthase [Humulus lupulus]
  misc_feature (1)..(305): Homolog of NCBI NO: 1346029 NR Description: Farnesyl pyrophosphate synthetase 2 (FPP
  misc_feature (1)..(305): Homolog of NCBI NO: 7433992 NR Description: farnesyl-pyrophosphate synthetase - Para rubber >gi|22676905|gb|AAM98379.1| farnesyl diphosphate synthase [Hevea
  misc_feature (1)..(305): Homolog of NCBI NO: 1346028 NR Description: Farnesyl pyrophosphate synthetase 1 (FPP
  misc_feature (9)..(305): Homolog of NCBI NO: 25458583 NR Description: probable farnesyl pyrophosphate synthase - rice >gi|4680193|gb|AAD27558.1|AF111710_4 putative farnesyl
  misc_feature (1)..(305): Homolog of NCBI NO: 1346033 NR Description: Farnesyl pyrophosphate synthetase (FPP (FPS) (Farnesyl diphosphate synthetase) [Includes:
  misc_feature (1)..(305): Homolog of NCBI NO: 7433992 NR Description: farnesyl-pyrophosphate synthetase - Para rubber >gi|22676905|gb|AAM98379.1| farnesyl diphosphate synthase [Hevea
  misc_feature (1)..(305): Homolog of NCBI NO: 1346029 NR Description: Farnesyl pyrophosphate synthetase 2 (FPP
  misc_feature (1)..(305): Homolog of NCBI NO: 13537421 NR Description: farnesyl pyrophosphate synthase [Humulus lupulus]
  misc_feature (1)..(305): Homolog of NCBI NO: 25452945 NR Description: Farnesyl pyrophosphate synthetase 1 (FPP
  misc_feature (1)..(305): Homolog of NCBI NO: 14279425 NR Description: farnesyl pyrophosphate synthase [Humulus lupulus]

SEQ ID NO: 13107 - DNA, 1585 bp, Zea mays subsp. mays
  misc_feature (1)..(1585): Ceres Seq. ID no. 12367895
  misc_feature: MA Experiment ID: 108527 Result: Up-regulated in Transcription
  misc_feature: MA Experiment 108527 PARAMETER Experiment Name: Zm_5mM_NO_P Parameter: Age (day) Value: 8
  misc_feature: MA Experiment 108527 PARAMETER Experiment Name: Zm_5mM_NO_P Parameter: Organism Value: Zea mays
  misc_feature: MA Experiment 108527 PARAMETER Experiment Name: Zm_5mM_NO_P Parameter: Plant Line Value: 35A19
  misc_feature: MA Experiment 108527 PARAMETER Experiment Name: Zm_5mM_NO_P Parameter: Timepoint (hr) Value: 6
  misc_feature: MA Experiment 108527 PARAMETER Experiment Name: Zm_5mM_NO_P Parameter: Tissue Value: Aerial
  misc_feature: MA Experiment 108527 PARAMETER Experiment Name: Zm_5mM_NO_P Parameter: Treatment Value: 5mM NO vs. No Treatment
  misc_feature: MA Experiment ID: 108535 Result: Down-regulated in Transcription
  misc_feature: MA Experiment 108535 PARAMETER Experiment Name: Zm_Meristem_P Parameter: Age (day) Value: 8
  misc_feature: MA Experiment 108535 PARAMETER Experiment Name: Zm_Meristem_P Parameter: Organism Value: Zea mays
  misc_feature: MA Experiment 108535 PARAMETER Experiment Name: Zm_Meristem_P Parameter: Plant Line Value: 35A19
  misc_feature: MA Experiment 108535 PARAMETER Experiment Name: Zm_Meristem_P Parameter: Tissue Value: Root Meristem vs. Above Root Meristem
  misc_feature: MA Experiment ID: 108543 Result: Down-regulated in Transcription
  misc_feature: MA Experiment ID: 108689 Result: Down-regulated in Transcription
  misc_feature: MA Experiment 108689 PARAMETER Experiment Name: Zm_Drought_Roots_P Parameter: Age (day) Value: 9
  misc_feature: MA Experiment 108689 PARAMETER Experiment Name: Zm_Drought_Roots_P Parameter: Organism Value: Zea mays
  misc_feature: MA Experiment 108689 PARAMETER Experiment Name: Zm_Drought_Roots_P Parameter: Plant Line Value: 35A19
  misc_feature: MA Experiment 108689 PARAMETER Experiment Name: Zm_Drought_Roots_P Parameter: Timepoint (hr) Value: 24
  misc_feature: MA Experiment 108689 PARAMETER Experiment Name: Zm_Drought_Roots_P Parameter: Tissue Value: Roots
  misc_feature: MA Experiment 108689 PARAMETER Experiment Name: Zm_Drought_Roots_P Parameter: Treatment Value: Drought vs. No Drought
  misc_feature: MA Experiment ID: 20000477 Result: Up-regulated in Transcription
  misc_feature: MA Experiment 20000477 PARAMETER Experiment Name: Zm_5mM_SA_P Parameter: Age (day) Value: 10
  misc_feature: MA Experiment 20000477 PARAMETER Experiment Name: Zm_5mM_SA_P Parameter: Organism Value: Zea mays
  misc_feature: MA Experiment 20000477 PARAMETER Experiment Name: Zm_5mM_SA_P Parameter: Plant Line Value: 35A19
  misc_feature: MA Experiment 20000477 PARAMETER Experiment Name: Zm_5mM_SA_P Parameter: Timepoint (hr) Value: 48
  misc_feature: MA Experiment 20000477 PARAMETER Experiment Name: Zm_5mM_SA_P Parameter: Tissue Value: Aerial
  misc_feature: MA Experiment 20000477 PARAMETER Experiment Name: Zm_5mM_SA_P Parameter: Treatment Value: 5mM SA vs. No Treatment
  misc_feature: MA Experiment ID: 20000478 Result: Up-regulated in Transcription
  misc_feature: MA Experiment 20000478 PARAMETER Experiment Name: Zm_5mM_SA_P Parameter: Age (day) Value: 11
  misc_feature: MA Experiment 20000478 PARAMETER Experiment Name: Zm_5mM_SA_P Parameter: Organism Value: Zea mays
  misc_feature: MA Experiment 20000478 PARAMETER Experiment Name: Zm_5mM_SA_P Parameter: Plant Line Value: 35A19
  misc_feature: MA Experiment 20000478 PARAMETER Experiment Name: Zm_5mM_SA_P Parameter: Timepoint (hr) Value: 72
  misc_feature: MA Experiment 20000478 PARAMETER Experiment Name: Zm_5mM_SA_P Parameter: Tissue Value: Aerial
  misc_feature: MA Experiment 20000478 PARAMETER Experiment Name: Zm_5mM_SA_P Parameter: Treatment Value: 5mM SA vs. No Treatment
  misc_feature: MA Experiment ID: 20000535 Result: Up-regulated in Transcription
  misc_feature: MA Experiment 20000535 PARAMETER Experiment Name: Zm_Hybrid_Seed_Dev_P Parameter: DAP Value: 30 vs. 12
  misc_feature: MA Experiment 20000535 PARAMETER Experiment Name: Zm_Hybrid_Seed_Dev_P Parameter: Organism Value: Zea mays
  misc_feature: MA Experiment 20000535 PARAMETER Experiment Name: Zm_Hybrid_Seed_Dev_P Parameter: Plant Line Value: 35A19
  misc_feature: MA Experiment 20000535 PARAMETER Experiment Name: Zm_Hybrid_Seed_Dev_P Parameter: Tissue Value: Embryo vs. Unfert Floret
aaatttcccggagaccctcgagcaaaaatctggtctggttcaaactcgccttttgcctgcgggcggcgggcgttcttacgggccatgtcgcagcgcgacggcgacctcaccggagctcatccggaagaaggagaccgccacgccgttcgaatggatggctccgacgacgatgagctggaccaacctacgagtaaagcgactgagcacatcacggctatggacgtgaggaaggggaaggatatgcaagggatcccctggaacgtgatgccgactacaagggacaagtacaggcagtcacggctgcaggggtacgccaactttgagaacgtgcctaattccggaaggctttctgagaaggaatgcatgcctgcagagaaaggccaactctactacgagtttcagcacagcacgaggtcggtgaaaccgaccatccgtcatttccagttgaggaatttagtgtgggcaacaacaaggcacgatgtgtatcttatgtcaaacttttctgtgcttcattggtcagcaatgacttgtaagaagcaagaagtcattaatcttcaaggacacgtgacaccgtgcgagaagcaccatcggaattactacgaggggttttatcagactccagtcagtactttggcggtgaagcataacttgcttgttactggtgggtttcatggggagataatatgcaagtttctggatcgtcaaggagtaagctactgttgcaagacaacaaatgatgacgacggtattactaattctctggagatatttgagaagcctagtggttctctgcacttccttgcgtcaaacaatgattgtggacttagagactttgacatggaaaaatttcgaatatgcaaccacttccattttgcttggcctgtgaatcatacatcgttgagcccagatggtaaacttgctgctattgtgggggacagtcctgatggacttctgattgacgctaattcaggaaagacggttcacaaactccatggccatttggattactcctttgcgtcggcatggaatccagacggccgaacattcgccacggggaaccaagacaagacgtgcagggtctgggacgtccgcaatctctccagatcagttgttgtattgggtggcaacatcggagccgtcaggtcgattcgctacacgtcagacgggaagttcatggcgatgactgaacccgcggacttcatccacatcttcgatgttgagagtgggtacagcaggaagcaggagctggacttctttggtgagatcgcaggcatatcgttcagtcctgacactgaagctctctttgtcggtgtgcatgatcgcttcttcaactgctgcctcctccagttcagtcggcgacggttctactcgtaccttgattcaacactgtgagcttgtgctggtgtagacctgtgaggtcgacatcacaggctttagaagcaagaaagttgtggctatgttcataggtgttgctgtgaagaaactggagaacgatacgtttacttttgctgaacaagctgtaggtattcggcgacccatcttttctgggtgatcagagtctcaattaagattcccgctttctgtt

SEQ ID NO: 13108 - protein, 463 aa, Zea mays subsp. mays
  peptide (1)..(463): Ceres Seq. ID no. 12367896
  misc_feature (54)..(463): Homolog of NCBI NO: 18399975 NR Description: expressed protein; protein id: At3g13340.1, by cDNA: gi_15081810 [Arabidopsis thaliana] AT3g13340/MDC11_13 [Arabidopsis thaliana]
  misc_feature (54)..(463): Homolog of NCBI NO: 18405485 NR Description: expressed protein; protein id: At1g55680.1, by cDNA: gi_13430435, supported by cDNA: gi_17979110 [Arabidopsis >gi|13430436|gb|AAK25840.1|AF360130_1 unknown protein
  misc_feature (51)..(463): Homolog of NCBI NO: 18423837 NR Description: WD-repeat protein-like; protein id: At5g56190.1,
  misc_feature (51)..(463): Homolog of NCBI NO: 30696707 NR Description: WD-40 repeat protein family [Arabidopsis thaliana]
  misc_feature (51)..(463): Homolog of NCBI NO: 21536732 NR Description: WD-repeat protein-like [Arabidopsis thaliana]
  misc_feature (51)..(463): Homolog of NCBI NO: 9758639 NR Description: WD-repeat protein-like [Arabidopsis thaliana]
  misc_feature (51)..(461): Homolog of NCBI NO: 13937195 NR Description: At1g78070/F28K19_28 [Arabidopsis thaliana]
  misc_feature (56)..(463): Homolog of NCBI NO: 9294540 NR Description: WD domain protein-like [Arabidopsis thaliana]
  misc_feature (193)..(463): Homolog of NCBI NO: 25405994 NR Description: protein F20N2.10 [imported] - Arabidopsis >gi|8778499|gb|AAF79507.1|AC002328_15 F20N2.10 [Arabidopsis
  misc_feature (52)..(193): Homolog of NCBI NO: 25405994 NR Description: protein F20N2.10 [imported] - Arabidopsis >gi|8778499|gb|AAF79507.1|AC002328_15 F20N2.10 [Arabidopsis
KFPGDPRAKIWSGSNSPFACGRRAFLRAMSQRDGDLTGAHPEEGDRHAVRMDGSDDDELDQPTSKATEHITAMDVRKGKDMQGIPWNVMPTTRDKYRQSRLQGYANFENVPNSGRLSEKECMPAEKGQLYYEFQHSTRSVKPTIRHFQLRNLVWATTRHDVYLMSNFSVLHWSAMTCKKQEVINLQGHVTPCEKHHRNYYEGFYQTPVSTLAVKHNLLVTGGFHGEIICKFLDRQGVSYCCKTTNDDDGITNSLEIFEKPSGSLHFLASNNDCGLRDFDMEKFRICNHFHFAWPVNHTSLSPDGKLAAIVGDSPDGLLIDANSGKTVHKLHGHLDYSFASAWNPDGRTFATGNQDKTCRVWDVRNLSRSVVVLGGNIGAVRSIRYTSDGKFMAMTEPADFIHIFDVESGYSRKQELDFFGEIAGISFSPDTEALFVGVHDRFFNCCLLQFSRRRFYSYLDSTL

SEQ ID NO: 13109 - protein, 435 aa, Zea mays subsp. mays
  peptide (1)..(435): Ceres Seq. ID no. 12367897
  misc_feature (26)..(435): Homolog of NCBI NO: 18399975 NR Description: expressed protein; protein id: At3g13340.1, by cDNA: gi_15081810 [Arabidopsis thaliana] AT3g13340/MDC11_13 [Arabidopsis thaliana]
  misc_feature (26)..(435): Homolog of NCBI NO: 18405485 NR Description: expressed protein; protein id: At1g55680.1, by cDNA: gi_13430435, supported by cDNA: gi_17979110 [Arabidopsis >gi|13430436|gb|AAK25840.1|AF360130_1 unknown protein
  misc_feature (23)..(435): Homolog of NCBI NO: 18423837 NR Description: WD-repeat protein-like; protein id: At5g56190.1,
  misc_feature (23)..(435): Homolog of NCBI NO: 30696707 NR Description: WD-40 repeat protein family [Arabidopsis thaliana]
  misc_feature (23)..(435): Homolog of NCBI NO: 21536732 NR Description: WD-repeat protein-like [Arabidopsis thaliana]
  misc_feature (23)..(435): Homolog of NCBI NO: 9758639 NR Description: WD-repeat protein-like [Arabidopsis thaliana]
  misc_feature (23)..(433): Homolog of NCBI NO: 13937195 NR Description: At1g78070/F28K19_28 [Arabidopsis thaliana]
  misc_feature (28)..(435): Homolog of NCBI NO: 9294540 NR Description: WD domain protein-like [Arabidopsis thaliana]
  misc_feature (165)..(435): Homolog of NCBI NO: 25405994 NR Description: protein F20N2.10 [imported] - Arabidopsis >gi|8778499|gb|AAF79507.1|AC002328_15 F20N2.10 [Arabidopsis
  misc_feature (24)..(165): Homolog of NCBI NO: 25405994 NR Description: protein F20N2.10 [imported] - Arabidopsis >gi|8778499|gb|AAF79507.1|AC002328_15 F20N2.10 [Arabidopsis
MSQRDGDLTGAHPEEGDRHAVRMDGSDDDELDQPTSKATEHITAMDVRKGKDMQGIPWNVMPTTRDKYRQSRLQGYANFENVPNSGRLSEKECMPAEKGQLYYEFQHSTRSVKPTIRHFQLRNLVWATTRHDVYLMSNFSVLHWSAMTCKKQEVINLQGHVTPCEKHHRNYYEGFYQTPVSTLAVKHNLLVTGGFHGEIICKFLDRQGVSYCCKTTNDDDGITNSLEIFEKPSGSLHFLASNNDCGLRDFDMEKFRICNHFHFAWPVNHTSLSPDGKLAAIVGDSPDGLLIDANSGKTVHKLHGHLDYSFASAWNPDGRTFATGNQDKTCRVWDVRNLSRSVVVLGGNIGAVRSIRYTSDGKFMAMTEPADFIHIFDVESGYSRKQELDFFGEIAGISFSPDTEALFVGVHDRFFNCCLLQFSRRRFYSYLDSTL

SEQ ID NO: 13110 - protein, 413 aa, Zea mays subsp. mays
  peptide (1)..(413): Ceres Seq. ID no. 12367898
  misc_feature (4)..(413): Homolog of NCBI NO: 18399975 NR Description: expressed protein; protein id: At3g13340.1, by cDNA: gi_15081810 [Arabidopsis thaliana] AT3g13340/MDC11_13 [Arabidopsis thaliana]
  misc_feature (4)..(413): Homolog of NCBI NO: 18405485 NR Description: expressed protein; protein id: At1g55680.1, by cDNA: gi_13430435, supported by cDNA: gi_17979110 [Arabidopsis >gi|13430436|gb|AAK25840.1|AF360130_1 unknown protein
  misc_feature (1)..(413): Homolog of NCBI NO: 18423837 NR Description: WD-repeat protein-like; protein id: At5g56190.1,
  misc_feature (1)..(413): Homolog of NCBI NO: 30696707 NR Description: WD-40 repeat protein family [Arabidopsis thaliana]
  misc_feature (1)..(413): Homolog of NCBI NO: 21536732 NR Description: WD-repeat protein-like [Arabidopsis thaliana]
  misc_feature (1)..(413): Homolog of NCBI NO: 9758639 NR Description: WD-repeat protein-like [Arabidopsis thaliana]
  misc_feature (1)..(411): Homolog of NCBI NO: 13937195 NR Description: At1g78070/F28K19_28 [Arabidopsis thaliana]
  misc_feature (6)..(413): Homolog of NCBI NO: 9294540 NR Description: WD domain protein-like [Arabidopsis thaliana]
  misc_feature (143)..(413): Homolog of NCBI NO: 25405994 NR Description: protein F20N2.10 [imported] - Arabidopsis >gi|8778499|gb|AAF79507.1|AC002328_15 F20N2.10 [Arabidopsis
  misc_feature (2)..(143): Homolog of NCBI NO: 25405994 NR Description: protein F20N2.10 [imported] - Arabidopsis >gi|8778499|gb|AAF79507.1|AC002328_15 F20N2.10 [Arabidopsis
MDGSDDDELDQPTSKATEHITAMDVRKGKDMQGIPWNVMPTTRDKYRQSRLQGYANFENVPNSGRLSEKECMPAEKGQLYYEFQHSTRSVKPTIRHFQLRNLVWATTRHDVYLMSNFSVLHWSAMTCKKQEVINLQGHVTPCEKHHRNYYEGFYQTPVSTLAVKHNLLVTGGFHGEIICKFLDRQGVSYCCKTTNDDDGITNSLEIFEKPSGSLHFLASNNDCGLRDFDMEKFRICNHFHFAWPVNHTSLSPDGKLAAIVGDSPDGLLIDANSGKTVHKLHGHLDYSFASAWNPDGRTFATGNQDKTCRVWDVRNLSRSVVVLGGNIGAVRSIRYTSDGKFMAMTEPADFIHIFDVESGYSRKQELDFFGEIAGISFSPDTEALFVGVHDRFFNCCLLQFSRRRFYSYLDSTL

SEQ ID NO: 13111 - DNA, 1506 bp, Zea mays subsp. mays
  misc_feature (1)..(1506): Ceres Seq. ID no. 12362128
  misc_feature: MA Experiment ID: 108527 Result: Down-regulated in Transcription
  misc_feature: MA Experiment 108527 PARAMETER Experiment Name: Zm_5mM_NO_P Parameter: Age (day) Value: 8
  misc_feature: MA Experiment 108527 PARAMETER Experiment Name: Zm_5mM_NO_P Parameter: Organism Value: Zea mays
  misc_feature: MA Experiment 108527 PARAMETER Experiment Name: Zm_5mM_NO_P Parameter: Plant Line Value: 35A19
  misc_feature: MA Experiment 108527 PARAMETER Experiment Name: Zm_5mM_NO_P Parameter: Timepoint (hr) Value: 6
  misc_feature: MA Experiment 108527 PARAMETER Experiment Name: Zm_5mM_NO_P Parameter: Tissue Value: Aerial
  misc_feature: MA Experiment 108527 PARAMETER Experiment Name: Zm_5mM_NO_P Parameter: Treatment Value: 5mM NO vs. No Treatment
  misc_feature: MA Experiment ID: 108544 Result: Up-regulated in Transcription
  misc_feature: MA Experiment ID: 20000535 Result: Down-regulated in Transcription
  misc_feature: MA Experiment 20000535 PARAMETER Experiment Name: Zm_Hybrid_Seed_Dev_P Parameter: DAP Value: 30 vs. 12
  misc_feature: MA Experiment 20000535 PARAMETER Experiment Name: Zm_Hybrid_Seed_Dev_P Parameter: Organism Value: Zea mays
  misc_feature: MA Experiment 20000535 PARAMETER Experiment Name: Zm_Hybrid_Seed_Dev_P Parameter: Plant Line Value: 35A19
  misc_feature: MA Experiment 20000535 PARAMETER Experiment Name: Zm_Hybrid_Seed_Dev_P Parameter: Tissue Value: Embryo vs. Unfert Floret
attaaatagaaagcgagcttcattcgtttttgattggcgtcgcagcaaccacctgtcaagtgtcaacactccagtccactacaatcatcgctgtaggagatggaggaggcggcggcggcggcggcggaggtgaggtatgggatagtcggggtggggatgatgggccgggagcacctccacaacctcgcccacctcgccacagaggtcgagcgggagcagtccgtccgggtgcgggtcaccggcctcgccgacccccaccaggagtcactccgccttggcctccagctcgccgctgagctcggcctcccgcctccccagacctttccaggtcaccgcgagctgctggacagcgggctctgtgacgccatcatcgtatcatccccaaacatgacccactacgagatactcatggacatcatccaccatcgtgaaccgcagcacatccttgtcgagaagcccctgtgcaccactgtgcaggactgcaagaaggtcattgaagctgctaaacagagaccagagatagttgtgcaagttggattagaatacaggtatatgccacccgttgctaagctgatagacatcgttaagagcggtacactaggacaagtcagaatggtggcaatacgcgaacaccgttttcctttccttgttaaggtaaacaactggaatagattcaattgtaacagtgggggaactctagtagagaagtgctgccacttctttgatctgatgatattgtttgcggctgcaaatccagttcgcgtgatggcttcaggagccattgatgttaaccataagaatgaagtgtatgatggacaggtaccagatattattgataatgcatatgtgatagtagaatttgataatggctcccgtggcatgcttgatctctgcatgtttgctgaaggaagtagaaacgagcaagaaatttgtgtggttggtgacattgggaagggcgaaacttttgttccagagagcattgtcaggtttggaaagagaacagaaggcagagatggagttgtaacaataatggcggaagatgaacggatcaagtatcaaggtcttcatcatggatccagctacttggagcacctcaatttcttgtctgctataagggctcaaggtgcatccggaccatctgtgaacttaagtgacggcctactatctgttgccgtcggtgtggctgggcaattatcaatcgagcagggccggtttgtaaccatggaagaggtcttaggtttgtagcctggtgataattcaggcatcctaatgtactgtaaaaccttttgtgtattattaggtatatgttcttaataatgctgcggactgacgagtttatgcaaagttaggataacattataacatgcatttcaaatagaggaatatgatgataatcttcaagcaaatgtcatggagtagcagggttatgttatctgcaagtgatatcttggacctcttggttgtgattaatggaccaatatctagaacatgtcatattatttcttg

SEQ ID NO: 13112 - protein, 381 aa, Zea mays subsp. mays
  peptide (1)..(381): Ceres Seq. ID no. 12362129
  misc_feature (159)..(269): Pfam Name: Oxidoreductase family, C-terminal alpha/beta domain Pfam Description: Oxidoreductase family, C-terminal alpha/beta
  misc_feature (75)..(377): Homolog of NCBI NO: 37573125 NR Description: organic cation transporter-like protein [Oryza
  misc_feature (5)..(75): Homolog of NCBI NO: 37573125 NR Description: organic cation transporter-like protein [Oryza
  misc_feature (12)..(379): Homolog of NCBI NO: 15236047 NR Description: putative protein; protein id: At4g17370.1
  misc_feature (7)..(373): Homolog of NCBI NO: 22987816 NR Description: hypothetical protein [Burkholderia fungorum]
  misc_feature (12)..(226): Homolog of NCBI NO: 23018126 NR Description: hypothetical protein [Thermobifida fusca]
  misc_feature (3)..(287): Homolog of NCBI NO: 29348881 NR Description: putative hydrogenase [Bacteroides VPI-5482] >gi|29340787|gb|AAO78578.1| putative hydrogenase
  misc_feature (41)..(229): Homolog of NCBI NO: 16080062 NR Description: similar to hypothetical proteins [Bacillus
  misc_feature (15)..(373): Homolog of NCBI NO: 40743395 NR Description: hypothetical protein AN5425.2 [Aspergillus
  misc_feature (11)..(226): Homolog of NCBI NO: 16264562 NR Description: putative oxidoreductase protein [Sinorhizobium
  misc_feature (11)..(226): Homolog of NCBI NO: 17936479 NR Description: oxidoreductase [Agrobacterium tumefaciens str.
MEEAAAAAAEVRYGIVGVGMMGREHLHNLAHLATEVEREQSVRVRVTGLADPHQESLRLGLQLAAELGLPPPQTFPGHRELLDSGLCDAIIVSSPNMTHYEILMDIIHHREPQHILVEKPLCTTVQDCKKVIEAAKQRPEIVVQVGLEYRYMPPVAKLIDIVKSGTLGQVRMVAIREHRFPFLVKVNNWNRFNCNSGGTLVEKCCHFFDLMILFAAANPVRVMASGAIDVNHKNEVYDGQVPDIIDNAYVIVEFDNGSRGMLDLCMFAEGSRNEQEICVVGDIGKGETFVPESIVRFGKRTEGRDGVVTIMAEDERIKYQGLHHGSSYLEHLNFLSAIRAQGASGPSVNLSDGLLSVAVGVAGQLSIEQGRFVTMEEVLGL

SEQ ID NO: 13113 - protein, 362 aa, Zea mays subsp. mays
  peptide (1)..(362): Ceres Seq. ID no. 12362130
  misc_feature (140)..(250): Pfam Name: Oxidoreductase family, C-terminal alpha/beta domain Pfam Description: Oxidoreductase family, C-terminal alpha/beta
  misc_feature (56)..(358): Homolog of NCBI NO: 37573125 NR Description: organic cation transporter-like protein [Oryza
  misc_feature (1)..(56): Homolog of NCBI NO: 37573125 NR Description: organic cation transporter-like protein [Oryza
  misc_feature (1)..(360): Homolog of NCBI NO: 15236047 NR Description: putative protein; protein id: At4g17370.1
  misc_feature (1)..(354): Homolog of NCBI NO: 22987816 NR Description: hypothetical protein [Burkholderia fungorum]
  misc_feature (1)..(207): Homolog of NCBI NO: 23018126 NR Description: hypothetical protein [Thermobifida fusca]
  misc_feature (1)..(268): Homolog of NCBI NO: 29348881 NR Description: putative hydrogenase [Bacteroides VPI-5482] >gi|29340787|gb|AAO78578.1| putative hydrogenase
  misc_feature (22)..(210): Homolog of NCBI NO: 16080062 NR Description: similar to hypothetical proteins [Bacillus
  misc_feature (1)..(354): Homolog of NCBI NO: 40743395 NR Description: hypothetical protein AN5425.2 [Aspergillus
  misc_feature (1)..(207): Homolog of NCBI NO: 16264562 NR Description: putative oxidoreductase protein [Sinorhizobium
  misc_feature (1)..(207): Homolog of NCBI NO: 17936479 NR Description: oxidoreductase [Agrobacterium tumefaciens str.
MMGREHLHNLAHLATEVEREQSVRVRVTGLADPHQESLRLGLQLAAELGLPPPQTFPGHRELLDSGLCDAIIVSSPNMTHYEILMDIIHHREPQHILVEKPLCTTVQDCKKVIEAAKQRPEIVVQVGLEYRYMPPVAKLIDIVKSGTLGQVRMVAIREHRFPFLVKVNNWNRFNCNSGGTLVEKCCHFFDLMILFAAANPVRVMASGAIDVNHKNEVYDGQVPDIIDNAYVIVEFDNGSRGMLDLCMFAEGSRNEQEICVVGDIGKGETFVPESIVRFGKRTEGRDGVVTIMAEDERIKYQGLHHGSSYLEHLNFLSAIRAQGASGPSVNLSDGLLSVAVGVAGQLSIEQGRFVTMEEVLGL

SEQ ID NO: 13114 - protein, 361 aa, Zea mays subsp. mays
  peptide (1)..(361): Ceres Seq. ID no. 12362131
  misc_feature (139)..(249): Pfam Name: Oxidoreductase family, C-terminal alpha/beta domain Pfam Description: Oxidoreductase family, C-terminal alpha/beta
  misc_feature (55)..(357): Homolog of NCBI NO: 37573125 NR Description: organic cation transporter-like protein [Oryza
  misc_feature (1)..(55): Homolog of NCBI NO: 37573125 NR Description: organic cation transporter-like protein [Oryza
  misc_feature (1)..(359): Homolog of NCBI NO: 15236047 NR Description: putative protein; protein id: At4g17370.1
  misc_feature (1)..(353): Homolog of NCBI NO: 22987816 NR Description: hypothetical protein [Burkholderia fungorum]
  misc_feature (1)..(206): Homolog of NCBI NO: 23018126 NR Description: hypothetical protein [Thermobifida fusca]
  misc_feature (1)..(267): Homolog of NCBI NO: 29348881 NR Description: putative hydrogenase [Bacteroides VPI-5482] >gi|29340787|gb|AAO78578.1| putative hydrogenase
  misc_feature (21)..(209): Homolog of NCBI NO: 16080062 NR Description: similar to hypothetical proteins [Bacillus
  misc_feature (1)..(353): Homolog of NCBI NO: 40743395 NR Description: hypothetical protein AN5425.2 [Aspergillus
  misc_feature (1)..(206): Homolog of NCBI NO: 16264562 NR Description: putative oxidoreductase protein [Sinorhizobium
  misc_feature (1)..(206): Homolog of NCBI NO: 17936479 NR Description: oxidoreductase [Agrobacterium tumefaciens str.
MGREHLHNLAHLATEVEREQSVRVRVTGLADPHQESLRLGLQLAAELGLPPPQTFPGHRELLDSGLCDAIIVSSPNMTHYEILMDIIHHREPQHILVEKPLCTTVQDCKKVIEAAKQRPEIVVQVGLEYRYMPPVAKLIDIVKSGTLGQVRMVAIREHRFPFLVKVNNWNRFNCNSGGTLVEKCCHFFDLMILFAAANPVRVMASGAIDVNHKNEVYDGQVPDIIDNAYVIVEFDNGSRGMLDLCMFAEGSRNEQEICVVGDIGKGETFVPESIVRFGKRTEGRDGVVTIMAEDERIKYQGLHHGSSYLEHLNFLSAIRAQGASGPSVNLSDGLLSVAVGVAGQLSIEQGRFVTMEEVLGL

SEQ ID NO: 13115 - DNA, 1158 bp, Zea mays subsp. mays
  misc_feature (1)..(1158): Ceres Seq. ID no. 12355511
  misc_feature: MA Experiment ID: 108504 Result: Up-regulated in Transcription
  misc_feature: MA Experiment 108504 PARAMETER Experiment Name: Zm_Drought_P Parameter: Age (day) Value: 8
  misc_feature: MA Experiment 108504 PARAMETER Experiment Name: Zm_Drought_P Parameter: Organism Value: Zea mays
  misc_feature: MA Experiment 108504 PARAMETER Experiment Name: Zm_Drought_P Parameter: Plant Line Value: 35A19
  misc_feature: MA Experiment 108504 PARAMETER Experiment Name: Zm_Drought_P Parameter: Timepoint (hr) Value: 12
  misc_feature: MA Experiment 108504 PARAMETER Experiment Name: Zm_Drought_P Parameter: Tissue Value: Aerial
  misc_feature: MA Experiment 108504 PARAMETER Experiment Name: Zm_Drought_P Parameter: Treatment Value: Drought vs. No Drought
  misc_feature: MA Experiment ID: 108522 Result: Up-regulated in Transcription
  misc_feature: MA Experiment 108522 PARAMETER Experiment Name: Zm_42deg_Heat_P Parameter: Age (day) Value: 8
  misc_feature: MA Experiment 108522 PARAMETER Experiment Name: Zm_42deg_Heat_P Parameter: Organism Value: Zea mays
  misc_feature: MA Experiment 108522 PARAMETER Experiment Name: Zm_42deg_Heat_P Parameter: Plant Line Value: 35A19
  misc_feature: MA Experiment 108522 PARAMETER Experiment Name: Zm_42deg_Heat_P Parameter: Temperature (deg C) Value: 42 vs. 22
  misc_feature: MA Experiment 108522 PARAMETER Experiment Name: Zm_42deg_Heat_P Parameter: Timepoint (hr) Value: 1
  misc_feature: MA Experiment 108522 PARAMETER Experiment Name: Zm_42deg_Heat_P Parameter: Tissue Value: Aerial
  misc_feature: MA Experiment ID: 108523 Result: Up-regulated in Transcription
  misc_feature: MA Experiment 108523 PARAMETER Experiment Name: Zm_42deg_Heat_P Parameter: Age (day) Value: 8
  misc_feature: MA Experiment 108523 PARAMETER Experiment Name: Zm_42deg_Heat_P Parameter: Organism Value: Zea mays
  misc_feature: MA Experiment 108523 PARAMETER Experiment Name: Zm_42deg_Heat_P Parameter: Plant Line Value: 35A19
  misc_feature: MA Experiment 108523 PARAMETER Experiment Name: Zm_42deg_Heat_P Parameter: Temperature (deg C) Value: 42 vs. 22
  misc_feature: MA Experiment 108523 PARAMETER Experiment Name: Zm_42deg_Heat_P Parameter: Timepoint (hr) Value: 6
  misc_feature: MA Experiment 108523 PARAMETER Experiment Name: Zm_42deg_Heat_P Parameter: Tissue Value: Aerial
  misc_feature: MA Experiment ID: 108542 Result: Up-regulated in Transcription
  misc_feature: MA Experiment 108542 PARAMETER Experiment Name: Zm_150mM_NaCl_P Parameter: Age (day) Value: 8
  misc_feature: MA Experiment 108542 PARAMETER Experiment Name: Zm_150mM_NaCl_P Parameter: Organism Value: Zea mays
  misc_feature: MA Experiment 108542 PARAMETER Experiment Name: Zm_150mM_NaCl_P Parameter: Plant Line Value: 35A19
  misc_feature: MA Experiment 108542 PARAMETER Experiment Name: Zm_150mM_NaCl_P Parameter: Timepoint (hr) Value: 6
  misc_feature: MA Experiment 108542 PARAMETER Experiment Name: Zm_150mM_NaCl_P Parameter: Tissue Value: Aerial
  misc_feature: MA Experiment 108542 PARAMETER Experiment Name: Zm_150mM_NaCl_P Parameter: Treatment Value: 150mM NaCl vs. No Treatment
  misc_feature: MA Experiment ID: 108556 Result: Up-regulated in Transcription
  misc_feature: MA Experiment 108556 PARAMETER Experiment Name: Zm_Drought_P Parameter: Age (day) Value: 9
  misc_feature: MA Experiment 108556 PARAMETER Experiment Name: Zm_Drought_P Parameter: Organism Value: Zea mays
  misc_feature: MA Experiment 108556 PARAMETER Experiment Name: Zm_Drought_P Parameter: Plant Line Value: 35A19
  misc_feature: MA Experiment 108556 PARAMETER Experiment Name: Zm_Drought_P Parameter: Timepoint (hr) Value: 24
  misc_feature: MA Experiment 108556 PARAMETER Experiment Name: Zm_Drought_P Parameter: Tissue Value: Aerial
  misc_feature: MA Experiment 108556 PARAMETER Experiment Name: Zm_Drought_P Parameter: Treatment Value: Drought vs. No Drought
  misc_feature: MA Experiment ID: 108597 Result: Up-regulated in Transcription
  misc_feature: MA Experiment 108597 PARAMETER Experiment Name: Zm_100uM_ABA_P Parameter: Age (day) Value: 9
  misc_feature: MA Experiment 108597 PARAMETER Experiment Name: Zm_100uM_ABA_P Parameter: Organism Value: Zea mays
  misc_feature: MA Experiment 108597 PARAMETER Experiment Name: Zm_100uM_ABA_P Parameter: Plant Line Value: 35A19
  misc_feature: MA Experiment 108597 PARAMETER Experiment Name: Zm_100uM_ABA_P Parameter: Timepoint (hr) Value: 24
  misc_feature: MA Experiment 108597 PARAMETER Experiment Name: Zm_100uM_ABA_P Parameter: Tissue Value: Aerial
  misc_feature: MA Experiment 108597 PARAMETER Experiment Name: Zm_100uM_ABA_P Parameter: Treatment Value: 100uM ABA vs. No Treatment
  misc_feature: MA Experiment ID: 108689 Result: Up-regulated in Transcription
  misc_feature: MA Experiment 108689 PARAMETER Experiment Name: Zm_Drought_Roots_P Parameter: Age (day) Value: 9
  misc_feature: MA Experiment 108689 PARAMETER Experiment Name: Zm_Drought_Roots_P Parameter: Organism Value: Zea mays
  misc_feature: MA Experiment 108689 PARAMETER Experiment Name: Zm_Drought_Roots_P Parameter: Plant Line Value: 35A19
  misc_feature: MA Experiment 108689 PARAMETER Experiment Name: Zm_Drought_Roots_P Parameter: Timepoint (hr) Value: 24
  misc_feature: MA Experiment 108689 PARAMETER Experiment Name: Zm_Drought_Roots_P Parameter: Tissue Value: Roots
  misc_feature: MA Experiment 108689 PARAMETER Experiment Name: Zm_Drought_Roots_P Parameter: Treatment Value: Drought vs. No Drought
  misc_feature: MA Experiment ID: 20000477 Result: Up-regulated in Transcription
  misc_feature: MA Experiment 20000477 PARAMETER Experiment Name: Zm_5mM_SA_P Parameter: Age (day) Value: 10
  misc_feature: MA Experiment 20000477 PARAMETER Experiment Name: Zm_5mM_SA_P Parameter: Organism Value: Zea mays
  misc_feature: MA Experiment 20000477 PARAMETER Experiment Name: Zm_5mM_SA_P Parameter: Plant Line Value: 35A19
  misc_feature: MA Experiment 20000477 PARAMETER Experiment Name: Zm_5mM_SA_P Parameter: Timepoint (hr) Value: 48
  misc_feature: MA Experiment 20000477 PARAMETER Experiment Name: Zm_5mM_SA_P Parameter: Tissue Value: Aerial
  misc_feature: MA Experiment 20000477 PARAMETER Experiment Name: Zm_5mM_SA_P Parameter: Treatment Value: 5mM SA vs. No Treatment
  misc_feature: MA Experiment ID: 20000478 Result: Up-regulated in Transcription
  misc_feature: MA Experiment 20000478 PARAMETER Experiment Name: Zm_5mM_SA_P Parameter: Age (day) Value: 11
  misc_feature: MA Experiment 20000478 PARAMETER Experiment Name: Zm_5mM_SA_P Parameter: Organism Value: Zea mays
  misc_feature: MA Experiment 20000478 PARAMETER Experiment Name: Zm_5mM_SA_P Parameter: Plant Line Value: 35A19
  misc_feature: MA Experiment 20000478 PARAMETER Experiment Name: Zm_5mM_SA_P Parameter: Timepoint (hr) Value: 72
  misc_feature: MA Experiment 20000478 PARAMETER Experiment Name: Zm_5mM_SA_P Parameter: Tissue Value: Aerial
  misc_feature: MA Experiment 20000478 PARAMETER Experiment Name: Zm_5mM_SA_P Parameter: Treatment Value: 5mM SA vs. No Treatment
  misc_feature: MA Experiment ID: 20000479 Result: Up-regulated in Transcription
  misc_feature: MA Experiment 20000479 PARAMETER Experiment Name: Zm_Drought_P Parameter: Age (day) Value: 10
  misc_feature: MA Experiment 20000479 PARAMETER Experiment Name: Zm_Drought_P Parameter: Organism Value: Zea mays
  misc_feature: MA Experiment 20000479 PARAMETER Experiment Name: Zm_Drought_P Parameter: Plant Line Value: 35A19
  misc_feature: MA Experiment 20000479 PARAMETER Experiment Name: Zm_Drought_P Parameter: Timepoint (hr) Value: 48
  misc_feature: MA Experiment 20000479 PARAMETER Experiment Name: Zm_Drought_P Parameter: Tissue Value: Aerial
  misc_feature: MA Experiment 20000479 PARAMETER Experiment Name: Zm_Drought_P Parameter: Treatment Value: Drought vs. No Drought
  misc_feature: MA Experiment ID: 20000480 Result: Up-regulated in Transcription
  misc_feature: MA Experiment 20000480 PARAMETER Experiment Name: Zm_Drought_P Parameter: Age (day) Value: 11
  misc_feature: MA Experiment 20000480 PARAMETER Experiment Name: Zm_Drought_P Parameter: Organism Value: Zea mays
  misc_feature: MA Experiment 20000480 PARAMETER Experiment Name: Zm_Drought_P Parameter: Plant Line Value: 35A19
  misc_feature: MA Experiment 20000480 PARAMETER Experiment Name: Zm_Drought_P Parameter: Timepoint (hr) Value: 72
  misc_feature: MA Experiment 20000480 PARAMETER Experiment Name: Zm_Drought_P Parameter: Tissue Value: Aerial
  misc_feature: MA Experiment 20000480 PARAMETER Experiment Name: Zm_Drought_P Parameter: Treatment Value: Drought vs. No Drought
  misc_feature: MA Experiment ID: 20000534 Result: Up-regulated in Transcription
  misc_feature: MA Experiment 20000534 PARAMETER Experiment Name: Zm_Hybrid_Pollen_P Parameter: Age (day) Value: 8
  misc_feature: MA Experiment 20000534 PARAMETER Experiment Name: Zm_Hybrid_Pollen_P Parameter: Organism Value: Zea mays
  misc_feature: MA Experiment 20000534 PARAMETER Experiment Name: Zm_Hybrid_Pollen_P Parameter: Plant Line Value: 35A19
  misc_feature: MA Experiment 20000534 PARAMETER Experiment Name: Zm_Hybrid_Pollen_P Parameter: Tissue Value: Pollen vs. Aerial
agggactcgcggttcgtggcggccctggccagagtctgcgcccgctcctgcccccgccccgggccaggccaccctcgcctcctcgcgcctataaagtgcgggcgtacggcgtacccgattgccccaagccgcaacctcaaccaccttcccaaatctcagtagtcgcctctcgtcgtcttcgtctagccccggcccgttccaaaacctccgtagccgccgccgccaccccggcgaccgaagatgatctccccggacgcagcccgcaacgtagtcggcatcatcggcaatgtcatctccttcggcctcttcctgtccccagtgctgacgttctggcggatctacaaggccaaggacgtggaggagttcaagccggacccttacctggcgacgctgctcaactgcatgctctgggtgttctatggcatccccgtcgtccaccccaacagcattctcgtcgtcaccatcaacggcatcggcctcgtcatcgaggccgtctacctcactatcttcttcctctattccgacagccagaagcgcaagaaggcgttcgcgatcctggccgtggagattctgttcatggtcgccgtggtgctcggtgtgatcctcggcgcgcacactcacgagaaacgttccatgatcgtcggcatcctctgcgtcatcttcggctcgatgatgtacgcctcaccactcactatcatgagtcgagtgatcaagaccaagagcgttgagtacatgcccttcctcctgtcgctggtgagcttcctcaacggctgctgctggacggcctacgcgctcatccgcttcgacctctacgtcacgatcccgaacgccctgggcgcattcttcggcctcgtccagctgatcctctacttctgctactacaagtcgacccccaagaaggagaagaacgtggagctgcccaccgtctccagcaacgtcggcggcggcaacgtcaccgtcagcgttgagcgatagatgatgtagctgccgccgcccgtcgagaacgaactcgacgagacgtgctttacccacaagtagttttggccttgtctaattgctcttctcggatgatcgtttaagtgagtgttagttagttttgccctgcgtgtgatgtcaggaacaattaatatatccatgtggctgtgtttgccattctag

SEQ ID NO: 13116 - protein, 244 aa, Zea mays subsp. mays; identical to SEQ ID NO: 3895
  peptide (1)..(244): Ceres Seq. ID no. 12355512
  misc_feature (9)..(98): Pfam Name: MtN3/saliva family Pfam Description: MtN3/saliva family
  misc_feature (1)..(225): Homolog of NCBI NO: 18405611 NR Description: Expressed protein; protein id: At3g28007.1, by cDNA: 22745., supported by cDNA: gi_16226221 [Arabidopsis >gi|16226222|gb|AAL16107.1|AF428275_1 unknown protein
  misc_feature (1)..(225): Homolog of NCBI NO: 21592355 NR Description: contains similarity to nodulin MtN3 protein
  misc_feature (8)..(219): Homolog of NCBI NO: 18413388 NR Description: putative protein; protein id: At4g10850.1, by cDNA: 33161. [Arabidopsis thaliana] contains similarity to Medicago truncatula MtN3 (GB:Y08726)
  misc_feature (1)..(225): Homolog of NCBI NO: 18421965 NR Description: putative protein; protein id: At5g40260.1, by cDNA: 11922. [Arabidopsis thaliana] contains similarity to MtN3 [Arabidopsis thaliana]
  misc_feature (1)..(244): Homolog of NCBI NO: 34912462 NR Description: MtN3-like protein [Oryza sativa (japonica
  misc_feature (1)..(244): Homolog of NCBI NO: 34912454 NR Description: P0681B11.31 [Oryza sativa (japonica
  misc_feature (1)..(194): Homolog of NCBI NO: 10177463 NR Description: contains similarity to MtN3
  misc_feature (39)..(217): Homolog of NCBI NO: 431154 NR Description: ORF [Lilium longiflorum]
  misc_feature (8)..(243): Homolog of NCBI NO: 15219732 NR Description: hypothetical protein; protein id: At1g66770.1 thaliana] >gi|12597757|gb|AAG60070.1|AC013288_4 hypothetical
  misc_feature (39)..(225): Homolog of NCBI NO: 11994120 NR Description: contains similarity to nodulin MtN3

SEQ ID NO: 13117 - protein, 241 aa, Zea mays subsp. mays
  peptide (1)..(241): Ceres Seq. ID no. 12355513
GLAVRGGPGQSLRPLLPPPRARPPSPPRAYKVRAYGVPDCPKPQPQPPSQISVVASRRLRLAPARSKTSVAAAATPATEDDLPGRSPQRSRHHRQCHLLRPLPVPSADVLADLQGQGRGGVQAGPLPGDAAQLHALGVLWHPRRPPQQHSRRHHQRHRPRHRGRLPHYLLPLFRQPEAQEGVRDPGRGDSVHGRRGARCDPRRAHSRETFHDRRHPLRHLRLDDVRLTTHYHESSDQDQER

SEQ ID NO: 13118 - protein, 190 aa, Zea mays subsp. mays; identical to SEQ ID NO: 3897
  peptide (1)..(190): Ceres Seq. ID no. 12355514
  misc_feature (1)..(190): Homolog of NCBI NO: 34912462 NR Description: MtN3-like protein [Oryza sativa (japonica
  misc_feature (1)..(190): Homolog of NCBI NO: 34912454 NR Description: P0681B11.31 [Oryza sativa (japonica
  misc_feature (1)..(171): Homolog of NCBI NO: 18405611 NR Description: Expressed protein; protein id: At3g28007.1, by cDNA: 22745., supported by cDNA: gi_16226221 [Arabidopsis >gi|16226222|gb|AAL16107.1|AF428275_1 unknown protein
  misc_feature (1)..(171): Homolog of NCBI NO: 21592355 NR Description: contains similarity to nodulin MtN3 protein
  misc_feature (1)..(165): Homolog of NCBI NO: 18413388 NR Description: putative protein; protein id: At4g10850.1, by cDNA: 33161. [Arabidopsis thaliana] contains similarity to Medicago truncatula MtN3 (GB:Y08726)
  misc_feature (1)..(171): Homolog of NCBI NO: 18421965 NR Description: putative protein; protein id: At5g40260.1, by cDNA: 11922. [Arabidopsis thaliana] contains similarity to MtN3 [Arabidopsis thaliana]
  misc_feature (1)..(140): Homolog of NCBI NO: 10177463 NR Description: contains similarity to MtN3
  misc_feature (1)..(163): Homolog of NCBI NO: 431154 NR Description: ORF [Lilium longiflorum]
  misc_feature (1)..(189): Homolog of NCBI NO: 15219732 NR Description: hypothetical protein; protein id: At1g66770.1 thaliana] >gi|12597757|gb|AAG60070.1|AC013288_4 hypothetical
  misc_feature (1)..(171): Homolog of NCBI NO: 11994120 NR Description: contains similarity to nodulin MtN3

SEQ ID NO: 13119 - DNA, 1282 bp, Zea mays subsp. mays
  misc_feature (1)..(1282): Ceres Seq. ID no. 12411405
  misc_feature: MA Experiment ID: 108543 Result: Up-regulated in Transcription
atctccgcgcattttatatgcaggcttgcgcctgtcacttctcccctgtccttgctccccctcgatcccgcatcagtgcgtcacattcaccgggaatggcaacgctcaaggtcccagccactgttcctcccgtcgccgatgactgcgaccagctgcgcaaagcattccaagggtggggcacgaacgaggcgctcatcatctccatcctcggccaccgcgacgccgcgcagcgccgcgccatccgccgcgcttacgccgaggcctacggcgaggagctcctccgctccatcacggacgagatctccggcgacttcgagagggccgtgatcctgtggacgctggacccagcggagcgcgacgcggtgctggccaacgaggcggcgcggaagtggaagcccgggaaccgtgtgctcgtcgagatcgcctgcacgcgcacctccgcgcagatcttcgcgaccaggcaggcttatcacgagcggttcaagcgctcgcttgaggaagacatcgctgcgcacgtcactggggacttccgcaagctattggtgccacttgtaagtacttaccgctatgatggaccagaggtcaacacaaggttggcacactcagaagccaaactacttcatgagaagatccatcacaaggcttacagtgatgatgagatcatcagaatcctcaccactaggagcaaacctcagctgattgctacattcaatcattacaatgatgcatttggccaccgaatcaacaaggatctgaaggctgacccccaggacgagtacctcagaacgctgcgggcgatcatccggtgcttcagttgccctgacaggtactttgagaaggtggctaggcaggccatagcggggctaggcacagatgagaactccctgaccagggtcatcaccacccgcgctgaggtggacctcaaactgattaaggaggcgtaccagaagaggaacagcgtgccgctggagcgggccgtcgcgggggacacctccggcgactacgagagcatgctcctcgcgctcctggggcaggagtgatgagccgtactggtgcgctggtgcctttctgaccggcgccgtggtgtttgttcgtgatcgtaataaacctgattgcctagctgtacgtgaggctgtttcttcggtcctggtactgtcgctgcagcatgcatagcagtggaccagtggtgataaataagttactgtgctttcgacgaatgaaccctttttttgtgtctaagttgtggaacctcgagaaagtttttgtgtctaaggctgtcttt

SEQ ID NO: 13120 - protein, 345 aa, Zea mays subsp. mays
  peptide (1)..(345): Ceres Seq. ID no. 12411406
  misc_feature (199)..(266): Pfam Name: Annexin Pfam Description: Annexin
  misc_feature (32)..(345): Homolog of NCBI NO: 6272285 NR Description: annexin p33 [Zea mays]
  misc_feature (32)..(345): Homolog of NCBI NO: 7441506 NR Description: annexin P33 - maize
  misc_feature (32)..(345): Homolog of NCBI NO: 7441507 NR Description: annexin P35 - maize >gi|1370603|emb|CAA66901.1|
  misc_feature (32)..(343): Homolog of NCBI NO: 7484723 NR Description: fiber annexin - upland cotton
  misc_feature (33)..(343): Homolog of NCBI NO: 15214410 NR Description: annexin [Gossypium hirsutum]
  misc_feature (33)..(343): Homolog of NCBI NO: 33357398 NR Description: Chain A, Annexin Gh1 From Cotton
  misc_feature (32)..(343): Homolog of NCBI NO: 3928134 NR Description: annexin P38 [Capsicum annuum]
  misc_feature (32)..(344): Homolog of NCBI NO: 2459926 NR Description: annexin [Lavatera thuringiaca]
  misc_feature (34)..(343): Homolog of NCBI NO: 7441511 NR Description: annexin 2 - upland cotton (fragment)
  misc_feature (32)..(343): Homolog of NCBI NO: 4580920 NR Description: vacuole-associated annexin VCaB42 [Nicotiana
LRAFYMQACACHFSPVLAPPRSRISASHSPGMATLKVPATVPPVADDCDQLRKAFQGWGTNEALIISILGHRDAAQRRAIRRAYAEAYGEELLRSITDEISGDFERAVILWTLDPAERDAVLANEAARKWKPGNRVLVEIACTRTSAQIFATRQAYHERFKRSLEEDIAAHVTGDFRKLLVPLVSTYRYDGPEVNTRLAHSEAKLLHEKIHHKAYSDDEIIRILTTRSKPQLIATFNHYNDAFGHRINKDLKADPQDEYLRTLRAIIRCFSCPDRYFEKVARQAIAGLGTDENSLTRVITTRAEVDLKLIKEAYQKRNSVPLERAVAGDTSGDYESMLLALLGQE

SEQ ID NO: 13121 - protein, 340 aa, Zea mays subsp. mays
  peptide (1)..(340): Ceres Seq. ID no. 12411407
  misc_feature (194)..(261): Pfam Name: Annexin Pfam Description: Annexin
  misc_feature (27)..(340): Homolog of NCBI NO: 6272285 NR Description: annexin p33 [Zea mays]
  misc_feature (27)..(340): Homolog of NCBI NO: 7441506 NR Description: annexin P33 - maize
  misc_feature (27)..(340): Homolog of NCBI NO: 7441507 NR Description: annexin P35 - maize >gi|1370603|emb|CAA66901.1|
  misc_feature (27)..(338): Homolog of NCBI NO: 7484723 NR Description: fiber annexin - upland cotton
  misc_feature (28)..(338): Homolog of NCBI NO: 15214410 NR Description: annexin [Gossypium hirsutum]
  misc_feature (28)..(338): Homolog of NCBI NO: 33357398 NR Description: Chain A, Annexin Gh1 From Cotton
  misc_feature (27)..(338): Homolog of NCBI NO: 3928134 NR Description: annexin P38 [Capsicum annuum]
  misc_feature (27)..(339): Homolog of NCBI NO: 2459926 NR Description: annexin [Lavatera thuringiaca]
  misc_feature (29)..(338): Homolog of NCBI NO: 7441511 NR Description: annexin 2 - upland cotton (fragment)
  misc_feature (27)..(338): Homolog of NCBI NO: 4580920 NR Description: vacuole-associated annexin VCaB42 [Nicotiana
MQACACHFSPVLAPPRSRISASHSPGMATLKVPATVPPVADDCDQLRKAFQGWGTNEALIISILGHRDAAQRRAIRRAYAEAYGEELLRSITDEISGDFERAVILWTLDPAERDAVLANEAARKWKPGNRVLVEIACTRTSAQIFATRQAYHERFKRSLEEDIAAHVTGDFRKLLVPLVSTYRYDGPEVNTRLAHSEAKLLHEKIHHKAYSDDEIIRILTTRSKPQLIATFNHYNDAFGHRINKDLKADPQDEYLRTLRAIIRCFSCPDRYFEKVARQAIAGLGTDENSLTRVITTRAEVDLKLIKEAYQKRNSVPLERAVAGDTSGDYESMLLALLGQE

SEQ ID NO: 13122 - protein, 314 aa, Zea mays subsp. mays
  peptide (1)..(314): Ceres Seq. ID no. 12411408
  misc_feature (168)..(235): Pfam Name: Annexin Pfam Description: Annexin
  misc_feature (1)..(314): Homolog of NCBI NO: 6272285 NR Description: annexin p33 [Zea mays]
  misc_feature (1)..(314): Homolog of NCBI NO: 7441506 NR Description: annexin P33 - maize
  misc_feature (1)..(314): Homolog of NCBI NO: 7441507 NR Description: annexin P35 - maize >gi|1370603|emb|CAA66901.1|
  misc_feature (1)..(312): Homolog of NCBI NO: 7484723 NR Description: fiber annexin - upland cotton
  misc_feature (2)..(312): Homolog of NCBI NO: 15214410 NR Description: annexin [Gossypium hirsutum]
  misc_feature (2)..(312): Homolog of NCBI NO: 33357398 NR Description: Chain A, Annexin Gh1 From Cotton
  misc_feature (1)..(312): Homolog of NCBI NO: 3928134 NR Description: annexin P38 [Capsicum annuum]
  misc_feature (1)..(313): Homolog of NCBI NO: 2459926 NR Description: annexin [Lavatera thuringiaca]
  misc_feature (3)..(312): Homolog of NCBI NO: 7441511 NR Description: annexin 2 - upland cotton (fragment)
  misc_feature (1)..(312): Homolog of NCBI NO: 4580920 NR Description: vacuole-associated annexin VCaB42 [Nicotiana
MATLKVPATVPPVADDCDQLRKAFQGWGTNEALIISILGHRDAAQRRAIRRAYAEAYGEELLRSITDEISGDFERAVILWTLDPAERDAVLANEAARKWKPGNRVLVEIACTRTSAQIFATRQAYHERFKRSLEEDIAAHVTGDFRKLLVPLVSTYRYDGPEVNTRLAHSEAKLLHEKIHHKAYSDDEIIRILTTRSKPQLIATFNHYNDAFGHRINKDLKADPQDEYLRTLRAIIRCFSCPDRYFEKVARQAIAGLGTDENSLTRVITTRAEVDLKLIKEAYQKRNSVPLERAVAGDTSGDYESMLLALLGQE

SEQ ID NO: 13123 - DNA, 1076 bp, Zea mays subsp. mays; identical to SEQ ID NO: 4438
  misc_feature (1)..(1076): Ceres Seq. ID no. 12337188
  misc_feature: MA Experiment ID: 108535 Result: Up-regulated in Transcription
  misc_feature: MA Experiment 108535 PARAMETER Experiment Name: Zm_Meristem_P Parameter: Age (day) Value: 8
  misc_feature: MA Experiment 108535 PARAMETER Experiment Name: Zm_Meristem_P Parameter: Organism Value: Zea mays
  misc_feature: MA Experiment 108535 PARAMETER Experiment Name: Zm_Meristem_P Parameter: Plant Line Value: 35A19
  misc_feature: MA Experiment 108535 PARAMETER Experiment Name: Zm_Meristem_P Parameter: Tissue Value: Root Meristem vs. Above Root Meristem
  misc_feature: MA Experiment ID: 108544 Result: Down-regulated in Transcription
  misc_feature: MA Experiment ID: 108556 Result: Down-regulated in Transcription
  misc_feature: MA Experiment 108556 PARAMETER Experiment Name: Zm_Drought_P Parameter: Age (day) Value: 9
  misc_feature: MA Experiment 108556 PARAMETER Experiment Name: Zm_Drought_P Parameter: Organism Value: Zea mays
  misc_feature: MA Experiment 108556 PARAMETER Experiment Name: Zm_Drought_P Parameter: Plant Line Value: 35A19
  misc_feature: MA Experiment 108556 PARAMETER Experiment Name: Zm_Drought_P Parameter: Timepoint (hr) Value: 24
  misc_feature: MA Experiment 108556 PARAMETER Experiment Name: Zm_Drought_P Parameter: Tissue Value: Aerial
  misc_feature: MA Experiment 108556 PARAMETER Experiment Name: Zm_Drought_P Parameter: Treatment Value: Drought vs. No Drought
  misc_feature: MA Experiment ID: 20000488 Result: Up-regulated in Transcription
  misc_feature: MA Experiment 20000488 PARAMETER Experiment Name: Zm_50mM_NH4NO3_L_to_H_P Parameter: Organism Value: Zea mays
  misc_feature: MA Experiment 20000488 PARAMETER Experiment Name: Zm_50mM_NH4NO3_L_to_H_P Parameter: Timepoint (hr) Value: 8
  misc_feature: MA Experiment 20000488 PARAMETER Experiment Name: Zm_50mM_NH4NO3_L_to_H_P Parameter: Tissue Value: Leaves
  misc_feature: MA Experiment 20000488 PARAMETER Experiment Name: Zm_50mM_NH4NO3_L_to_H_P Parameter: Treatment Value: 50mM NH4NO3 vs. 100mM Mannitol
  misc_feature: MA Experiment ID: 20000492 Result: Up-regulated in Transcription
  misc_feature: MA Experiment 20000492 PARAMETER Experiment Name: Zm_Hybrid_Seed_Dev_P Parameter: DAP Value: 12
  misc_feature: MA Experiment 20000492 PARAMETER Experiment Name: Zm_Hybrid_Seed_Dev_P Parameter: Organism Value: Zea mays
  misc_feature: MA Experiment 20000492 PARAMETER Experiment Name: Zm_Hybrid_Seed_Dev_P Parameter: Plant Line Value: 35A19
  misc_feature: MA Experiment 20000492 PARAMETER Experiment Name: Zm_Hybrid_Seed_Dev_P Parameter: Tissue Value: Fert Kernel vs. Unfert Floret
  misc_feature: MA Experiment ID: 20000535 Result: Up-regulated in Transcription
  misc_feature: MA Experiment 20000535 PARAMETER Experiment Name: Zm_Hybrid_Seed_Dev_P Parameter: DAP Value: 30 vs. 12
  misc_feature: MA Experiment 20000535 PARAMETER Experiment Name: Zm_Hybrid_Seed_Dev_P Parameter: Organism Value: Zea mays
  misc_feature: MA Experiment 20000535 PARAMETER Experiment Name: Zm_Hybrid_Seed_Dev_P Parameter: Plant Line Value: 35A19
  misc_feature: MA Experiment 20000535 PARAMETER Experiment Name: Zm_Hybrid_Seed_Dev_P Parameter: Tissue Value: Embryo vs. Unfert Floret

SEQ ID NO: 13124 - protein, 296 aa, Zea mays subsp. mays; identical to SEQ ID NO: 4439
  peptide (1)..(296): Ceres Seq. ID no. 12337189
  misc_feature (98)..(293): Pfam Name: Translin family Pfam Description: Translin family
  misc_feature (6)..(296): Homolog of NCBI NO: 37534782 NR Description: translin-like protein [Oryza sativa (japonica
  misc_feature (79)..(227): Homolog of NCBI NO: 25408524 NR Description: translin-like protein [imported] - Arabidopsis
  misc_feature (211)..(294): Homolog of NCBI NO: 25408524 NR Description: translin-like protein [imported] - Arabidopsis
  misc_feature (79)..(294): Homolog of NCBI NO: 18404301 NR Description: translin-like protein; protein id: At2g37020.1, by cDNA: gi_14596008, supported by cDNA: gi_17978800 [Arabidopsis
  misc_feature (75)..(293): Homolog of NCBI NO: 31213187 NR Description: ENSANGP00000021806 [Anopheles gambiae]
  misc_feature (87)..(293): Homolog of NCBI NO: 20129859 NR Description: CG11761-PA [Drosophila melanogaster]
  misc_feature (82)..(293): Homolog of NCBI NO: 7648677 NR Description: translin [Xenopus laevis]
  misc_feature (83)..(293): Homolog of NCBI NO: 6136058 NR Description: Translin >gi|1770301|emb|CAA64470.1| Translin
  misc_feature (76)..(292): Homolog of NCBI NO: 21730459 NR Description: Chain A, Crystal Structure Of Mouse TestisBRAIN
  misc_feature (100)..(292): Homolog of NCBI NO: 6755899 NR Description: translin; testis/brain-RNA-binding protein [Mus >gi|6136061|sp|Q62348|TSN_MOUSE Translin translin [Mus musculus] >gi|7331148|gb|AAF60295.1|AF234179_1

SEQ ID NO: 13125 - protein, 291 aa, Zea mays subsp. mays; identical to SEQ ID NO: 4440
  peptide (1)..(291): Ceres Seq. ID no. 12337190
  misc_feature (93)..(288): Pfam Name: Translin family Pfam Description: Translin family
  misc_feature (1)..(291): Homolog of NCBI NO: 37534782 NR Description: translin-like protein [Oryza sativa (japonica
  misc_feature (74)..(222): Homolog of NCBI NO: 25408524 NR Description: translin-like protein [imported] - Arabidopsis
  misc_feature (206)..(289): Homolog of NCBI NO: 25408524 NR Description: translin-like protein [imported] - Arabidopsis
  misc_feature (74)..(289): Homolog of NCBI NO: 18404301 NR Description: translin-like protein; protein id: At2g37020.1, by cDNA: gi_14596008, supported by cDNA: gi_17978800 [Arabidopsis
  misc_feature (70)..(288): Homolog of NCBI NO: 31213187 NR Description: ENSANGP00000021806 [Anopheles gambiae]
  misc_feature (82)..(288): Homolog of NCBI NO: 20129859 NR Description: CG11761-PA [Drosophila melanogaster]
  misc_feature (77)..(288): Homolog of NCBI NO: 7648677 NR Description: translin [Xenopus laevis]
  misc_feature (78)..(288): Homolog of NCBI NO: 6136058 NR Description: Translin >gi|1770301|emb|CAA64470.1| Translin
  misc_feature (71)..(287): Homolog of NCBI NO: 21730459 NR Description: Chain A, Crystal Structure Of Mouse TestisBRAIN
  misc_feature (95)..(287): Homolog of NCBI NO: 6755899 NR Description: translin; testis/brain-RNA-binding protein [Mus >gi|6136061|sp|Q62348|TSN_MOUSE Translin translin [Mus musculus] >gi|7331148|gb|AAF60295.1|AF234179_1

SEQ ID NO: 13126 - protein, 214 aa, Zea mays subsp. mays; identical to SEQ ID NO: 4441
  peptide (1)..(214): Ceres Seq. ID no. 12337191
  misc_feature (16)..(211): Pfam Name: Translin family Pfam Description: Translin family
  misc_feature (1)..(214): Homolog of NCBI NO: 37534782 NR Description: translin-like protein [Oryza sativa (japonica
  misc_feature (1)..(145): Homolog of NCBI NO: 25408524 NR Description: translin-like protein [imported] - Arabidopsis
  misc_feature (129)..(212): Homolog of NCBI NO: 25408524 NR Description: translin-like protein [imported] - Arabidopsis
  misc_feature (1)..(212): Homolog of NCBI NO: 18404301 NR Description: translin-like protein; protein id: At2g37020.1, by cDNA: gi_14596008, supported by cDNA: gi_17978800 [Arabidopsis
  misc_feature (1)..(211): Homolog of NCBI NO: 31213187 NR Description: ENSANGP00000021806 [Anopheles gambiae]
  misc_feature (5)..(211): Homolog of NCBI NO: 20129859 NR Description: CG11761-PA [Drosophila melanogaster]
  misc_feature (1)..(211): Homolog of NCBI NO: 7648677 NR Description: translin [Xenopus laevis]
  misc_feature (1)..(211): Homolog of NCBI NO: 6136058 NR Description: Translin >gi|1770301|emb|CAA64470.1| Translin
  misc_feature (1)..(210): Homolog of NCBI NO: 21730459 NR Description: Chain A, Crystal Structure Of Mouse TestisBRAIN
  misc_feature (18)..(210): Homolog of NCBI NO: 6755899 NR Description: translin; testis/brain-RNA-binding protein [Mus >gi|6136061|sp|Q62348|TSN_MOUSE Translin translin [Mus musculus] >gi|7331148|gb|AAF60295.1|AF234179_1

SEQ ID NO: 13127 - DNA, 1449 bp, Zea mays subsp. mays
  misc_feature (1)..(1449): Ceres Seq. ID no. 12355833
  misc_feature: MA Experiment ID: 20000492 Result: Down-regulated in Transcription
  misc_feature: MA Experiment 20000492 PARAMETER Experiment Name: Zm_Hybrid_Seed_Dev_P Parameter: DAP Value: 12
  misc_feature: MA Experiment 20000492 PARAMETER Experiment Name: Zm_Hybrid_Seed_Dev_P Parameter: Organism Value: Zea mays
  misc_feature: MA Experiment 20000492 PARAMETER Experiment Name: Zm_Hybrid_Seed_Dev_P Parameter: Plant Line Value: 35A19
  misc_feature: MA Experiment 20000492 PARAMETER Experiment Name: Zm_Hybrid_Seed_Dev_P Parameter: Tissue Value: Fert Kernel vs. Unfert Floret
gaacaatccgttggcggattgctgcacatccgctcgatctgatagagtggttgattcagacgtcctccgctgccagtctgcgttgtcataccgtggagtttgttcgtccaggatattgccttcggaggacgatagtcttgcaagggctcttcgctcgtgccactcgcagcctttctcattcgtagaggaaggagacaccggtgcatcagggatgataagcttagcagagtatctaggaactaatgtagctgaccacatccctgaaactcccaacaacctgtcagaggagatggtgagatgcatggcggggatatactgcagactcgcagatcctcccttggttcaccacggctcgtcctcttcaccgtcgtcgtcgttctcctcgactagcgcaatctctccgcagtatgtgggggacatgtggagtcccaaatacaggagagaggcgactctggactcccgtctgataaacccgttccatgtcgatggtctgaaggagttcagtggaccttacaacacaatggttgaggttcctatgattagccgggacagtcggaggctgaaagaagccgaggacctgctccagacttacaagttgattttgtatcggttggaagccgttgatctgaggagaatgacagatgaagaaaagatcgcattctgggtcaacatacacaatgctttgctgatgcatgcttatctgaagaatggcgtcccacagaacaatctaaagaaaacatccctacttgttaaggctgcctgcaaaatagccggacgcaacatcaacgccgccgtcatccagagcattgttcttgggtgcaacacacactgccccggacagtggctacggacgctgctttaccccaggatcaaaagcaaggtgagcaaagcggggcatgagtggcgggcctttgccgttgcgcaaccggagcctcttttacgctttgcgctttgttccggcagccattctgatcccgcggtgagggtgtacactccgaagcggctgttccaccagctggagtcggccaaggaggagttcatccgggcgacggccggcgtgtggaaggagcagaagctgctgctccccaagctggtggaggcgtacgccaaggacgtgaagctctcgccgcagggcctcgtggacatggtccagcgctacctcccggagagcatgaggatggccgtgcagcggtgccagcacggcggcaggtcgtcgggcaaggtcgtggagtgggtgtcctacaacccggccttccgctacctgctcgccagggacctcgcgttccctcacctcagctgaccgttcgttaatctttagtagtatatgcgtgtgtgccatagggttagaagtagagaagggatcatgtgcagtttttgtgtggtggttgtcaatggcttttgtagatgatgaacaggaaacaggggaagaaatgagagaaagcacgtttg

SEQ ID NO: 13128 - protein, 432 aa, Zea mays subsp. mays
  peptide (1)..(432): Ceres Seq. ID no. 12355834
  misc_feature (198)..(347): Pfam Name: Protein of unknown function, DUF547 Pfam Description: Protein of unknown function, DUF547
  misc_feature (1)..(432): Homolog of NCBI NO: 40539066 NR Description: hypothetical protein [Oryza sativa (japonica
  misc_feature (29)..(427): Homolog of NCBI NO: 15240016 NR Description: putative protein; protein id: At5g66600.1 thaliana] >gi|10177541|dbj|BAB10936.1|
  misc_feature (23)..(237): Homolog of NCBI NO: 20330763 NR Description: Hypothetical protein [Oryza sativa (japonica
  misc_feature (247)..(429): Homolog of NCBI NO: 20330763 NR Description: Hypothetical protein [Oryza sativa (japonica
  misc_feature (61)..(426): Homolog of NCBI NO: 7486263 NR Description: hypothetical protein At2g23700 [imported] -
  misc_feature (61)..(426): Homolog of NCBI NO: 15224054 NR Description: unknown protein; protein id: At2g23700.1 thaliana] >gi|20197175|gb|AAC17092.2| unknown protein thaliana] >gi|26451207|dbj|BAC42707.1| unknown protein
  misc_feature (61)..(426): Homolog of NCBI NO: 39104579 NR Description: unknown protein [Arabidopsis thaliana]
  misc_feature (14)..(426): Homolog of NCBI NO: 28916180 NR Description: putative ternary complex factor MIP1 [Antirrhinum
  misc_feature (150)..(422): Homolog of NCBI NO: 9294699 NR Description: gb|AAC17092.1~gene_id:MCB22.7~similar to unknown
  misc_feature (1)..(136): Homolog of NCBI NO: 9294699 NR Description: gb|AAC17092.1~gene_id:MCB22.7~similar to unknown
NNPLADCCTSARSDRVVDSDVLRCQSALSYRGVCSSRILPSEDDSLARALRSCHSQPFSFVEEGDTGASGMISLAEYLGTNVADHIPETPNNLSEEMVRCMAGIYCRLADPPLVHHGSSSSPSSSFSSTSAISPQYVGDMWSPKYRREATLDSRLINPFHVDGLKEFSGPYNTMVEVPMISRDSRRLKEAEDLLQTYKLILYRLEAVDLRRMTDEEKIAFWVNIHNALLMHAYLKNGVPQNNLKKTSLLVKAACKIAGRNINAAVIQSIVLGCNTHCPGQWLRTLLYPRIKSKVSKAGHEWRAFAVAQPEPLLRFALCSGSHSDPAVRVYTPKRLFHQLESAKEEFIRATAGVWKEQKLLLPKLVEAYAKDVKLSPQGLVDMVQRYLPESMRMAVQRCQHGGRSSGKVVEWVSYNPAFRYLLARDLAFPHLS

SEQ ID NO: 13129 - protein, 362 aa, Zea mays subsp. mays
  peptide (1)..(362): Ceres Seq. ID no. 12355835
  misc_feature (128)..(277): Pfam Name: Protein of unknown function, DUF547 Pfam Description: Protein of unknown function, DUF547
  misc_feature (1)..(362): Homolog of NCBI NO: 40539066 NR Description: hypothetical protein [Oryza sativa (japonica
  misc_feature (1)..(357): Homolog of NCBI NO: 15240016 NR Description: putative protein; protein id: At5g66600.1 thaliana] >gi|10177541|dbj|BAB10936.1|
  misc_feature (1)..(167): Homolog of NCBI NO: 20330763 NR Description: Hypothetical protein [Oryza sativa (japonica
  misc_feature (177)..(359): Homolog of NCBI NO: 20330763 NR Description: Hypothetical protein [Oryza sativa (japonica
  misc_feature (1)..(356): Homolog of NCBI NO: 7486263 NR Description: hypothetical protein At2g23700 [imported] -
  misc_feature (1)..(356): Homolog of NCBI NO: 15224054 NR Description: unknown protein; protein id: At2g23700.1 thaliana] >gi|20197175|gb|AAC17092.2| unknown protein thaliana] >gi|26451207|dbj|BAC42707.1| unknown protein
  misc_feature (1)..(356): Homolog of NCBI NO: 39104579 NR Description: unknown protein [Arabidopsis thaliana]
  misc_feature (1)..(356): Homolog of NCBI NO: 28916180 NR Description: putative ternary complex factor MIP1 [Antirrhinum
  misc_feature (80)..(352): Homolog of NCBI NO: 9294699 NR Description: gb|AAC17092.1~gene_id:MCB22.7~similar to unknown
  misc_feature (1)..(66): Homolog of NCBI NO: 9294699 NR Description: gb|AAC17092.1~gene_id:MCB22.7~similar to unknown
MISLAEYLGTNVADHIPETPNNLSEEMVRCMAGIYCRLADPPLVHHGSSSSPSSSFSSTSAISPQYVGDMWSPKYRREATLDSRLINPFHVDGLKEFSGPYNTMVEVPMISRDSRRLKEAEDLLQTYKLILYRLEAVDLRRMTDEEKIAFWVNIHNALLMHAYLKNGVPQNNLKKTSLLVKAACKIAGRNINAAVIQSIVLGCNTHCPGQWLRTLLYPRIKSKVSKAGHEWRAFAVAQPEPLLRFALCSGSHSDPAVRVYTPKRLFHQLESAKEEFIRATAGVWKEQKLLLPKLVEAYAKDVKLSPQGLVDMVQRYLPESMRMAVQRCQHGGRSSGKVVEWVSYNPAFRYLLARDLAFPHLS

SEQ ID NO: 13130 - protein, 336 aa, Zea mays subsp. mays
  peptide (1)..(336): Ceres Seq. ID no. 12355836
  misc_feature (102)..(251): Pfam Name: Protein of unknown function, DUF547 Pfam Description: Protein of unknown function, DUF547
  misc_feature (1)..(336): Homolog of NCBI NO: 40539066 NR Description: hypothetical protein [Oryza sativa (japonica
  misc_feature (1)..(331): Homolog of NCBI NO: 15240016 NR Description: putative protein; protein id: At5g66600.1 thaliana] >gi|10177541|dbj|BAB10936.1|
  misc_feature (1)..(141): Homolog of NCBI NO: 20330763 NR Description: Hypothetical protein [Oryza sativa (japonica
  misc_feature (151)..(333): Homolog of NCBI NO: 20330763 NR Description: Hypothetical protein [Oryza sativa (japonica
  misc_feature (1)..(330): Homolog of NCBI NO: 7486263 NR Description: hypothetical protein At2g23700 [imported] -
  misc_feature (1)..(330): Homolog of NCBI NO: 15224054 NR Description: unknown protein; protein id: At2g23700.1 thaliana] >gi|20197175|gb|AAC17092.2| unknown protein thaliana] >gi|26451207|dbj|BAC42707.1| unknown protein
  misc_feature (1)..(330): Homolog of NCBI NO: 39104579 NR Description: unknown protein [Arabidopsis thaliana]
  misc_feature (1)..(330): Homolog of NCBI NO: 28916180 NR Description: putative ternary complex factor MIP1 [Antirrhinum
  misc_feature (54)..(326): Homolog of NCBI NO: 9294699 NR Description: gb|AAC17092.1~gene_id:MCB22.7~similar to unknown
  misc_feature (1)..(40): Homolog of NCBI NO: 9294699 NR Description: gb|AAC17092.1~gene_id:MCB22.7~similar to unknown
MVRCMAGIYCRLADPPLVHHGSSSSPSSSFSSTSAISPQYVGDMWSPKYRREATLDSRLINPFHVDGLKEFSGPYNTMVEVPMISRDSRRLKEAEDLLQTYKLILYRLEAVDLRRMTDEEKIAFWVNIHNALLMHAYLKNGVPQNNLKKTSLLVKAACKIAGRNINAAVIQSIVLGCNTHCPGQWLRTLLYPRIKSKVSKAGHEWRAFAVAQPEPLLRFALCSGSHSDPAVRVYTPKRLFHQLESAKEEFIRATAGVWKEQKLLLPKLVEAYAKDVKLSPQGLVDMVQRYLPESMRMAVQRCQHGGRSSGKVVEWVSYNPAFRYLLARDLAFPHLS

SEQ ID NO: 13131 - DNA, 1870 bp, Zea mays subsp. mays
  misc_feature (1)..(1870): Ceres Seq. ID no. 12376390
  misc_feature: MA Experiment ID: 108522 Result: Up-regulated in Transcription
  misc_feature: MA Experiment 108522 PARAMETER Experiment Name: Zm_42deg_Heat_P Parameter: Age (day) Value: 8
  misc_feature: MA Experiment 108522 PARAMETER Experiment Name: Zm_42deg_Heat_P Parameter: Organism Value: Zea mays
  misc_feature: MA Experiment 108522 PARAMETER Experiment Name: Zm_42deg_Heat_P Parameter: Plant Line Value: 35A19
  misc_feature: MA Experiment 108522 PARAMETER Experiment Name: Zm_42deg_Heat_P Parameter: Temperature (deg C) Value: 42 vs. 22
  misc_feature: MA Experiment 108522 PARAMETER Experiment Name: Zm_42deg_Heat_P Parameter: Timepoint (hr) Value: 1
  misc_feature: MA Experiment 108522 PARAMETER Experiment Name: Zm_42deg_Heat_P Parameter: Tissue Value: Aerial
  misc_feature: MA Experiment ID: 108689 Result: Up-regulated in Transcription
  misc_feature: MA Experiment 108689 PARAMETER Experiment Name: Zm_Drought_Roots_P Parameter: Age (day) Value: 9
  misc_feature: MA Experiment 108689 PARAMETER Experiment Name: Zm_Drought_Roots_P Parameter: Organism Value: Zea mays
  misc_feature: MA Experiment 108689 PARAMETER Experiment Name: Zm_Drought_Roots_P Parameter: Plant Line Value: 35A19
  misc_feature: MA Experiment 108689 PARAMETER Experiment Name: Zm_Drought_Roots_P Parameter: Timepoint (hr) Value: 24
  misc_feature: MA Experiment 108689 PARAMETER Experiment Name: Zm_Drought_Roots_P Parameter: Tissue Value: Roots
  misc_feature: MA Experiment 108689 PARAMETER Experiment Name: Zm_Drought_Roots_P Parameter: Treatment Value: Drought vs. No Drought
  misc_feature: MA Experiment ID: 20000535 Result: Down-regulated in Transcription
  misc_feature: MA Experiment 20000535 PARAMETER Experiment Name: Zm_Hybrid_Seed_Dev_P Parameter: DAP Value: 30 vs. 12
  misc_feature: MA Experiment 20000535 PARAMETER Experiment Name: Zm_Hybrid_Seed_Dev_P Parameter: Organism Value: Zea mays
  misc_feature: MA Experiment 20000535 PARAMETER Experiment Name: Zm_Hybrid_Seed_Dev_P Parameter: Plant Line Value: 35A19
  misc_feature: MA Experiment 20000535 PARAMETER Experiment Name: Zm_Hybrid_Seed_Dev_P Parameter: Tissue Value: Embryo vs. Unfert Floret
aaatcctcgcttccctcccccacgtcgcgtccgatcggcgacggtgcgccatgtcgatgctggacaccttcttcagcaagggcggcggcggcggcttccgcggcgccaagtgcaagacgctgctgaagctgtcgatcccgcggataaagctgctgcgggaaccggcgggagctgcagctgcgccagatgcgccgggacatcgccaagctcctagaggccggccaggaggccactgcccggatcagggtggagcacatcatccgggaggagaacatgatggccgcgcaggagatcctcgagctcttctgcgagctcatcgcggttcgcctgcccatcatcgaggcccaaaaggagtgtcctattgatctcaaagaagcaatatcaagtgtctgttttgccgctccaagatgtgcagatctacctgaactgatgcaagttcaaatgatgtttgcaactaaatatgggaaggaatttgtcgctgcagcttcagagttgatgcctgattgtggggtcaatcgtcagataattgaattgctttctattcgtcctcctcctgttgatgcaaagttgaaactgctgaaggagatagctgaggaacatgaagttgattgggatccatcagagacagagacagaatttctcaaacctcatgaagatctattgaatggaccgacctacttcaatgtatccacactacctcttcccaaggagaaacatgaggaaacagtagttgcaagtgctgccgagcagcctgatgaagactatgagtcagataccggtcttgactcactggatttgcctgaagtcccaaaagctgcaattcgtccaccttctgacgcaccattgaccccagatatttgcccacatgttcagggctctcagtcacttcctcatgagttctcagatcctggtaacttggaggagaatccaacagctggtggtgcttttaatgttattcagatgaaaagcttggagcatcttgtttatgcaccatctgatcagtcaaacataccggatttgccaaatgaaaagaagcagtttattccttttgcatctccaccgcccgttctttctccttcggtgggaaaagccgagacagttccctcaccttctctgtctcctccagtgaagccgacagagccagaaccagaaatcctcacaaagaaaattgatgaagtgaccacacctccagtacttccctcagattatattttcacaaaacagccagaacaagtgcggacaatctctccttctgagagtggggcaaatattgacttggacgacgttttatctgctgcgcagacagctgctgaatcagctgagcgagctgcatcagcagcccgtgctgctgcaaaccttgcacaactgcgcatttcagacctgaaagaagaattccaaggtttatagcaattacggtgatagcgtccaaaaggaaagccatcatcagactgaggcgacacaggaaccggtatttgatcaccaggactccttcaccaatgatacacaggactatgtgtcatcccatgtgccgcagaggtcgtcatctttggaggacgatccatatttctcgtatcccaacttgttctcagcgccaaagccctgaaggcggaaactagtggtctgcaagtagttgttcagaatagtctgaaacatgagatatcactttttcagctctgtccggtcctcttatgtttggtcttttctgatgcctccgaaaattctgtttatgttgagttggtacatagcggacaaaagggagactatgaaacctctgtctagttttgtctctgtaaattgtacatgtgcggtgtttgtatcagttgtctgaaacatttctgcagtctactggtaataacagaaattgaatctc

SEQ ID NO: 13132 - protein, 406 aa, Zea mays subsp. mays
  peptide (1)..(406): Ceres Seq. ID no. 12376391
  misc_feature (1)..(103): Pfam Name: Eukaryotic protein of unknown function, DUF292 Pfam Description: Eukaryotic protein of unknown function, DUF292
  misc_feature (1)..(399): Homolog of NCBI NO: 40253290 NR Description: unknown protein [Oryza sativa (japonica
  misc_feature (1)..(240): Homolog of NCBI NO: 15218545 NR Description: hypothetical protein; protein id: At1g34220.1
  misc_feature (112)..(240): Homolog of NCBI NO: 33589706 NR Description: At1g34220 [Arabidopsis thaliana]
  misc_feature (1)..(119): Homolog of NCBI NO: 33589706 NR Description: At1g34220 [Arabidopsis thaliana]
  misc_feature (227)..(401): Homolog of NCBI NO: 40253290 NR Description: unknown protein [Oryza sativa (japonica
  misc_feature (230)..(399): Homolog of NCBI NO: 33589706 NR Description: At1g34220 [Arabidopsis thaliana]
  misc_feature (1)..(181): Homolog of NCBI NO: 15237108 NR Description: putative protein; protein id: At4g35730.1
  misc_feature (1)..(256): Homolog of NCBI NO: 34910388 NR Description: P0692C11.15 [Oryza sativa (japonica
  misc_feature (351)..(392): Homolog of NCBI NO: 34910388 NR Description: P0692C11.15 [Oryza sativa (japonica
  misc_feature (1)..(161): Homolog of NCBI NO: 18395668 NR Description: expressed protein; protein id: At1g25420.1, by cDNA: 7917., supported by cDNA: gi_20465253 [Arabidopsis
MRRDIAKLLEAGQEATARIRVEHIIREENMMAAQEILELFCELIAVRLPIIEAQKECPIDLKEAISSVCFAAPRCADLPELMQVQMMFATKYGKEFVAAASELMPDCGVNRQIIELLSIRPPPVDAKLKLLKEIAEEHEVDWDPSETETEFLKPHEDLLNGPTYFNVSTLPLPKEKHEETVVASAAEQPDEDYESDTGLDSLDLPEVPKAAIRPPSDAPLTPDICPHVQGSQSLPHEFSDPGNLEENPTAGGAFNVIQMKSLEHLVYAPSDQSNIPDLPNEKKQFIPFASPPPVLSPSVGKAETVPSPSLSPPVKPTEPEPEILTKKIDEVTTPPVLPSDYIFTKQPEQVRTISPSESGANIDLDDVLSAAQTAAESAERAASAARAAANLAQLRISDLKEEFQGL

SEQ ID NO: 13133 - protein, 377 aa, Zea mays subsp. mays
  peptide (1)..(377): Ceres Seq. ID no. 12376392
  misc_feature (1)..(74): Pfam Name: Eukaryotic protein of unknown function, DUF292 Pfam Description: Eukaryotic protein of unknown function, DUF292
  misc_feature (1)..(370): Homolog of NCBI NO: 40253290 NR Description: unknown protein [Oryza sativa (japonica
  misc_feature (1)..(211): Homolog of NCBI NO: 15218545 NR Description: hypothetical protein; protein id: At1g34220.1
  misc_feature (83)..(211): Homolog of NCBI NO: 33589706 NR Description: At1g34220 [Arabidopsis thaliana]
  misc_feature (1)..(90): Homolog of NCBI NO: 33589706 NR Description: At1g34220 [Arabidopsis thaliana]
  misc_feature (198)..(372): Homolog of NCBI NO: 40253290 NR Description: unknown protein [Oryza sativa (japonica
  misc_feature (201)..(370): Homolog of NCBI NO: 33589706 NR Description: At1g34220 [Arabidopsis thaliana]
  misc_feature (1)..(152): Homolog of NCBI NO: 15237108 NR Description: putative protein; protein id: At4g35730.1
  misc_feature (1)..(227): Homolog of NCBI NO: 34910388 NR Description: P0692C11.15 [Oryza sativa (japonica
  misc_feature (322)..(363): Homolog of NCBI NO: 34910388 NR Description: P0692C11.15 [Oryza sativa (japonica
  misc_feature (1)..(132): Homolog of NCBI NO: 18395668 NR Description: expressed protein; protein id: At1g25420.1, by cDNA: 7917., supported by cDNA: gi_20465253 [Arabidopsis
MMAAQEILELFCELIAVRLPIIEAQKECPIDLKEAISSVCFAAPRCADLPELMQVQMMFATKYGKEFVAAASELMPDCGVNRQIIELLSIRPPPVDAKLKLLKEIAEEHEVDWDPSETETEFLKPHEDLLNGPTYFNVSTLPLPKEKHEETVVASAAEQPDEDYESDTGLDSLDLPEVPKAAIRPPSDAPLTPDICPHVQGSQSLPHEFSDPGNLEENPTAGGAFNVIQMKSLEHLVYAPSDQSNIPDLPNEKKQFIPFASPPPVLSPSVGKAETVPSPSLSPPVKPTEPEPEILTKKIDEVTTPPVLPSDYIFTKQPEQVRTISPSESGANIDLDDVLSAAQTAAESAERAASAARAAANLAQLRISDLKEEFQGL

SEQ ID NO: 13134 - protein, 376 aa, Zea mays subsp. mays
  peptide (1)..(376): Ceres Seq. ID no. 12376393
  misc_feature (1)..(73): Pfam Name: Eukaryotic protein of unknown function, DUF292 Pfam Description: Eukaryotic protein of unknown function, DUF292
  misc_feature (1)..(369): Homolog of NCBI NO: 40253290 NR Description: unknown protein [Oryza sativa (japonica
  misc_feature (1)..(210): Homolog of NCBI NO: 15218545 NR Description: hypothetical protein; protein id: At1g34220.1
  misc_feature (82)..(210): Homolog of NCBI NO: 33589706 NR Description: At1g34220 [Arabidopsis thaliana]
  misc_feature (1)..(89): Homolog of NCBI NO: 33589706 NR Description: At1g34220 [Arabidopsis thaliana]
  misc_feature (197)..(371): Homolog of NCBI NO: 40253290 NR Description: unknown protein [Oryza sativa (japonica
  misc_feature (200)..(369): Homolog of NCBI NO: 33589706 NR Description: At1g34220 [Arabidopsis thaliana]
  misc_feature (1)..(151): Homolog of NCBI NO: 15237108 NR Description: putative protein; protein id: At4g35730.1
  misc_feature (1)..(226): Homolog of NCBI NO: 34910388 NR Description: P0692C11.15 [Oryza sativa (japonica
  misc_feature (321)..(362): Homolog of NCBI NO: 34910388 NR Description: P0692C11.15 [Oryza sativa (japonica
  misc_feature (1)..(131): Homolog of NCBI NO: 18395668 NR Description: expressed protein; protein id: At1g25420.1, by cDNA: 7917., supported by cDNA: gi_20465253 [Arabidopsis
MAAQEILELFCELIAVRLPIIEAQKECPIDLKEAISSVCFAAPRCADLPELMQVQMMFATKYGKEFVAAASELMPDCGVNRQIIELLSIRPPPVDAKLKLLKEIAEEHEVDWDPSETETEFLKPHEDLLNGPTYFNVSTLPLPKEKHEETVVASAAEQPDEDYESDTGLDSLDLPEVPKAAIRPPSDAPLTPDICPHVQGSQSLPHEFSDPGNLEENPTAGGAFNVIQMKSLEHLVYAPSDQSNIPDLPNEKKQFIPFASPPPVLSPSVGKAETVPSPSLSPPVKPTEPEPEILTKKIDEVTTPPVLPSDYIFTKQPEQVRTISPSESGANIDLDDVLSAAQTAAESAERAASAARAAANLAQLRISDLKEEFQGL

SEQ ID NO: 13135 - DNA, 1558 bp, Zea mays subsp. mays
  misc_feature (1)..(1558): Ceres Seq. ID no. 12374009
  misc_feature: MA Experiment ID: 108522 Result: Up-regulated in Transcription
  misc_feature: MA Experiment 108522 PARAMETER Experiment Name: Zm_42deg_Heat_P Parameter: Age (day) Value: 8
  misc_feature: MA Experiment 108522 PARAMETER Experiment Name: Zm_42deg_Heat_P Parameter: Organism Value: Zea mays
  misc_feature: MA Experiment 108522 PARAMETER Experiment Name: Zm_42deg_Heat_P Parameter: Plant Line Value: 35A19
  misc_feature: MA Experiment 108522 PARAMETER Experiment Name: Zm_42deg_Heat_P Parameter: Temperature (deg C) Value: 42 vs. 22
  misc_feature: MA Experiment 108522 PARAMETER Experiment Name: Zm_42deg_Heat_P Parameter: Timepoint (hr) Value: 1
  misc_feature: MA Experiment 108522 PARAMETER Experiment Name: Zm_42deg_Heat_P Parameter: Tissue Value: Aerial
  misc_feature: MA Experiment ID: 108523 Result: Up-regulated in Transcription
  misc_feature: MA Experiment 108523 PARAMETER Experiment Name: Zm_42deg_Heat_P Parameter: Age (day) Value: 8
  misc_feature: MA Experiment 108523 PARAMETER Experiment Name: Zm_42deg_Heat_P Parameter: Organism Value: Zea mays
  misc_feature: MA Experiment 108523 PARAMETER Experiment Name: Zm_42deg_Heat_P Parameter: Plant Line Value: 35A19
  misc_feature: MA Experiment 108523 PARAMETER Experiment Name: Zm_42deg_Heat_P Parameter: Temperature (deg C) Value: 42 vs. 22
  misc_feature: MA Experiment 108523 PARAMETER Experiment Name: Zm_42deg_Heat_P Parameter: Timepoint (hr) Value: 6
  misc_feature: MA Experiment 108523 PARAMETER Experiment Name: Zm_42deg_Heat_P Parameter: Tissue Value: Aerial
aagctataggcgaaacttcgggggtcgtcgagggttctcgaccctcccttcccctctctcgcccgctcgctccctcaccgccggcgttctcgccgccagctacggacggggcacactgcgcagggtcccagccccgcctctcacccgaacgtcttcgctcccctcaccgggtaggcgtcgcgctctactggcaccaccccggccctcgcgctctactggcaccggaccggcgcggggtggcgcggagacctgtcccggccaggagaccgttccgtgctataccggtgaagatgctctttgcatagctcaagctccaaactgatggattctgatgacaagaagtttggaaatgggccaagggagcttactggtgctgttgatttgattaaccactacaaactgctgccacaccatgatttcttttgcaagaaacctttgccactggcaatatcagatacacattatcttcacaatattgtgggagacactgaaattcgaaaaggagaaggaatggagttagatcaacttgttcagaatgcatatatgagggataaacctgcttatattcagcccttcgatatggaaacactggggcaagcgttccaacttcgagaaacagctcctgtggttttgccctctactgaaaagggtataccgactatttcgggtaaaccaaaaagcgagtccaaggacaaagagaagaagcataaaaagcacaaagacagagagagggacaaagacaaggaacataagaagcacaaacatcggcataaggatcgaagtaaggacaaagataaagacaaagacaaggataagaaaaaagataagagtggtcatcatgattctgattcaaagaaacatcatgaaaagaagaggaagcacgagggaactgaagattcagcagatgtgcataagcacaagaagagtaagcacaagagttccaaaaccgatgagatggggaatggacttattagttaacacttcctagttctagcttcaatccttgtaatttgctgttaaaaggagactgatggtctctgccatcaaaaccctgtgcagaatagtgatgacaacataaaagttggagatcttgataagaacgcgataaagaagtatttttgcagagtccattccgaggaaaattaaattacttaatacaggactaatccttcgaactgtgcaaccttctgttcctccctgacgaattggttgtaggagcggttgaaaggatatgccatgagattgtttcgattgcagggccagcgcacttattgatactaggcttcttatttaactcctaatttcggatgtagcgtgcatgagtatcctgttgagtagctgtggatggttttacagttggtctagagatgtagttgagggcagggaattggaaagaatttcgtgttcccgtcgtactgaccttggttgatagagagtttaaccagtagctaaattaaatgttgctagtcagttccaagtttattctgcgtggaatgaattggagtcaaattagcacactgcttatttaaccatgataaagatcttgttattacaaagt

SEQ ID NO: 13136 - protein, 218 aa, Zea mays subsp. mays
  peptide (1)..(218): Ceres Seq. ID no. 12374010
  misc_feature (117)..(203): Pfam Name: SART-1 family Pfam Description: SART-1 family
  misc_feature (1)..(213): Homolog of NCBI NO: 38454176 NR Description: At5g12230 [Arabidopsis thaliana]
  misc_feature (1)..(213): Homolog of NCBI NO: 15239910 NR Description: unknown protein; protein id: At5g12230.1 thaliana] >gi|9759390|dbj|BAB10041.1| gene_id:MXC9.19~unknown
  misc_feature (1)..(213): Homolog of NCBI NO: 15239764 NR Description: putative protein; protein id: At5g19480.1
  misc_feature (48)..(214): Homolog of NCBI NO: 23619174 NR Description: hypothetical protein [Plasmodium falciparum 3D7]
  misc_feature (114)..(201): Homolog of NCBI NO: 29246869 NR Description: GLP_191_32543_34384 [Giardia lamblia ATCC 50803]
  misc_feature (119)..(208): Homolog of NCBI NO: 23508991 NR Description: hypothetical protein [Plasmodium falciparum 3D7]
  misc_feature (116)..(211): Homolog of NCBI NO: 17539584 NR Description: Putative nuclear protein, with 2 coiled coil-4
  misc_feature (106)..(206): Homolog of NCBI NO: 23612468 NR Description: heat shock protein 86 family protein [Plasmodium
  misc_feature (117)..(215): Homolog of NCBI NO: 23486889 NR Description: hypothetical protein [Plasmodium yoelii yoelii]
  misc_feature (116)..(211): Homolog of NCBI NO: 17509191 NR Description: Putative nuclear protein, with 3 coiled coil-4
MDSDDKKFGNGPRELTGAVDLINHYKLLPHHDFFCKKPLPLAISDTHYLHNIVGDTEIRKGEGMELDQLVQNAYMRDKPAYIQPFDMETLGQAFQLRETAPVVLPSTEKGIPTISGKPKSESKDKEKKHKKHKDRERDKDKEHKKHKHRHKDRSKDKDKDKDKDKKKDKSGHHDSDSKKHHEKKRKHEGTEDSADVHKHKKSKHKSSKTDEMGNGLIS

SEQ ID NO: 13137 - protein, 155 aa, Zea mays subsp. mays
  peptide (1)..(155): Ceres Seq. ID no. 12374011
  misc_feature (54)..(140): Pfam Name: SART-1 family Pfam Description: SART-1 family
  misc_feature (1)..(150): Homolog of NCBI NO: 38454176 NR Description: At5g12230 [Arabidopsis thaliana]
  misc_feature (1)..(150): Homolog of NCBI NO: 15239910 NR Description: unknown protein; protein id: At5g12230.1 thaliana] >gi|9759390|dbj|BAB10041.1| gene_id:MXC9.19~unknown
  misc_feature (1)..(150): Homolog of NCBI NO: 15239764 NR Description: putative protein; protein id: At5g19480.1
  misc_feature (1)..(151): Homolog of NCBI NO: 23619174 NR Description: hypothetical protein [Plasmodium falciparum 3D7]
  misc_feature (51)..(138): Homolog of NCBI NO: 29246869 NR Description: GLP_191_32543_34384 [Giardia lamblia ATCC 50803]
  misc_feature (56)..(145): Homolog of NCBI NO: 23508991 NR Description: hypothetical protein [Plasmodium falciparum 3D7]
  misc_feature (53)..(148): Homolog of NCBI NO: 17539584 NR Description: Putative nuclear protein, with 2 coiled coil-4
  misc_feature (43)..(143): Homolog of NCBI NO: 23612468 NR Description: heat shock protein 86 family protein [Plasmodium
  misc_feature (54)..(152): Homolog of NCBI NO: 23486889 NR Description: hypothetical protein [Plasmodium yoelii yoelii]
  misc_feature (53)..(148): Homolog of NCBI NO: 17509191 NR Description: Putative nuclear protein, with 3 coiled coil-4
MELDQLVQNAYMRDKPAYIQPFDMETLGQAFQLRETAPVVLPSTEKGIPTISGKPKSESKDKEKKHKKHKDRERDKDKEHKKHKHRHKDRSKDKDKDKDKDKKKDKSGHHDSDSKKHHEKKRKHEGTEDSADVHKHKKSKHKSSKTDEMGNGLIS

SEQ ID NO: 13138 - protein, 144 aa, Zea mays subsp. mays
  peptide (1)..(144): Ceres Seq. ID no. 12374012
  misc_feature (43)..(129): Pfam Name: SART-1 family Pfam Description: SART-1 family
  misc_feature (1)..(139): Homolog of NCBI NO: 38454176 NR Description: At5g12230 [Arabidopsis thaliana]
  misc_feature (1)..(139): Homolog of NCBI NO: 15239910 NR Description: unknown protein; protein id: At5g12230.1 thaliana] >gi|9759390|dbj|BAB10041.1| gene_id:MXC9.19~unknown
  misc_feature (1)..(139): Homolog of NCBI NO: 15239764 NR Description: putative protein; protein id: At5g19480.1
  misc_feature (1)..(140): Homolog of NCBI NO: 23619174 NR Description: hypothetical protein [Plasmodium falciparum 3D7]
  misc_feature (40)..(127): Homolog of NCBI NO: 29246869 NR Description: GLP_191_32543_34384 [Giardia lamblia ATCC 50803]
  misc_feature (45)..(134): Homolog of NCBI NO: 23508991 NR Description: hypothetical protein [Plasmodium falciparum 3D7]
  misc_feature (42)..(137): Homolog of NCBI NO: 17539584 NR Description: Putative nuclear protein, with 2 coiled coil-4
  misc_feature (32)..(132): Homolog of NCBI NO: 23612468 NR Description: heat shock protein 86 family protein [Plasmodium
  misc_feature (43)..(141): Homolog of NCBI NO: 23486889 NR Description: hypothetical protein [Plasmodium yoelii yoelii]
  misc_feature (42)..(137): Homolog of NCBI NO: 17509191 NR Description: Putative nuclear protein, with 3 coiled coil-4
MRDKPAYIQPFDMETLGQAFQLRETAPVVLPSTEKGIPTISGKPKSESKDKEKKHKKHKDRERDKDKEHKKHKHRHKDRSKDKDKDKDKDKKKDKSGHHDSDSKKHHEKKRKHEGTEDSADVHKHKKSKHKSSKTDEMGNGLIS

SEQ ID NO: 13139 - DNA, 1950 bp, Zea mays subsp. mays
  misc_feature (1)..(1950): Ceres Seq. ID no. 12343962
  misc_feature: MA Experiment ID: 108534 Result: Up-regulated in Transcription
  misc_feature: MA Experiment 108534 PARAMETER Experiment Name: Zm_4deg_Cold_P Parameter: Age (hr) Value: 8
  misc_feature: MA Experiment 108534 PARAMETER Experiment Name: Zm_4deg_Cold_P Parameter: Organism Value: Zea mays
  misc_feature: MA Experiment 108534 PARAMETER Experiment Name: Zm_4deg_Cold_P Parameter: Plant Line Value: 35A19
  misc_feature: MA Experiment 108534 PARAMETER Experiment Name: Zm_4deg_Cold_P Parameter: Temperature (deg C) Value: 4 vs. 22
  misc_feature: MA Experiment 108534 PARAMETER Experiment Name: Zm_4deg_Cold_P Parameter: Timepoint (hr) Value: 6
  misc_feature: MA Experiment 108534 PARAMETER Experiment Name: Zm_4deg_Cold_P Parameter: Tissue Value: Aerial
  misc_feature: MA Experiment ID: 108545 Result: Up-regulated in Transcription
  misc_feature: MA Experiment 108545 PARAMETER Experiment Name: Zm_Imbibed_Seeds_P Parameter: Age (day) Value: 3 vs. 2
  misc_feature: MA Experiment 108545 PARAMETER Experiment Name: Zm_Imbibed_Seeds_P Parameter: Organism Value: Zea mays
  misc_feature: MA Experiment 108545 PARAMETER Experiment Name: Zm_Imbibed_Seeds_P Parameter: Plant Line Value: 35A19
  misc_feature: MA Experiment 108545 PARAMETER Experiment Name: Zm_Imbibed_Seeds_P Parameter: Tissue Value: Aerial vs. Embryo
  misc_feature: MA Experiment ID: 20000492 Result: Down-regulated in Transcription
  misc_feature: MA Experiment 20000492 PARAMETER Experiment Name: Zm_Hybrid_Seed_Dev_P Parameter: DAP Value: 12
  misc_feature: MA Experiment 20000492 PARAMETER Experiment Name: Zm_Hybrid_Seed_Dev_P Parameter: Organism Value: Zea mays
  misc_feature: MA Experiment 20000492 PARAMETER Experiment Name: Zm_Hybrid_Seed_Dev_P Parameter: Plant Line Value: 35A19
  misc_feature: MA Experiment 20000492 PARAMETER Experiment Name: Zm_Hybrid_Seed_Dev_P Parameter: Tissue Value: Fert Kernel vs. Unfert Floret
  misc_feature: MA Experiment ID: 20000535 Result: Down-regulated in Transcription
  misc_feature: MA Experiment 20000535 PARAMETER Experiment Name: Zm_Hybrid_Seed_Dev_P Parameter: DAP Value: 30 vs. 12
  misc_feature: MA Experiment 20000535 PARAMETER Experiment Name: Zm_Hybrid_Seed_Dev_P Parameter: Organism Value: Zea mays
  misc_feature: MA Experiment 20000535 PARAMETER Experiment Name: Zm_Hybrid_Seed_Dev_P Parameter: Plant Line Value: 35A19
  misc_feature: MA Experiment 20000535 PARAMETER Experiment Name: Zm_Hybrid_Seed_Dev_P Parameter: Tissue Value: Embryo vs. Unfert Floret
aactaatcactacctctccctctccgtcgcgacacaggccacggcgggcggcggcggaggcttccgtgcggctcttggcggattgaacgcccactcgagctgcgccggcggctgtttcagccgtccttagatagaccctgctttcctcccgggcgaatcaaagttgcacaaatgccgacaccagtgaagtcggtgctccccgtggtgctcctcggctgcggcggcgtcggccgctacctcctccgccacatcgtctcctgtcgtcccctccacgccaaccagggcgtggccatccgggtggtgggcgtcgccgatagctcctccctgctcgtcgccgaagatgtccactccaccggcctcgatgacgcgctcctcacccagctctgcgccgccaagtccgcaggctctcccctctcctccctgctcggccgagggcactgtcagctgttcaagaaccctgaggctaggggcaaagtcatagacgccgctaccacacttggaagtacaactggtctggtgctagttgactgttctgcaacttatgacactgttagcctgctgaaagatgctgtggatcatggatgctgtgtcgtattggcaaacaagaaacctcttaccggtgcttatgaggattttcagaagttggtctccaacttccgtcggataagatttgaatctactgttggagcaggtttgcctgtgatagcttctgtaacccgtattattgcatctggagaccctattactcgtattgttggcagtctgagtggtacacttgggtatgtgatgagtgagcttgaggatggaaagaaatttagtgaagttgtaaaaactgccaagtctcttggctatacagaaccagatccacgtgatgatcttggtggaatggatgtggctagaaaggcattgatcctggctaggcttcttgggcaacagataagcatggagagtatcaatgttgagagtttatatcctagtgaattaggacctgatgcagtgtccacaaaggacttccttgaaagtggtttagtgcaacttgacaagagcatggaagaaagaatcagagcagcatcttcgagaggaaacgttcttcgttacgtctgtgagattgaaagcgcagggtgccaagtaggccttaaagagctcccaaaggattctgcgctgggtagattgaggggaagtgacaatgtggtcgagatatacagcagatgttaccagagctcccctctggtgatccagggcgcaggagctggcaacgacaccactgccgccggcgtccttgctgacataatcgacctccaagacctgttccagacgatggcttgatcgttgatcggcatccacaccagtacaccatcttgatttttgcaaggcaccagagcgtttgatactttgatcggtgccagtggaatcccccactgcccactggttggcttcgctccttgtcatgtgtgcattttgttcacgggcatgctctcaggctgagagcctgagacgtctgacattcgaaatgtaattttgagcaggcgtgtgggggatttctttacagtttacataaaggaactttgtttcagtgaaataatgtcgcggtctccacattaaactaataaacagtccgagctacattgccgctatctgatagtgaaataatatcgctggcagcctgaaaccgtgaacgagagacgtgggaaattgatgcaattcaccctgatgcagattcggcaattgatgcaaggttgcaattcagtgtcctgaaatgtctacgaggagaggagaggagatgagatggctggaattttaaatactactcttgcatcacgcaattcaattctgtgttccgttattatatatcgttcactgatgcgacagcatagcagactagtagtcaataataatttttgttggaattgccacgaacccgccaccataaggcattgttcgtttctactc

SEQ ID NO: 13140 - protein, 384 aa, Zea mays subsp. mays
  peptide (1)..(384): Ceres Seq. ID no. 12343963
  misc_feature (176)..(374): Pfam Name: Homoserine dehydrogenase Pfam Description: Homoserine dehydrogenase
  misc_feature (9)..(380): Homolog of NCBI NO: 15242147 NR Description: homoserine dehydrogenase-like protein; protein At5g21060.1, supported by cDNA: 123335. [Arabidopsis thaliana] putative homoserine dehydrogenase [Arabidopsis thaliana]
  misc_feature (9)..(380): Homolog of NCBI NO: 21537197 NR Description: homoserine dehydrogenase-like protein
  misc_feature (113)..(374): Homolog of NCBI NO: 22971485 NR Description: hypothetical protein [Chloroflexus aurantiacus]
  misc_feature (116)..(374): Homolog of NCBI NO: 15601978 NR Description: ThrA [Pasteurella multocida]
  misc_feature (6)..(57): Homolog of NCBI NO: 15601978 NR Description: ThrA [Pasteurella multocida]
  misc_feature (116)..(374): Homolog of NCBI NO: 16120788 NR Description: bifunctional aspartokinase/homoserine I [Yersinia pestis] >gi|25288159|pir||AH0056 aspartate kinase (EC
  misc_feature (1)..(65): Homolog of NCBI NO: 16120788 NR Description: bifunctional aspartokinase/homoserine I [Yersinia pestis] >gi|25288159|pir||AH0056 aspartate kinase (EC
  misc_feature (116)..(374): Homolog of NCBI NO: 22127591 NR Description: aspartokinase I, homoserine dehydrogenase I pestis KIM] >gi|21960699|gb|AAM87265.1|AE013975_4 aspartokinase
  misc_feature (1)..(65): Homolog of NCBI NO: 22127591 NR Description: aspartokinase I, homoserine dehydrogenase I pestis KIM] >gi|21960699|gb|AAM87265.1|AE013975_4 aspartokinase
  misc_feature (116)..(374): Homolog of NCBI NO: 26245920 NR Description: Aspartokinase I; Homoserine dehydrogenase I coli CFT073] >gi|26106317|gb|AAN78503.1|AE016755_3 Aspartokinase
MPTPVKSVLPVVLLGCGGVGRYLLRHIVSCRPLHANQGVAIRVVGVADSSSLLVAEDVHSTGLDDALLTQLCAAKSAGSPLSSLLGRGHCQLFKNPEARGKVIDAATTLGSTTGLVLVDCSATYDTVSLLKDAVDHGCCVVLANKKPLTGAYEDFQKLVSNFRRIRFESTVGAGLPVIASVTRIIASGDPITRIVGSLSGTLGYVMSELEDGKKFSEVVKTAKSLGYTEPDPRDDLGGMDVARKALILARLLGQQISMESINVESLYPSELGPDAVSTKDFLESGLVQLDKSMEERIRAASSRGNVLRYVCEIESAGCQVGLKELPKDSALGRLRGSDNVVEIYSRCYQSSPLVIQGAGAGNDTTAAGVLADIIDLQDLFQTMA

SEQ ID NO: 13141 - DNA, 948 bp, Zea mays subsp. mays
  misc_feature (1)..(948): Ceres Seq. ID no. 12347805
  misc_feature: MA Experiment ID: 108528 Result: Up-regulated in Transcription
  misc_feature: MA Experiment 108528 PARAMETER Experiment Name: Zm_Imbibed_Seeds_P Parameter: Age (day) Value: 5 vs. 2
  misc_feature: MA Experiment 108528 PARAMETER Experiment Name: Zm_Imbibed_Seeds_P Parameter: Organism Value: Zea mays
  misc_feature: MA Experiment 108528 PARAMETER Experiment Name: Zm_Imbibed_Seeds_P Parameter: Plant Line Value: 35A19
  misc_feature: MA Experiment 108528 PARAMETER Experiment Name: Zm_Imbibed_Seeds_P Parameter: Tissue Value: Aerial vs. Embryo
  misc_feature: MA Experiment ID: 108530 Result: Up-regulated in Transcription
  misc_feature: MA Experiment 108530 PARAMETER Experiment Name: Zm_Imbibed_Seeds_P Parameter: Age (day) Value: 6 vs. 2
  misc_feature: MA Experiment 108530 PARAMETER Experiment Name: Zm_Imbibed_Seeds_P Parameter: Organism Value: Zea mays
  misc_feature: MA Experiment 108530 PARAMETER Experiment Name: Zm_Imbibed_Seeds_P Parameter: Plant Line Value: 35A19
  misc_feature: MA Experiment 108530 PARAMETER Experiment Name: Zm_Imbibed_Seeds_P Parameter: Tissue Value: Aerial vs. Embryo
  misc_feature: MA Experiment ID: 108536 Result: Down-regulated in Transcription
  misc_feature: MA Experiment 108536 PARAMETER Experiment Name: Zm_Meristem_P Parameter: Age (day) Value: 8
  misc_feature: MA Experiment 108536 PARAMETER Experiment Name: Zm_Meristem_P Parameter: Organism Value: Zea mays
  misc_feature: MA Experiment 108536 PARAMETER Experiment Name: Zm_Meristem_P Parameter: Plant Line Value: 35A19
  misc_feature: MA Experiment 108536 PARAMETER Experiment Name: Zm_Meristem_P Parameter: Tissue Value: Shoot Meristem vs. Above Shoot Meristem
  misc_feature: MA Experiment ID: 108545 Result: Up-regulated in Transcription
  misc_feature: MA Experiment 108545 PARAMETER Experiment Name: Zm_Imbibed_Seeds_P Parameter: Age (day) Value: 3 vs. 2
  misc_feature: MA Experiment 108545 PARAMETER Experiment Name: Zm_Imbibed_Seeds_P Parameter: Organism Value: Zea mays
  misc_feature: MA Experiment 108545 PARAMETER Experiment Name: Zm_Imbibed_Seeds_P Parameter: Plant Line Value: 35A19
  misc_feature: MA Experiment 108545 PARAMETER Experiment Name: Zm_Imbibed_Seeds_P Parameter: Tissue Value: Aerial vs. Embryo
  misc_feature: MA Experiment ID: 108547 Result: Up-regulated in Transcription
  misc_feature: MA Experiment 108547 PARAMETER Experiment Name: Zm_Imbibed_Seeds_P Parameter: Age (day) Value: 4 vs. 2
  misc_feature: MA Experiment 108547 PARAMETER Experiment Name: Zm_Imbibed_Seeds_P Parameter: Organism Value: Zea mays
  misc_feature: MA Experiment 108547 PARAMETER Experiment Name: Zm_Imbibed_Seeds_P Parameter: Plant Line Value: 35A19
  misc_feature: MA Experiment 108547 PARAMETER Experiment Name: Zm_Imbibed_Seeds_P Parameter: Tissue Value: Aerial vs. Embryo
  misc_feature: MA Experiment ID: 108687 Result: Down-regulated in Transcription
  misc_feature: MA Experiment 108687 PARAMETER Experiment Name: Zm_Embryos-Flowers__P Parameter: Tissue Value: Embryo vs. Aerial+
  misc_feature: MA Experiment ID: 108688 Result: Down-regulated in Transcription
  misc_feature: MA Experiment 108688 PARAMETER Experiment Name: Zm_Embryos-Flowers__P Parameter: Tissue Value: Immature Flowers vs. Aerial+
  misc_feature: MA Experiment ID: 20000479 Result: Down-regulated in Transcription
  misc_feature: MA Experiment 20000479 PARAMETER Experiment Name: Zm_Drought_P Parameter: Age (day) Value: 10
  misc_feature: MA Experiment 20000479 PARAMETER Experiment Name: Zm_Drought_P Parameter: Organism Value: Zea mays
  misc_feature: MA Experiment 20000479 PARAMETER Experiment Name: Zm_Drought_P Parameter: Plant Line Value: 35A19
  misc_feature: MA Experiment 20000479 PARAMETER Experiment Name: Zm_Drought_P Parameter: Timepoint (hr) Value: 48
  misc_feature: MA Experiment 20000479 PARAMETER Experiment Name: Zm_Drought_P Parameter: Tissue Value: Aerial
  misc_feature: MA Experiment 20000479 PARAMETER Experiment Name: Zm_Drought_P Parameter: Treatment Value: Drought vs. No Drought
  misc_feature: MA Experiment ID: 20000535 Result: Down-regulated in Transcription
  misc_feature: MA Experiment 20000535 PARAMETER Experiment Name: Zm_Hybrid_Seed_Dev_P Parameter: DAP Value: 30 vs. 12
  misc_feature: MA Experiment 20000535 PARAMETER Experiment Name: Zm_Hybrid_Seed_Dev_P Parameter: Organism Value: Zea mays
  misc_feature: MA Experiment 20000535 PARAMETER Experiment Name: Zm_Hybrid_Seed_Dev_P Parameter: Plant Line Value: 35A19
  misc_feature: MA Experiment 20000535 PARAMETER Experiment Name: Zm_Hybrid_Seed_Dev_P Parameter: Tissue Value: Embryo vs. Unfert Floret
  misc_feature: MA Experiment ID: 20000626 Result: Down-regulated in Transcription
  misc_feature: MA Experiment 20000626 PARAMETER Experiment Name: Zm_Herbicide-Treatments_P Parameter: Timepoint (hr) Value: 12
  misc_feature: MA Experiment 20000626 PARAMETER Experiment Name: Zm_Herbicide-Treatments_P Parameter: Tissue Value: Aerial
  misc_feature: MA Experiment 20000626 PARAMETER Experiment Name: Zm_Herbicide-Treatments_P Parameter: Treatment Value: Roundup vs. No Treatment
atctcctttcagtaacagtatgcagccttaggagaagctaagctgtcttctaactctctctctcgagttcatagtttttgctcttcctctctcatggtcacaatgcttgcagctagttctctagtgaacagcaacctcgcttgctcatcaaggatatcatcctgttcagacttcacatatagccactcctggcgtcccatacatgctatgaaactccatcagatgcgtgctgtgagctcaatacgtataagttgtgctgccactaaacctgcaaagactcctgctgaagaagaatggaaagttaagcggcaactgctatcagaaaagcgggtacgaagtgtcgatgtgaaggaagcactgcgccttcaaaaggaaaacaactttgtcattcttgatgtcaggccagaagcagagtttaaagaggctcatccacctggcgccatcaatgtacaaatatacagattaatcaaggaatggacagcgtgggatattgcgaggcgtgcagcgtttgcgttcttcggcatatttgctggaacagaagagaatcctgagttcatacagagtgttgatacgaaggttgggaaagatgcgaagataattgtggcatgctctacaggagggacactgaagccaacgcaaaatttccctgatgggaagcaatctcggtccctgatagctgcgtacttgttggtcctgaatggctacagcaacgtgtaccatctggaaggaggactttacacatggttcaaagaaggactaccagctgttgcaggagaagagtaagagagacattacgaacatagtgttcgcatgctggagagagtggagagtggagactagagttgcgaggacttgtagtgatgtgcttgcttcacagtcacagggttgtcgattgttgtgtacggattgagatgtcgaagatttctcctgccaatgtgatgctgtcct

SEQ ID NO: 13142 - protein, 229 aa, Zea mays subsp. mays
  peptide (1)..(229): Ceres Seq. ID no. 12347806
  misc_feature (84)..(220): Pfam Name: Rhodanese-like domain Pfam Description: Rhodanese-like domain
  misc_feature (49)..(229): Homolog of NCBI NO: 18417050 NR Description: rhodanese-like domain protein; protein id: supported by cDNA: 14002., supported by cDNA: gi_15215615, by cDNA: gi_20334877 [Arabidopsis thaliana]
  misc_feature (49)..(229): Homolog of NCBI NO: 21553366 NR Description: unknown [Arabidopsis thaliana]
  misc_feature (49)..(229): Homolog of NCBI NO: 7487511 NR Description: hypothetical protein T29A15.190 - Arabidopsis >gi|4469021|emb|CAB38282.1| hypothetical protein [Arabidopsis >gi|7269624|emb|CAB81420.1| hypothetical protein [Arabidopsis
  misc_feature (74)..(128): Homolog of NCBI NO: 30250144 NR Description: putative transmembrane protein [Nitrosomonas ATCC 19718] >gi|30139251|emb|CAD86124.1| putative transmembrane
  misc_feature (195)..(225): Homolog of NCBI NO: 30250144 NR Description: putative transmembrane protein [Nitrosomonas ATCC 19718] >gi|30139251|emb|CAD86124.1| putative transmembrane
MVTMLAASSLVNSNLACSSRISSCSDFTYSHSWRPIHAMKLHQMRAVSSIRISCAATKPAKTPAEEEWKVKRQLLSEKRVRSVDVKEALRLQKENNFVILDVRPEAEFKEAHPPGAINVQIYRLIKEWTAWDIARRAAFAFFGIFAGTEENPEFIQSVDTKVGKDAKIIVACSTGGTLKPTQNFPDGKQSRSLIAAYLLVLNGYSNVYHLEGGLYTWFKEGLPAVAGEE

SEQ ID NO: 13143 - protein, 226 aa, Zea mays subsp. mays
  peptide (1)..(226): Ceres Seq. ID no. 12347807
  misc_feature (81)..(217): Pfam Name: Rhodanese-like domain Pfam Description: Rhodanese-like domain
  misc_feature (46)..(226): Homolog of NCBI NO: 18417050 NR Description: rhodanese-like domain protein; protein id: supported by cDNA: 14002., supported by cDNA: gi_15215615, by cDNA: gi_20334877 [Arabidopsis thaliana]
  misc_feature (46)..(226): Homolog of NCBI NO: 21553366 NR Description: unknown [Arabidopsis thaliana]
  misc_feature (46)..(226): Homolog of NCBI NO: 7487511 NR Description: hypothetical protein T29A15.190 - Arabidopsis >gi|4469021|emb|CAB38282.1| hypothetical protein [Arabidopsis >gi|7269624|emb|CAB81420.1| hypothetical protein [Arabidopsis
  misc_feature (71)..(125): Homolog of NCBI NO: 30250144 NR Description: putative transmembrane protein [Nitrosomonas ATCC 19718] >gi|30139251|emb|CAD86124.1| putative transmembrane
  misc_feature (192)..(222): Homolog of NCBI NO: 30250144 NR Description: putative transmembrane protein [Nitrosomonas ATCC 19718] >gi|30139251|emb|CAD86124.1| putative transmembrane
MLAASSLVNSNLACSSRISSCSDFTYSHSWRPIHAMKLHQMRAVSSIRISCAATKPAKTPAEEEWKVKRQLLSEKRVRSVDVKEALRLQKENNFVILDVRPEAEFKEAHPPGAINVQIYRLIKEWTAWDIARRAAFAFFGIFAGTEENPEFIQSVDTKVGKDAKIIVACSTGGTLKPTQNFPDGKQSRSLIAAYLLVLNGYSNVYHLEGGLYTWFKEGLPAVAGEE

SEQ ID NO: 13144 - protein, 191 aa, Zea mays subsp. mays
  peptide (1)..(191): Ceres Seq. ID no. 12347808
  misc_feature (46)..(182): Pfam Name: Rhodanese-like domain Pfam Description: Rhodanese-like domain
  misc_feature (11)..(191): Homolog of NCBI NO: 18417050 NR Description: rhodanese-like domain protein; protein id: supported by cDNA: 14002., supported by cDNA: gi_15215615, by cDNA: gi_20334877 [Arabidopsis thaliana]
  misc_feature (11)..(191): Homolog of NCBI NO: 21553366 NR Description: unknown [Arabidopsis thaliana]
  misc_feature (11)..(191): Homolog of NCBI NO: 7487511 NR Description: hypothetical protein T29A15.190 - Arabidopsis >gi|4469021|emb|CAB38282.1| hypothetical protein [Arabidopsis >gi|7269624|emb|CAB81420.1| hypothetical protein [Arabidopsis
  misc_feature (36)..(90): Homolog of NCBI NO: 30250144 NR Description: putative transmembrane protein [Nitrosomonas ATCC 19718] >gi|30139251|emb|CAD86124.1| putative transmembrane
  misc_feature (157)..(187): Homolog of NCBI NO: 30250144 NR Description: putative transmembrane protein [Nitrosomonas ATCC 19718] >gi|30139251|emb|CAD86124.1| putative transmembrane
MKLHQMRAVSSIRISCAATKPAKTPAEEEWKVKRQLLSEKRVRSVDVKEALRLQKENNFVILDVRPEAEFKEAHPPGAINVQIYRLIKEWTAWDIARRAAFAFFGIFAGTEENPEFIQSVDTKVGKDAKIIVACSTGGTLKPTQNFPDGKQSRSLIAAYLLVLNGYSNVYHLEGGLYTWFKEGLPAVAGEE

SEQ ID NO: 13145 - DNA, 1784 bp, Zea mays subsp. mays
  misc_feature (1)..(1784): Ceres Seq. ID no. 12367303
  misc_feature: MA Experiment ID: 20000535 Result: Down-regulated in Transcription
  misc_feature: MA Experiment 20000535 PARAMETER Experiment Name: Zm_Hybrid_Seed_Dev_P Parameter: DAP Value: 30 vs. 12
  misc_feature: MA Experiment 20000535 PARAMETER Experiment Name: Zm_Hybrid_Seed_Dev_P Parameter: Organism Value: Zea mays
  misc_feature: MA Experiment 20000535 PARAMETER Experiment Name: Zm_Hybrid_Seed_Dev_P Parameter: Plant Line Value: 35A19
  misc_feature: MA Experiment 20000535 PARAMETER Experiment Name: Zm_Hybrid_Seed_Dev_P Parameter: Tissue Value: Embryo vs. Unfert Floret
cttggattggggagctccgcctccctctcctcaagtttgaccaaccctcacccacctccctccgtcgtctagtatgcttcttgcctcccgcctgcttcctccgccgccctcctccgccgcggccggttcctcctcatcctctctgactccgatcccaactcaaaacacagagaactctgaaagctaatcggcaatggataaccacatccatagtcagccagctgctaacctctactaccagttcggcatggggactgagcagcaatacccaccaccgttcgcctcaccaccatccaccaacatcccgcacatggactggaacccggccacgatgctagacaacctcaccttcatcgaggagaagatacagcaagtgaaggacgtcatccgcacaatggtggacaacgccgggcaggtgcaggtccagtgccaccaccaaggcaggcgagctgctggctcagaagcagaagcagcaggtggtcaacgcggacctgacatgccttatagttcagctcatctccaccgccggcagcctgctcccgtcactgaagaactcgtcgttcctcagccacccccaccctgctggccacgtggacatggctaaccatgttggcccaagctcgagcctagtgcctaatgcgatgaccgtttctgaagactatgaggagctgttcaagggatggaccgatggcggcattgaggtcgacgacgacggcgttcttgtcgaggagcaggaaattaccaaggacggagacagcctctcgtacgagctgctgcagctggaggaggacgagatactggcgccgcacacgcacttttgcaccatctgcgggaaagggttcaagcgggacgcgaacctgcggatgcacatgcgagggcacggcgacgagtacaagagcccggcggcgctggccaagccgccgagggacccgggcgcggagcaggagccggcgaagcggcggtactcgtgcccgttcgcggggtgcaagcggaacaagctgcacaaaagcttccagcccctcaagaccatcctgtgcgtgaagaaccactacaggcggagccactgcgagaagagccacacctgcggccggtgccacgccaagaagttctccatcgtggccgacctgaggacgcacgagaagcactgcggccgccgggacaggtgggtgtgctcctgcgggacgagtttctcgaggaaggacaagctcttcgcgcacgtcgccttgttccaaggtcacacgcccgcgttgtcgtcgccgctggaggaggagccgccgaaggcttgctcggaccagcaccagaccggccgtgctgggagccgtcgggaaccagcgaaagtcccagctggctcagtgggcggcggcagcggcagcagcttcgtgtggggtgcctcgtcctcaggggagaacagtgctctggatatcaaaggttttgttgatggatgcagtggtgacttcctctcgacggcgaactttggctccttcaacctcagcttcgggcctgctgacgggttcacaggagagccttctagtggtggttcgttctcgatgctacctcctgagcactttcagagtgctcagaagaaggggcagaactgaatatggataatctcagacagctttagatgtatgtatctgggcggcttcagatgcaccaccatcatctctggttcatgctcgtttttctccactgtagtgtagaacattgtcacagtttgagattgttgtctccttccttcctatgtacccgcctttatcgctggaagccgactgttgaactttcgc

SEQ ID NO: 13146 - protein, 333 aa, Zea mays subsp. mays
  peptide (1)..(333): Ceres Seq. ID no. 12367304
  misc_feature (73)..(95): Pfam Name: Zinc finger, C2H2 type Pfam Description: Zinc finger, C2H2 type
  misc_feature (31)..(277): Homolog of NCBI NO: 34908682 NR Description: putative zinc finger protein [Oryza sativa
  misc_feature (1)..(38): Homolog of NCBI NO: 34908682 NR Description: putative zinc finger protein [Oryza sativa
  misc_feature (1)..(319): Homolog of NCBI NO: 15218606 NR Description: zinc finger protein, putative; protein id: supported by cDNA: 40167. [Arabidopsis thaliana]
  misc_feature (1)..(319): Homolog of NCBI NO: 21593564 NR Description: zinc finger protein, putative [Arabidopsis
  misc_feature (9)..(242): Homolog of NCBI NO: 28376689 NR Description: putative zinc finger protein [Oryza sativa
  misc_feature (56)..(227): Homolog of NCBI NO: 10177236 NR Description: contains similarity to C2H2-type zinc finger [Arabidopsis thaliana] >gi|28466935|gb|AAO44076.1| At5g22890
  misc_feature (56)..(227): Homolog of NCBI NO: 30688719 NR Description: expressed protein [Arabidopsis thaliana]
  misc_feature (51)..(239): Homolog of NCBI NO: 10241636 NR Description: putative zinc finger protein [Oryza sativa
  misc_feature (51)..(237): Homolog of NCBI NO: 38346456 NR Description: OSJNBa0019G23.4 [Oryza sativa (japonica
  misc_feature (16)..(233): Homolog of NCBI NO: 28973719 NR Description: putative zinc finger protein [Arabidopsis
MANHVGPSSSLVPNAMTVSEDYEELFKGWTDGGIEVDDDGVLVEEQEITKDGDSLSYELLQLEEDEILAPHTHFCTICGKGFKRDANLRMHMRGHGDEYKSPAALAKPPRDPGAEQEPAKRRYSCPFAGCKRNKLHKSFQPLKTILCVKNHYRRSHCEKSHTCGRCHAKKFSIVADLRTHEKHCGRRDRWVCSCGTSFSRKDKLFAHVALFQGHTPALSSPLEEEPPKACSDQHQTGRAGSRREPAKVPAGSVGGGSGSSFVWGASSSGENSALDIKGFVDGCSGDFLSTANFGSFNLSFGPADGFTGEPSSGGSFSMLPPEHFQSAQKKGQN

SEQ ID NO: 13147 - protein, 318 aa, Zea mays subsp. mays
  peptide (1)..(318): Ceres Seq. ID no. 12367305
  misc_feature (58)..(80): Pfam Name: Zinc finger, C2H2 type Pfam Description: Zinc finger, C2H2 type
  misc_feature (16)..(262): Homolog of NCBI NO: 34908682 NR Description: putative zinc finger protein [Oryza sativa
  misc_feature (1)..(23): Homolog of NCBI NO: 34908682 NR Description: putative zinc finger protein [Oryza sativa
  misc_feature (1)..(304): Homolog of NCBI NO: 15218606 NR Description: zinc finger protein, putative; protein id: supported by cDNA: 40167. [Arabidopsis thaliana]
  misc_feature (1)..(304): Homolog of NCBI NO: 21593564 NR Description: zinc finger protein, putative [Arabidopsis
  misc_feature (1)..(227): Homolog of NCBI NO: 28376689 NR Description: putative zinc finger protein [Oryza sativa
  misc_feature (41)..(212): Homolog of NCBI NO: 10177236 NR Description: contains similarity to C2H2-type zinc finger [Arabidopsis thaliana] >gi|28466935|gb|AAO44076.1| At5g22890
  misc_feature (41)..(212): Homolog of NCBI NO: 30688719 NR Description: expressed protein [Arabidopsis thaliana]
  misc_feature (36)..(224): Homolog of NCBI NO: 10241636 NR Description: putative zinc finger protein [Oryza sativa
  misc_feature (36)..(222): Homolog of NCBI NO: 38346456 NR Description: OSJNBa0019G23.4 [Oryza sativa (japonica
  misc_feature (1)..(218): Homolog of NCBI NO: 28973719 NR Description: putative zinc finger protein [Arabidopsis
MTVSEDYEELFKGWTDGGIEVDDDGVLVEEQEITKDGDSLSYELLQLEEDEILAPHTHFCTICGKGFKRDANLRMHMRGHGDEYKSPAALAKPPRDPGAEQEPAKRRYSCPFAGCKRNKLHKSFQPLKTILCVKNHYRRSHCEKSHTCGRCHAKKFSIVADLRTHEKHCGRRDRWVCSCGTSFSRKDKLFAHVALFQGHTPALSSPLEEEPPKACSDQHQTGRAGSRREPAKVPAGSVGGGSGSSFVWGASSSGENSALDIKGFVDGCSGDFLSTANFGSFNLSFGPADGFTGEPSSGGSFSMLPPEHFQSAQKKGQN

SEQ ID NO: 13148 - protein, 244 aa, Zea mays subsp. mays
  peptide (1)..(244): Ceres Seq. ID no. 12367306
  misc_feature (1)..(188): Homolog of NCBI NO: 34908682 NR Description: putative zinc finger protein [Oryza sativa
  misc_feature (1)..(230): Homolog of NCBI NO: 15218606 NR Description: zinc finger protein, putative; protein id: supported by cDNA: 40167. [Arabidopsis thaliana]
  misc_feature (1)..(230): Homolog of NCBI NO: 21593564 NR Description: zinc finger protein, putative [Arabidopsis
  misc_feature (1)..(153): Homolog of NCBI NO: 28376689 NR Description: putative zinc finger protein [Oryza sativa
  misc_feature (1)..(138): Homolog of NCBI NO: 10177236 NR Description: contains similarity to C2H2-type zinc finger [Arabidopsis thaliana] >gi|28466935|gb|AAO44076.1| At5g22890
  misc_feature (1)..(138): Homolog of NCBI NO: 30688719 NR Description: expressed protein [Arabidopsis thaliana]
  misc_feature (1)..(150): Homolog of NCBI NO: 10241636 NR Description: putative zinc finger protein [Oryza sativa
  misc_feature (1)..(148): Homolog of NCBI NO: 38346456 NR Description: OSJNBa0019G23.4 [Oryza sativa (japonica
  misc_feature (1)..(144): Homolog of NCBI NO: 28973719 NR Description: putative zinc finger protein [Arabidopsis
  misc_feature (1)..(127): Homolog of NCBI NO: 15223781 NR Description: hypothetical protein; protein id: At1g51220.1 thaliana] >gi|18376498|emb|CAC86167.1| WIP5 protein [Arabidopsis
MHMRGHGDEYKSPAALAKPPRDPGAEQEPAKRRYSCPFAGCKRNKLHKSFQPLKTILCVKNHYRRSHCEKSHTCGRCHAKKFSIVADLRTHEKHCGRRDRWVCSCGTSFSRKDKLFAHVALFQGHTPALSSPLEEEPPKACSDQHQTGRAGSRREPAKVPAGSVGGGSGSSFVWGASSSGENSALDIKGFVDGCSGDFLSTANFGSFNLSFGPADGFTGEPSSGGSFSMLPPEHFQSAQKKGQN

SEQ ID NO: 13149 - DNA, 1500 bp, Zea mays subsp. mays
  misc_feature (1)..(1500): Ceres Seq. ID no. 12425157
  misc_feature: MA Experiment ID: 108522 Result: Up-regulated in Transcription
  misc_feature: MA Experiment 108522 PARAMETER Experiment Name: Zm_42deg_Heat_P Parameter: Age (day) Value: 8
  misc_feature: MA Experiment 108522 PARAMETER Experiment Name: Zm_42deg_Heat_P Parameter: Organism Value: Zea mays
  misc_feature: MA Experiment 108522 PARAMETER Experiment Name: Zm_42deg_Heat_P Parameter: Plant Line Value: 35A19
  misc_feature: MA Experiment 108522 PARAMETER Experiment Name: Zm_42deg_Heat_P Parameter: Temperature (deg C) Value: 42 vs. 22
  misc_feature: MA Experiment 108522 PARAMETER Experiment Name: Zm_42deg_Heat_P Parameter: Timepoint (hr) Value: 1
  misc_feature: MA Experiment 108522 PARAMETER Experiment Name: Zm_42deg_Heat_P Parameter: Tissue Value: Aerial
  misc_feature: MA Experiment ID: 108523 Result: Up-regulated in Transcription
  misc_feature: MA Experiment 108523 PARAMETER Experiment Name: Zm_42deg_Heat_P Parameter: Age (day) Value: 8
  misc_feature: MA Experiment 108523 PARAMETER Experiment Name: Zm_42deg_Heat_P Parameter: Organism Value: Zea mays
  misc_feature: MA Experiment 108523 PARAMETER Experiment Name: Zm_42deg_Heat_P Parameter: Plant Line Value: 35A19
  misc_feature: MA Experiment 108523 PARAMETER Experiment Name: Zm_42deg_Heat_P Parameter: Temperature (deg C) Value: 42 vs. 22
  misc_feature: MA Experiment 108523 PARAMETER Experiment Name: Zm_42deg_Heat_P Parameter: Timepoint (hr) Value: 6
  misc_feature: MA Experiment 108523 PARAMETER Experiment Name: Zm_42deg_Heat_P Parameter: Tissue Value: Aerial
  misc_feature: MA Experiment ID: 108527 Result: Up-regulated in Transcription
  misc_feature: MA Experiment 108527 PARAMETER Experiment Name: Zm_5mM_NO_P Parameter: Age (day) Value: 8
  misc_feature: MA Experiment 108527 PARAMETER Experiment Name: Zm_5mM_NO_P Parameter: Organism Value: Zea mays
  misc_feature: MA Experiment 108527 PARAMETER Experiment Name: Zm_5mM_NO_P Parameter: Plant Line Value: 35A19
  misc_feature: MA Experiment 108527 PARAMETER Experiment Name: Zm_5mM_NO_P Parameter: Timepoint (hr) Value: 6
  misc_feature: MA Experiment 108527 PARAMETER Experiment Name: Zm_5mM_NO_P Parameter: Tissue Value: Aerial
  misc_feature: MA Experiment 108527 PARAMETER Experiment Name: Zm_5mM_NO_P Parameter: Treatment Value: 5mM NO vs. No Treatment
  misc_feature: MA Experiment ID: 108533 Result: Up-regulated in Transcription
  misc_feature: MA Experiment 108533 PARAMETER Experiment Name: Zm_4deg_Cold_P Parameter: Age (hr) Value: 8
  misc_feature: MA Experiment 108533 PARAMETER Experiment Name: Zm_4deg_Cold_P Parameter: Organism Value: Zea mays
  misc_feature: MA Experiment 108533 PARAMETER Experiment Name: Zm_4deg_Cold_P Parameter: Plant Line Value: 35A19
  misc_feature: MA Experiment 108533 PARAMETER Experiment Name: Zm_4deg_Cold_P Parameter: Temperature (deg C) Value: 4 vs. 22
  misc_feature: MA Experiment 108533 PARAMETER Experiment Name: Zm_4deg_Cold_P Parameter: Timepoint (hr) Value: 1
  misc_feature: MA Experiment 108533 PARAMETER Experiment Name: Zm_4deg_Cold_P Parameter: Tissue Value: Aerial
  misc_feature: MA Experiment ID: 108559 Result: Up-regulated in Transcription
  misc_feature: MA Experiment 108559 PARAMETER Experiment Name: Zm_5mM_NO_P Parameter: Age (day) Value: 8
  misc_feature: MA Experiment 108559 PARAMETER Experiment Name: Zm_5mM_NO_P Parameter: Organism Value: Zea mays
  misc_feature: MA Experiment 108559 PARAMETER Experiment Name: Zm_5mM_NO_P Parameter: Plant Line Value: 35A19
  misc_feature: MA Experiment 108559 PARAMETER Experiment Name: Zm_5mM_NO_P Parameter: Timepoint (hr) Value: 12
  misc_feature: MA Experiment 108559 PARAMETER Experiment Name: Zm_5mM_NO_P Parameter: Tissue Value: Aerial
  misc_feature: MA Experiment 108559 PARAMETER Experiment Name: Zm_5mM_NO_P Parameter: Treatment Value: 5mM NO vs. No Treatment
gaaccaaccaaacctcaccgaatcgcaacgacagcgagaacgtccaaacgagcgcgagtctccggcgataaccaagagcgcgggcacgcaaagcggcgaagcgggaaggaagcagtaacgatggggcttgactattacaagatcctaggcgtcgacaagggcgccaccgatgacgacctcaagaaggcctaccgcaagctcgccatgaaatggcaccccgacaagaaccccaacaacaagaaggaggccgagaacaagttcaagcagatctcggaggcgtacgaggtgctgagcgacccgcagaagcgcgcggtgtacgaccagtacggcgaggagggtctcaaggggcaggtgccgccgccgggcgccggcggggcgggccccggcggcgcaaccttcttctccaccggcggcgacgggccgacggtgttccggttcaacccgcgcaacgcggaggacatcttcgccgagttcttcggcggctccagccccttcggcggtatgggcggcggtggcatgggcggcagcggcatggggggtgggatgcccggcatgcggagcggcgggacaaggttctcctcctccatcttcggggacgacatattcggctctgcgttccgcagcggcccggacgggcacggcatgcacgccggcgggcgggccgtgaaggcgccggccatagagcggaagctgccgtgcagcctcgaggagctgtacaagggcaccaccaagaagatgaagatctccagggaaatctctgacgccagtgggaagacgatcccagtggaagagatcctaacgatcgacgtgaagccggggtggaagaagggcaccaagatcacgttcccggagaagggcaacgagacgcccaacacgatcccggcggacctcgtcttcatcatcgacgagaagccgcacccggtgttcacccgcgacggcaacgacctggtggtgacccagaagatcccgctggcggaggccctgacggggtacaccgcgcacgtgacgacgctggacgggcgcagcctgacggtgcccatcagctccgtgatccacccgggctacgaggagntggtgcgaggggagggcatgccgatacccaaggacccgtccaggaagggcaacctccggatcaagttcgacatcaagttcccggcgaggctcacggcggaccagaagtccggcgtcaagaggctgctcgggcagtagagcgcgcttgtgttgttttgtattgtgtatcagacattttcgtgttggttcatcttgaactggggtggagggagctgccatttgcagcctccgcaacgacgacgacgatgacgaggccaccaagtgttgagtacagaacagctactgttgtacggtgtatggttgagaaacttgagatgtgtagcggaggattccttgtgcgaacttccagatcgtggtggttgtctgttcactggtccacgtcgttgcatttgcaacttgcaaggatcgcggatggagtaactgttggcc

SEQ ID NO: 13150 - protein, 402 aa, Zea mays subsp. mays
  peptide (1)..(402): Ceres Seq. ID no. 12425158
  misc_feature (278)..(399): Pfam Name: DnaJ C terminal region Pfam Description: DnaJ C terminal region
  misc_feature (41)..(172): Homolog of NCBI NO: 11863723 NR Description: DnaJ like protein [Lycopersicon esculentum]
  misc_feature (41)..(401): Homolog of NCBI NO: 15235310 NR Description: heat-shock protein; protein id: At4g28480.1, by cDNA: gi_14596114, supported by cDNA: gi_20148388 [Arabidopsis
  misc_feature (186)..(400): Homolog of NCBI NO: 15240968 NR Description: heat shock protein 40-like; protein id: supported by cDNA: 114622. [Arabidopsis thaliana]
  misc_feature (41)..(181): Homolog of NCBI NO: 15240968 NR Description: heat shock protein 40-like; protein id: supported by cDNA: 114622. [Arabidopsis thaliana]
  misc_feature (41)..(180): Homolog of NCBI NO: 6179940 NR Description: DnaJ-like protein [Nicotiana tabacum]
  misc_feature (177)..(401): Homolog of NCBI NO: 11863723 NR Description: DnaJ like protein [Lycopersicon esculentum]
  misc_feature (177)..(401): Homolog of NCBI NO: 6179940 NR Description: DnaJ-like protein [Nicotiana tabacum]
  misc_feature (41)..(401): Homolog of NCBI NO: 34904486 NR Description: putative heat shock protein 40 [Oryza sativa
  misc_feature (41)..(401): Homolog of NCBI NO: 21593202 NR Description: putative heat-shock protein [Arabidopsis thaliana]
  misc_feature (41)..(401): Homolog of NCBI NO: 15218515 NR Description: putative heat-shock protein; protein id: supported by cDNA: 37036., supported by cDNA: gi_13430679
  misc_feature (358)..(358): Xaa is any aa, unknown or other
EPTKPHRIATTARTSKRARVSGDNQERGHAKRRSGKEAVTMGLDYYKILGVDKGATDDDLKKAYRKLAMKWHPDKNPNNKKEAENKFKQISEAYEVLSDPQKRAVYDQYGEEGLKGQVPPPGAGGAGPGGATFFSTGGDGPTVFRFNPRNAEDIFAEFFGGSSPFGGMGGGGMGGSGMGGGMPGMRSGGTRFSSSIFGDDIFGSAFRSGPDGHGMHAGGRAVKAPAIERKLPCSLEELYKGTTKKMKISREISDASGKTIPVEEILTIDVKPGWKKGTKITFPEKGNETPNTIPADLVFIIDEKPHPVFTRDGNDLVVTQKIPLAEALTGYTAHVTTLDGRSLTVPISSVIHPGYEEXVRGEGMPIPKDPSRKGNLRIKFDIKFPARLTADQKSGVKRLLGQ

SEQ ID NO: 13151 - protein, 362 aa, Zea mays subsp. mays
  peptide (1)..(362): Ceres Seq. ID no. 12425159
  misc_feature (238)..(359): Pfam Name: DnaJ C terminal region Pfam Description: DnaJ C terminal region
  misc_feature (137)..(361): Homolog of NCBI NO: 6179940 NR Description: DnaJ-like protein [Nicotiana tabacum]
  misc_feature (1)..(140): Homolog of NCBI NO: 6179940 NR Description: DnaJ-like protein [Nicotiana tabacum]
  misc_feature (137)..(361): Homolog of NCBI NO: 11863723 NR Description: DnaJ like protein [Lycopersicon esculentum]
  misc_feature (1)..(132): Homolog of NCBI NO: 11863723 NR Description: DnaJ like protein [Lycopersicon esculentum]
  misc_feature (1)..(361): Homolog of NCBI NO: 15235310 NR Description: heat-shock protein; protein id: At4g28480.1, by cDNA: gi_14596114, supported by cDNA: gi_20148388 [Arabidopsis
  misc_feature (146)..(360): Homolog of NCBI NO: 15240968 NR Description: heat shock protein 40-like; protein id: supported by cDNA: 114622. [Arabidopsis thaliana]
  misc_feature (1)..(141): Homolog of NCBI NO: 15240968 NR Description: heat shock protein 40-like; protein id: supported by cDNA: 114622. [Arabidopsis thaliana]
  misc_feature (1)..(361): Homolog of NCBI NO: 34904486 NR Description: putative heat shock protein 40 [Oryza sativa
  misc_feature (1)..(361): Homolog of NCBI NO: 21593202 NR Description: putative heat-shock protein [Arabidopsis thaliana]
  misc_feature (1)..(361): Homolog of NCBI NO: 15218515 NR Description: putative heat-shock protein; protein id: supported by cDNA: 37036., supported by cDNA: gi_13430679
  misc_feature (318)..(318): Xaa is any aa, unknown or other
MGLDYYKILGVDKGATDDDLKKAYRKLAMKWHPDKNPNNKKEAENKFKQISEAYEVLSDPQKRAVYDQYGEEGLKGQVPPPGAGGAGPGGATFFSTGGDGPTVFRFNPRNAEDIFAEFFGGSSPFGGMGGGGMGGSGMGGGMPGMRSGGTRFSSSIFGDDIFGSAFRSGPDGHGMHAGGRAVKAPAIERKLPCSLEELYKGTTKKMKISREISDASGKTIPVEEILTIDVKPGWKKGTKITFPEKGNETPNTIPADLVFIIDEKPHPVFTRDGNDLVVTQKIPLAEALTGYTAHVTTLDGRSLTVPISSVIHPGYEEXVRGEGMPIPKDPSRKGNLRIKFDIKFPARLTADQKSGVKRLLGQ

SEQ ID NO: 13152 - protein, 334 aa, Zea mays subsp. mays
  peptide (1)..(334): Ceres Seq. ID no. 12425160
  misc_feature (210)..(331): Pfam Name: DnaJ C terminal region Pfam Description: DnaJ C terminal region
  misc_feature (109)..(333): Homolog of NCBI NO: 6179940 NR Description: DnaJ-like protein [Nicotiana tabacum]
  misc_feature (1)..(112): Homolog of NCBI NO: 6179940 NR Description: DnaJ-like protein [Nicotiana tabacum]
  misc_feature (109)..(333): Homolog of NCBI NO: 11863723 NR Description: DnaJ like protein [Lycopersicon esculentum]
  misc_feature (1)..(104): Homolog of NCBI NO: 11863723 NR Description: DnaJ like protein [Lycopersicon esculentum]
  misc_feature (1)..(333): Homolog of NCBI NO: 15235310 NR Description: heat-shock protein; protein id: At4g28480.1, by cDNA: gi_14596114, supported by cDNA: gi_20148388 [Arabidopsis
  misc_feature (118)..(332): Homolog of NCBI NO: 15240968 NR Description: heat shock protein 40-like; protein id: supported by cDNA: 114622. [Arabidopsis thaliana]
  misc_feature (1)..(113): Homolog of NCBI NO: 15240968 NR Description: heat shock protein 40-like; protein id: supported by cDNA: 114622. [Arabidopsis thaliana]
  misc_feature (1)..(333): Homolog of NCBI NO: 34904486 NR Description: putative heat shock protein 40 [Oryza sativa
  misc_feature (1)..(333): Homolog of NCBI NO: 21593202 NR Description: putative heat-shock protein [Arabidopsis thaliana]
  misc_feature (1)..(333): Homolog of NCBI NO: 15218515 NR Description: putative heat-shock protein; protein id: supported by cDNA: 37036., supported by cDNA: gi_13430679
  misc_feature (290)..(290): Xaa is any aa, unknown or other
MKWHPDKNPNNKKEAENKFKQISEAYEVLSDPQKRAVYDQYGEEGLKGQVPPPGAGGAGPGGATFFSTGGDGPTVFRFNPRNAEDIFAEFFGGSSPFGGMGGGGMGGSGMGGGMPGMRSGGTRFSSSIFGDDIFGSAFRSGPDGHGMHAGGRAVKAPAIERKLPCSLEELYKGTTKKMKISREISDASGKTIPVEEILTIDVKPGWKKGTKITFPEKGNETPNTIPADLVFIIDEKPHPVFTRDGNDLVVTQKIPLAEALTGYTAHVTTLDGRSLTVPISSVIHPGYEEXVRGEGMPIPKDPSRKGNLRIKFDIKFPARLTADQKSGVKRLLGQ

SEQ ID NO: 13153 - DNA, 625 bp, Zea mays subsp. mays
  misc_feature (1)..(625): Ceres Seq. ID no. 12355240
  misc_feature: MA Experiment ID: 108527 Result: Up-regulated in Transcription
  misc_feature: MA Experiment 108527 PARAMETER Experiment Name: Zm_5mM_NO_P Parameter: Age (day) Value: 8
  misc_feature: MA Experiment 108527 PARAMETER Experiment Name: Zm_5mM_NO_P Parameter: Organism Value: Zea mays
  misc_feature: MA Experiment 108527 PARAMETER Experiment Name: Zm_5mM_NO_P Parameter: Plant Line Value: 35A19
  misc_feature: MA Experiment 108527 PARAMETER Experiment Name: Zm_5mM_NO_P Parameter: Timepoint (hr) Value: 6
  misc_feature: MA Experiment 108527 PARAMETER Experiment Name: Zm_5mM_NO_P Parameter: Tissue Value: Aerial
  misc_feature: MA Experiment 108527 PARAMETER Experiment Name: Zm_5mM_NO_P Parameter: Treatment Value: 5mM NO vs. No Treatment
  misc_feature: MA Experiment ID: 108528 Result: Down-regulated in Transcription
  misc_feature: MA Experiment 108528 PARAMETER Experiment Name: Zm_Imbibed_Seeds_P Parameter: Age (day) Value: 5 vs. 2
  misc_feature: MA Experiment 108528 PARAMETER Experiment Name: Zm_Imbibed_Seeds_P Parameter: Organism Value: Zea mays
  misc_feature: MA Experiment 108528 PARAMETER Experiment Name: Zm_Imbibed_Seeds_P Parameter: Plant Line Value: 35A19
  misc_feature: MA Experiment 108528 PARAMETER Experiment Name: Zm_Imbibed_Seeds_P Parameter: Tissue Value: Aerial vs. Embryo
  misc_feature: MA Experiment ID: 108530 Result: Down-regulated in Transcription
  misc_feature: MA Experiment 108530 PARAMETER Experiment Name: Zm_Imbibed_Seeds_P Parameter: Age (day) Value: 6 vs. 2
  misc_feature: MA Experiment 108530 PARAMETER Experiment Name: Zm_Imbibed_Seeds_P Parameter: Organism Value: Zea mays
  misc_feature: MA Experiment 108530 PARAMETER Experiment Name: Zm_Imbibed_Seeds_P Parameter: Plant Line Value: 35A19
  misc_feature: MA Experiment 108530 PARAMETER Experiment Name: Zm_Imbibed_Seeds_P Parameter: Tissue Value: Aerial vs. Embryo
  misc_feature: MA Experiment ID: 108533 Result: Up-regulated in Transcription
  misc_feature: MA Experiment 108533 PARAMETER Experiment Name: Zm_4deg_Cold_P Parameter: Age (hr) Value: 8
  misc_feature: MA Experiment 108533 PARAMETER Experiment Name: Zm_4deg_Cold_P Parameter: Organism Value: Zea mays
  misc_feature: MA Experiment 108533 PARAMETER Experiment Name: Zm_4deg_Cold_P Parameter: Plant Line Value: 35A19
  misc_feature: MA Experiment 108533 PARAMETER Experiment Name: Zm_4deg_Cold_P Parameter: Temperature (deg C) Value: 4 vs. 22
  misc_feature: MA Experiment 108533 PARAMETER Experiment Name: Zm_4deg_Cold_P Parameter: Timepoint (hr) Value: 1
  misc_feature: MA Experiment 108533 PARAMETER Experiment Name: Zm_4deg_Cold_P Parameter: Tissue Value: Aerial
  misc_feature: MA Experiment ID: 108534 Result: Up-regulated in Transcription
  misc_feature: MA Experiment 108534 PARAMETER Experiment Name: Zm_4deg_Cold_P Parameter: Age (hr) Value: 8
  misc_feature: MA Experiment 108534 PARAMETER Experiment Name: Zm_4deg_Cold_P Parameter: Organism Value: Zea mays
  misc_feature: MA Experiment 108534 PARAMETER Experiment Name: Zm_4deg_Cold_P Parameter: Plant Line Value: 35A19
  misc_feature: MA Experiment 108534 PARAMETER Experiment Name: Zm_4deg_Cold_P Parameter: Temperature (deg C) Value: 4 vs. 22
  misc_feature: MA Experiment 108534 PARAMETER Experiment Name: Zm_4deg_Cold_P Parameter: Timepoint (hr) Value: 6
  misc_feature: MA Experiment 108534 PARAMETER Experiment Name: Zm_4deg_Cold_P Parameter: Tissue Value: Aerial
  misc_feature: MA Experiment ID: 108536 Result: Up-regulated in Transcription
  misc_feature: MA Experiment 108536 PARAMETER Experiment Name: Zm_Meristem_P Parameter: Age (day) Value: 8
  misc_feature: MA Experiment 108536 PARAMETER Experiment Name: Zm_Meristem_P Parameter: Organism Value: Zea mays
  misc_feature: MA Experiment 108536 PARAMETER Experiment Name: Zm_Meristem_P Parameter: Plant Line Value: 35A19
  misc_feature: MA Experiment 108536 PARAMETER Experiment Name: Zm_Meristem_P Parameter: Tissue Value: Shoot Meristem vs. Above Shoot Meristem
  misc_feature: MA Experiment ID: 108545 Result: Down-regulated in Transcription
  misc_feature: MA Experiment 108545 PARAMETER Experiment Name: Zm_Imbibed_Seeds_P Parameter: Age (day) Value: 3 vs. 2
  misc_feature: MA Experiment 108545 PARAMETER Experiment Name: Zm_Imbibed_Seeds_P Parameter: Organism Value: Zea mays
  misc_feature: MA Experiment 108545 PARAMETER Experiment Name: Zm_Imbibed_Seeds_P Parameter: Plant Line Value: 35A19
  misc_feature: MA Experiment 108545 PARAMETER Experiment Name: Zm_Imbibed_Seeds_P Parameter: Tissue Value: Aerial vs. Embryo
  misc_feature: MA Experiment ID: 108547 Result: Down-regulated in Transcription
  misc_feature: MA Experiment 108547 PARAMETER Experiment Name: Zm_Imbibed_Seeds_P Parameter: Age (day) Value: 4 vs. 2
  misc_feature: MA Experiment 108547 PARAMETER Experiment Name: Zm_Imbibed_Seeds_P Parameter: Organism Value: Zea mays
  misc_feature: MA Experiment 108547 PARAMETER Experiment Name: Zm_Imbibed_Seeds_P Parameter: Plant Line Value: 35A19
  misc_feature: MA Experiment 108547 PARAMETER Experiment Name: Zm_Imbibed_Seeds_P Parameter: Tissue Value: Aerial vs. Embryo
  misc_feature: MA Experiment ID: 108559 Result: Up-regulated in Transcription
  misc_feature: MA Experiment 108559 PARAMETER Experiment Name: Zm_5mM_NO_P Parameter: Age (day) Value: 8
  misc_feature: MA Experiment 108559 PARAMETER Experiment Name: Zm_5mM_NO_P Parameter: Organism Value: Zea mays
  misc_feature: MA Experiment 108559 PARAMETER Experiment Name: Zm_5mM_NO_P Parameter: Plant Line Value: 35A19
  misc_feature: MA Experiment 108559 PARAMETER Experiment Name: Zm_5mM_NO_P Parameter: Timepoint (hr) Value: 12
  misc_feature: MA Experiment 108559 PARAMETER Experiment Name: Zm_5mM_NO_P Parameter: Tissue Value: Aerial
  misc_feature: MA Experiment 108559 PARAMETER Experiment Name: Zm_5mM_NO_P Parameter: Treatment Value: 5mM NO vs. No Treatment
  misc_feature: MA Experiment ID: 108688 Result: Down-regulated in Transcription
  misc_feature: MA Experiment 108688 PARAMETER Experiment Name: Zm_Embryos-Flowers__P Parameter: Tissue Value: Immature Flowers vs. Aerial+
  misc_feature: MA Experiment ID: 20000533 Result: Up-regulated in Transcription
  misc_feature: MA Experiment 20000533 PARAMETER Experiment Name: Zm_0.001percent_MeJA_P Parameter: Age (day) Value: 11
  misc_feature: MA Experiment 20000533 PARAMETER Experiment Name: Zm_0.001percent_MeJA_P Parameter: Organism Value: Zea mays
  misc_feature: MA Experiment 20000533 PARAMETER Experiment Name: Zm_0.001percent_MeJA_P Parameter: Plant Line Value: 35A19
  misc_feature: MA Experiment 20000533 PARAMETER Experiment Name: Zm_0.001percent_MeJA_P Parameter: Timepoint (hr) Value: 72
  misc_feature: MA Experiment 20000533 PARAMETER Experiment Name: Zm_0.001percent_MeJA_P Parameter: Tissue Value: Aerial
  misc_feature: MA Experiment 20000533 PARAMETER Experiment Name: Zm_0.001percent_MeJA_P Parameter: Treatment Value: 0.001percent MeJA vs. No Treatment
  misc_feature: MA Experiment ID: 20000626 Result: Down-regulated in Transcription
  misc_feature: MA Experiment 20000626 PARAMETER Experiment Name: Zm_Herbicide-Treatments_P Parameter: Timepoint (hr) Value: 12
  misc_feature: MA Experiment 20000626 PARAMETER Experiment Name: Zm_Herbicide-Treatments_P Parameter: Tissue Value: Aerial
  misc_feature: MA Experiment 20000626 PARAMETER Experiment Name: Zm_Herbicide-Treatments_P Parameter: Treatment Value: Roundup vs. No Treatment
  misc_feature: MA Experiment ID: 20000629 Result: Down-regulated in Transcription
  misc_feature: MA Experiment 20000629 PARAMETER Experiment Name: Zm_Herbicide-Treatments_P Parameter: Timepoint (hr) Value: 12
  misc_feature: MA Experiment 20000629 PARAMETER Experiment Name: Zm_Herbicide-Treatments_P Parameter: Tissue Value: Aerial
  misc_feature: MA Experiment 20000629 PARAMETER Experiment Name: Zm_Herbicide-Treatments_P Parameter: Treatment Value: Trimec vs. No Treatment
  misc_feature: MA Experiment ID: 20000630 Result: Up-regulated in Transcription
  misc_feature: MA Experiment 20000630 PARAMETER Experiment Name: Zm_Herbicide-Treatments_P Parameter: Timepoint (hr) Value: 4
  misc_feature: MA Experiment 20000630 PARAMETER Experiment Name: Zm_Herbicide-Treatments_P Parameter: Tissue Value: Aerial
  misc_feature: MA Experiment 20000630 PARAMETER Experiment Name: Zm_Herbicide-Treatments_P Parameter: Treatment Value: Roundup vs. No Treatment
  misc_feature: MA Experiment ID: 20001605 Result: Up-regulated in Transcription
  misc_feature: MA Experiment 20001605 PARAMETER Experiment Name: Zm_50ppm_KNO3_L-to-H_P Parameter: Age (day) Value: 19
  misc_feature: MA Experiment 20001605 PARAMETER Experiment Name: Zm_50ppm_KNO3_L-to-H_P Parameter: Organism Value: Zea mays
  misc_feature: MA Experiment 20001605 PARAMETER Experiment Name: Zm_50ppm_KNO3_L-to-H_P Parameter: Plant Line Value: 35A19
  misc_feature: MA Experiment 20001605 PARAMETER Experiment Name: Zm_50ppm_KNO3_L-to-H_P Parameter: Timepoint (hr) Value: 4
  misc_feature: MA Experiment 20001605 PARAMETER Experiment Name: Zm_50ppm_KNO3_L-to-H_P Parameter: Tissue Value: Shoots
  misc_feature: MA Experiment 20001605 PARAMETER Experiment Name: Zm_50ppm_KNO3_L-to-H_P Parameter: Treatment Value: 50ppm KNO3 vs. 50ppm KCl
gcagtgcaaagcgtcaacgcaaacagaccaagatccagaagcaagaaagtgtttatagcctagccggtgcgcgcgcgagagggatagccgattatcatcaagctctgagctagcagagaagatgagcgcatcgtcgtccatgaccaagaaggcgtcgtcgttcgtggtggcggcgagcatgagcgcggtggaggcgctcaaggaccaggcggggctgtgccggtgggactacgcgctccgctccctctacaaccgcgcggccgccgccaataaggtcgtcgccggccgcgccgtcccgttgtcgttgtcgtcgtcccaaaccgcgggtggcagtggcagcgccgcggccgccggtagggccgccaggcccaggcgatcggaggaggagaagatgcacaaggcgtaccacctcgtctgctggggccctaactaattgttaggggcattctcttattaattactcctttatacacgctgtccgattcctccacttcttgttcgtacacatacagagatgtatctgcaaattttgtatgtgtaatccgtcctctggtggtttatgccacgagaattgcttattattgttgggtgataaacaaatggaaatgagaaattttgtgatgtg

SEQ ID NO: 13154 - protein, 103 aa, Zea mays subsp. mays
  peptide (1)..(103): Ceres Seq. ID no. 12355241
  misc_feature (3)..(103): Homolog of NCBI NO: 38344798 NR Description: OSJNBa0043L09.18 [Oryza sativa (japonica
  misc_feature (12)..(103): Homolog of NCBI NO: 38344799 NR Description: OSJNBa0043L09.19 [Oryza sativa (japonica
  misc_feature (12)..(103): Homolog of NCBI NO: 38344803 NR Description: OSJNBa0043L09.23 [Oryza sativa (japonica
  misc_feature (2)..(103): Homolog of NCBI NO: 38636812 NR Description: unknown protein [Oryza sativa (japonica
  misc_feature (12)..(103): Homolog of NCBI NO: 38344804 NR Description: OSJNBa0043L09.24 [Oryza sativa (japonica
  misc_feature (7)..(103): Homolog of NCBI NO: 15234987 NR Description: probable wound-induced protein; protein id: supported by cDNA: 1831. [Arabidopsis thaliana]
  misc_feature (12)..(103): Homolog of NCBI NO: 38344805 NR Description: OSJNBa0043L09.25 [Oryza sativa (japonica
  misc_feature (14)..(103): Homolog of NCBI NO: 82114 NR Description: wound-induced protein - tomato (fragment)
  misc_feature (7)..(103): Homolog of NCBI NO: 30681389 NR Description: wound-induced protein, putative [Arabidopsis >gi|26450739|dbj|BAC42478.1| unknown protein [Arabidopsis
MSASSSMTKKASSFVVAASMSAVEALKDQAGLCRWDYALRSLYNRAAAANKVVAGRAVPLSLSSSQTAGGSGSAAAAGRAARPRRSEEEKMHKAYHLVCWGPN

SEQ ID NO: 13155 - protein, 97 aa, Zea mays subsp. mays
  peptide (1)..(97): Ceres Seq. ID no. 12355242
  misc_feature (1)..(97): Homolog of NCBI NO: 38344798 NR Description: OSJNBa0043L09.18 [Oryza sativa (japonica
  misc_feature (6)..(97): Homolog of NCBI NO: 38344799 NR Description: OSJNBa0043L09.19 [Oryza sativa (japonica
  misc_feature (6)..(97): Homolog of NCBI NO: 38344803 NR Description: OSJNBa0043L09.23 [Oryza sativa (japonica
  misc_feature (1)..(97): Homolog of NCBI NO: 38636812 NR Description: unknown protein [Oryza sativa (japonica
  misc_feature (6)..(97): Homolog of NCBI NO: 38344804 NR Description: OSJNBa0043L09.24 [Oryza sativa (japonica
  misc_feature (1)..(97): Homolog of NCBI NO: 15234987 NR Description: probable wound-induced protein; protein id: supported by cDNA: 1831. [Arabidopsis thaliana]
  misc_feature (6)..(97): Homolog of NCBI NO: 38344805 NR Description: OSJNBa0043L09.25 [Oryza sativa (japonica
  misc_feature (8)..(97): Homolog of NCBI NO: 82114 NR Description: wound-induced protein - tomato (fragment)
  misc_feature (1)..(97): Homolog of NCBI NO: 30681389 NR Description: wound-induced protein, putative [Arabidopsis >gi|26450739|dbj|BAC42478.1| unknown protein [Arabidopsis
MTKKASSFVVAASMSAVEALKDQAGLCRWDYALRSLYNRAAAANKVVAGRAVPLSLSSSQTAGGSGSAAAAGRAARPRRSEEEKMHKAYHLVCWGPN

SEQ ID NO: 13156 - protein, 84 aa, Zea mays subsp. mays
  peptide (1)..(84): Ceres Seq. ID no. 12355243
  misc_feature (1)..(84): Homolog of NCBI NO: 38344798 NR Description: OSJNBa0043L09.18 [Oryza sativa (japonica
  misc_feature (1)..(84): Homolog of NCBI NO: 38344799 NR Description: OSJNBa0043L09.19 [Oryza sativa (japonica
  misc_feature (1)..(84): Homolog of NCBI NO: 38344803 NR Description: OSJNBa0043L09.23 [Oryza sativa (japonica
  misc_feature (1)..(84): Homolog of NCBI NO: 38636812 NR Description: unknown protein [Oryza sativa (japonica
  misc_feature (1)..(84): Homolog of NCBI NO: 38344804 NR Description: OSJNBa0043L09.24 [Oryza sativa (japonica
  misc_feature (1)..(84): Homolog of NCBI NO: 15234987 NR Description: probable wound-induced protein; protein id: supported by cDNA: 1831. [Arabidopsis thaliana]
  misc_feature (1)..(84): Homolog of NCBI NO: 38344805 NR Description: OSJNBa0043L09.25 [Oryza sativa (japonica
  misc_feature (1)..(84): Homolog of NCBI NO: 82114 NR Description: wound-induced protein - tomato (fragment)
  misc_feature (1)..(84): Homolog of NCBI NO: 30681389 NR Description: wound-induced protein, putative [Arabidopsis >gi|26450739|dbj|BAC42478.1| unknown protein [Arabidopsis
MSAVEALKDQAGLCRWDYALRSLYNRAAAANKVVAGRAVPLSLSSSQTAGGSGSAAAAGRAARPRRSEEEKMHKAYHLVCWGPN

SEQ ID NO: 13157 - DNA, 1999 bp, Zea mays subsp. mays
  misc_feature (1)..(1999): Ceres Seq. ID no. 12345205
  misc_feature: MA Experiment ID: 20000488 Result: Down-regulated in Transcription
  misc_feature: MA Experiment 20000488 PARAMETER Experiment Name: Zm_50mM_NH4NO3_L_to_H_P Parameter: Organism Value: Zea mays
  misc_feature: MA Experiment 20000488 PARAMETER Experiment Name: Zm_50mM_NH4NO3_L_to_H_P Parameter: Timepoint (hr) Value: 8
  misc_feature: MA Experiment 20000488 PARAMETER Experiment Name: Zm_50mM_NH4NO3_L_to_H_P Parameter: Tissue Value: Leaves
  misc_feature: MA Experiment 20000488 PARAMETER Experiment Name: Zm_50mM_NH4NO3_L_to_H_P Parameter: Treatment Value: 50mM NH4NO3 vs. 100mM Mannitol
  misc_feature: MA Experiment ID: 20000534 Result: Down-regulated in Transcription
  misc_feature: MA Experiment 20000534 PARAMETER Experiment Name: Zm_Hybrid_Pollen_P Parameter: Age (day) Value: 8
  misc_feature: MA Experiment 20000534 PARAMETER Experiment Name: Zm_Hybrid_Pollen_P Parameter: Organism Value: Zea mays
  misc_feature: MA Experiment 20000534 PARAMETER Experiment Name: Zm_Hybrid_Pollen_P Parameter: Plant Line Value: 35A19
  misc_feature: MA Experiment 20000534 PARAMETER Experiment Name: Zm_Hybrid_Pollen_P Parameter: Tissue Value: Pollen vs. Aerial
gagacgaaaacgagaagatcccatccactaccgcccggtcgccgtcctcccttcccgccgcgccgctccgcttgctcgccgcagatcgccctcaggattttattccgccctccgtctccgggctcgcttggatcgagatgggcgtctgcgtgtccaaggccgcctcctcctgctgctgctgctgctgctgccgcgagccgcacaacggggttactaacgacaggactgatgctgtaacggatgacgaggaggcatacgccctgcctgcgttccaggagtttaccttcgagcagttgcggctagctacatcagggtttgcggtggagaacatcgtgtctgagcagggtgagaaggctcccaatgtggtatacaaggggaagctccatgcccagcgccgcgtcgccgtcaagcgcttcaaccgctctgcctggcccgacccgcgccagttcctggaagaagctagatcagttggcctgctccgaagcaaaaggttggcaaatttgcttggctgttgctgcgaaggtgatgaaaggttgcttgttgcagaatacatgcccaatgatacgctcgcgaaacatcttttccactgggagtcacaatcaatgaaatggaccatgagattaagggttgttctctgtcttgctgaggctttagaatattgcaccaacaggggccgtgctctctaccatgatctcaatgcctatagagctctgtttgatgatgattgtaaccctagactttcctgttttggcctcatgaagaacagtcgtgatggaaaaagttatagcaccaatttggcatttacgcctccagaatacatgaggactggacgtattactcctgaaagtgtcatacacagctttggaaccttactgattgatgttcttagtgggaaacatattcctcctagccatgcccttgacctgattcgggaccgaaacttcaatatgctcttagactcatgtttagagggtcaattttcaaatgaggaaggggcagaaatggtacgattagcttcaaggtgccttcactatgaaccccgtgaacgacctaatgtccgatcacttgtgcaagtattgactcctctacagagggatgttgagactccatcttatgtgctgatgggtgttccacgtggcggtgcatcttctatccaaccattgcatctttcccctcttgccgaagcttgttccagaaaggatctgacagcaatacatgaaattctagaaaagacaggctacaaggatgatgaggggactgcaaatgagctctcgtttcagatgtggacaaatcagatgcaagatacactgaactcaaaaaagaagggtgacaatgcttttcgacaaaaggattttactactgccattgattgctattcccagttcattgaagttggtacaatggtatctccaaccatttatgctcgacgctgcttatcatatctgatgaatgacatgccacaggaggcattgaatgatgcagtgcatgctctggtaatatctccgacatggtcaacagcattctatcttcaggcagcagcacttttatcacaaggcatggagaatgaagcccaagaagcactcagggatggttatagcctagagcaaagtagcagcggtggacattgagtgtgaacagatttgtagtcccccaaatgcacataatttcaggtgcttgtttgaagagagtattattgtctatggaagcagccatcggatgtacatatggaagaaagcgataacagaggctggctctgaaggagagggcaaagacatccgaggtgaataagtgcagtagacaggaaattaatggggtgaagaaggtgaaacatttttcttggtcctactgaaacaaaagaaggaaaacgtagggggaaaaaggttgctgatgtacatgtctatccttgttggtggtagcctggtaggtgcgtaaacctgtacagcaagcgtggtttttaccttgtctttgttcttcgtttcttatgcgttagctcccattg

SEQ ID NO: 13158 - protein, 541 aa, Zea mays subsp. mays
  peptide (1)..(541): Ceres Seq. ID no. 12345206
  misc_feature (46)..(541): Homolog of NCBI NO: 32488705 NR Description: OSJNBa0088H09.6 [Oryza sativa (japonica
  misc_feature (46)..(534): Homolog of NCBI NO: 22327962 NR Description: protein kinase - like; protein id: At5g59010.1, by cDNA: gi_19715585 [Arabidopsis thaliana]
  misc_feature (57)..(539): Homolog of NCBI NO: 22328189 NR Description: hypothetical protein; protein id: At4g00710.1, by cDNA: gi_17064837, supported by cDNA: gi_20259853 [Arabidopsis >gi|17064838|gb|AAL32573.1| Unknown protein [Arabidopsis
  misc_feature (46)..(534): Homolog of NCBI NO: 15237604 NR Description: protein kinase-like; protein id: At5g41260.1
  misc_feature (88)..(538): Homolog of NCBI NO: 15232406 NR Description: protein kinase -like protein; protein id: supported by cDNA: 150889., supported by cDNA: gi_15450845
  misc_feature (88)..(538): Homolog of NCBI NO: 21553556 NR Description: protein kinase-like protein [Arabidopsis thaliana]
  misc_feature (149)..(362): Homolog of NCBI NO: 6633851 NR Description: F2K11.13 [Arabidopsis thaliana]
  misc_feature (389)..(534): Homolog of NCBI NO: 6633851 NR Description: F2K11.13 [Arabidopsis thaliana]
  misc_feature (83)..(150): Homolog of NCBI NO: 6633851 NR Description: F2K11.13 [Arabidopsis thaliana]
  misc_feature (44)..(539): Homolog of NCBI NO: 7486564 NR Description: hypothetical protein F6N23.9 - Arabidopsis >gi|3047104|gb|AAC13615.1| F6N23.9 gene product [Arabidopsis >gi|7267410|emb|CAB80880.1| hypothetical protein [Arabidopsis
DENEKIPSTTARSPSSLPAAPLRLLAADRPQDFIPPSVSGLAWIEMGVCVSKAASSCCCCCCCREPHNGVTNDRTDAVTDDEEAYALPAFQEFTFEQLRLATSGFAVENIVSEQGEKAPNVVYKGKLHAQRRVAVKRFNRSAWPDPRQFLEEARSVGLLRSKRLANLLGCCCEGDERLLVAEYMPNDTLAKHLFHWESQSMKWTMRLRVVLCLAEALEYCTNRGRALYHDLNAYRALFDDDCNPRLSCFGLMKNSRDGKSYSTNLAFTPPEYMRTGRITPESVIHSFGTLLIDVLSGKHIPPSHALDLIRDRNFNMLLDSCLEGQFSNEEGAEMVRLASRCLHYEPRERPNVRSLVQVLTPLQRDVETPSYVLMGVPRGGASSIQPLHLSPLAEACSRKDLTAIHEILEKTGYKDDEGTANELSFQMWTNQMQDTLNSKKKGDNAFRQKDFTTAIDCYSQFIEVGTMVSPTIYARRCLSYLMNDMPQEALNDAVHALVISPTWSTAFYLQAAALLSQGMENEAQEALRDGYSLEQSSSGGH

SEQ ID NO: 13159 - protein, 496 aa, Zea mays subsp. mays
  peptide (1)..(496): Ceres Seq. ID no. 12345207
  misc_feature (1)..(496): Homolog of NCBI NO: 32488705 NR Description: OSJNBa0088H09.6 [Oryza sativa (japonica
  misc_feature (1)..(489): Homolog of NCBI NO: 22327962 NR Description: protein kinase - like; protein id: At5g59010.1, by cDNA: gi_19715585 [Arabidopsis thaliana]
  misc_feature (12)..(494): Homolog of NCBI NO: 22328189 NR Description: hypothetical protein; protein id: At4g00710.1, by cDNA: gi_17064837, supported by cDNA: gi_20259853 [Arabidopsis >gi|17064838|gb|AAL32573.1| Unknown protein [Arabidopsis
  misc_feature (1)..(489): Homolog of NCBI NO: 15237604 NR Description: protein kinase-like; protein id: At5g41260.1
  misc_feature (43)..(493): Homolog of NCBI NO: 15232406 NR Description: protein kinase -like protein; protein id: supported by cDNA: 150889., supported by cDNA: gi_15450845
  misc_feature (43)..(493): Homolog of NCBI NO: 21553556 NR Description: protein kinase-like protein [Arabidopsis thaliana]
  misc_feature (104)..(317): Homolog of NCBI NO: 6633851 NR Description: F2K11.13 [Arabidopsis thaliana]
  misc_feature (344)..(489): Homolog of NCBI NO: 6633851 NR Description: F2K11.13 [Arabidopsis thaliana]
  misc_feature (38)..(105): Homolog of NCBI NO: 6633851 NR Description: F2K11.13 [Arabidopsis thaliana]
  misc_feature (1)..(494): Homolog of NCBI NO: 7486564 NR Description: hypothetical protein F6N23.9 - Arabidopsis >gi|3047104|gb|AAC13615.1| F6N23.9 gene product [Arabidopsis >gi|7267410|emb|CAB80880.1| hypothetical protein [Arabidopsis
MGVCVSKAASSCCCCCCCREPHNGVTNDRTDAVTDDEEAYALPAFQEFTFEQLRLATSGFAVENIVSEQGEKAPNVVYKGKLHAQRRVAVKRFNRSAWPDPRQFLEEARSVGLLRSKRLANLLGCCCEGDERLLVAEYMPNDTLAKHLFHWESQSMKWTMRLRVVLCLAEALEYCTNRGRALYHDLNAYRALFDDDCNPRLSCFGLMKNSRDGKSYSTNLAFTPPEYMRTGRITPESVIHSFGTLLIDVLSGKHIPPSHALDLIRDRNFNMLLDSCLEGQFSNEEGAEMVRLASRCLHYEPRERPNVRSLVQVLTPLQRDVETPSYVLMGVPRGGASSIQPLHLSPLAEACSRKDLTAIHEILEKTGYKDDEGTANELSFQMWTNQMQDTLNSKKKGDNAFRQKDFTTAIDCYSQFIEVGTMVSPTIYARRCLSYLMNDMPQEALNDAVHALVISPTWSTAFYLQAAALLSQGMENEAQEALRDGYSLEQSSSGGH

SEQ ID NO: 13160 - protein, 358 aa, Zea mays subsp. mays
  peptide (1)..(358): Ceres Seq. ID no. 12345208
  misc_feature (1)..(358): Homolog of NCBI NO: 32488705 NR Description: OSJNBa0088H09.6 [Oryza sativa (japonica
  misc_feature (1)..(351): Homolog of NCBI NO: 22327962 NR Description: protein kinase - like; protein id: At5g59010.1, by cDNA: gi_19715585 [Arabidopsis thaliana]
  misc_feature (1)..(356): Homolog of NCBI NO: 22328189 NR Description: hypothetical protein; protein id: At4g00710.1, by cDNA: gi_17064837, supported by cDNA: gi_20259853 [Arabidopsis >gi|17064838|gb|AAL32573.1| Unknown protein [Arabidopsis
  misc_feature (1)..(351): Homolog of NCBI NO: 15237604 NR Description: protein kinase-like; protein id: At5g41260.1
  misc_feature (1)..(355): Homolog of NCBI NO: 15232406 NR Description: protein kinase -like protein; protein id: supported by cDNA: 150889., supported by cDNA: gi_15450845
  misc_feature (1)..(355): Homolog of NCBI NO: 21553556 NR Description: protein kinase-like protein [Arabidopsis thaliana]
  misc_feature (1)..(179): Homolog of NCBI NO: 6633851 NR Description: F2K11.13 [Arabidopsis thaliana]
  misc_feature (206)..(351): Homolog of NCBI NO: 6633851 NR Description: F2K11.13 [Arabidopsis thaliana]
  misc_feature (1)..(356): Homolog of NCBI NO: 7486564 NR Description: hypothetical protein F6N23.9 - Arabidopsis >gi|3047104|gb|AAC13615.1| F6N23.9 gene product [Arabidopsis >gi|7267410|emb|CAB80880.1| hypothetical protein [Arabidopsis
  misc_feature (1)..(351): Homolog of NCBI NO: 15223469 NR Description: protein kinase, putative; protein id: At1g01740.1
MPNDTLAKHLFHWESQSMKWTMRLRVVLCLAEALEYCTNRGRALYHDLNAYRALFDDDCNPRLSCFGLMKNSRDGKSYSTNLAFTPPEYMRTGRITPESVIHSFGTLLIDVLSGKHIPPSHALDLIRDRNFNMLLDSCLEGQFSNEEGAEMVRLASRCLHYEPRERPNVRSLVQVLTPLQRDVETPSYVLMGVPRGGASSIQPLHLSPLAEACSRKDLTAIHEILEKTGYKDDEGTANELSFQMWTNQMQDTLNSKKKGDNAFRQKDFTTAIDCYSQFIEVGTMVSPTIYARRCLSYLMNDMPQEALNDAVHALVISPTWSTAFYLQAAALLSQGMENEAQEALRDGYSLEQSSSGGH

SEQ ID NO: 13161 - DNA, 2095 bp, Zea mays subsp. mays
  misc_feature (1)..(2095): Ceres Seq. ID no. 12351850
  misc_feature: MA Experiment ID: 108504 Result: Up-regulated in Transcription
  misc_feature: MA Experiment 108504 PARAMETER Experiment Name: Zm_Drought_P Parameter: Age (day) Value: 8
  misc_feature: MA Experiment 108504 PARAMETER Experiment Name: Zm_Drought_P Parameter: Organism Value: Zea mays
  misc_feature: MA Experiment 108504 PARAMETER Experiment Name: Zm_Drought_P Parameter: Plant Line Value: 35A19
  misc_feature: MA Experiment 108504 PARAMETER Experiment Name: Zm_Drought_P Parameter: Timepoint (hr) Value: 12
  misc_feature: MA Experiment 108504 PARAMETER Experiment Name: Zm_Drought_P Parameter: Tissue Value: Aerial
  misc_feature: MA Experiment 108504 PARAMETER Experiment Name: Zm_Drought_P Parameter: Treatment Value: Drought vs. No Drought
  misc_feature: MA Experiment ID: 108528 Result: Down-regulated in Transcription
  misc_feature: MA Experiment 108528 PARAMETER Experiment Name: Zm_Imbibed_Seeds_P Parameter: Age (day) Value: 5 vs. 2
  misc_feature: MA Experiment 108528 PARAMETER Experiment Name: Zm_Imbibed_Seeds_P Parameter: Organism Value: Zea mays
  misc_feature: MA Experiment 108528 PARAMETER Experiment Name: Zm_Imbibed_Seeds_P Parameter: Plant Line Value: 35A19
  misc_feature: MA Experiment 108528 PARAMETER Experiment Name: Zm_Imbibed_Seeds_P Parameter: Tissue Value: Aerial vs. Embryo
  misc_feature: MA Experiment ID: 108529 Result: Down-regulated in Transcription
  misc_feature: MA Experiment 108529 PARAMETER Experiment Name: Zm_Imbibed_Seeds_P Parameter: Age (day) Value: 5 vs. 2
  misc_feature: MA Experiment 108529 PARAMETER Experiment Name: Zm_Imbibed_Seeds_P Parameter: Organism Value: Zea mays
  misc_feature: MA Experiment 108529 PARAMETER Experiment Name: Zm_Imbibed_Seeds_P Parameter: Plant Line Value: 35A19
  misc_feature: MA Experiment 108529 PARAMETER Experiment Name: Zm_Imbibed_Seeds_P Parameter: Tissue Value: Roots vs. Embryo
  misc_feature: MA Experiment ID: 108530 Result: Down-regulated in Transcription
  misc_feature: MA Experiment 108530 PARAMETER Experiment Name: Zm_Imbibed_Seeds_P Parameter: Age (day) Value: 6 vs. 2
  misc_feature: MA Experiment 108530 PARAMETER Experiment Name: Zm_Imbibed_Seeds_P Parameter: Organism Value: Zea mays
  misc_feature: MA Experiment 108530 PARAMETER Experiment Name: Zm_Imbibed_Seeds_P Parameter: Plant Line Value: 35A19
  misc_feature: MA Experiment 108530 PARAMETER Experiment Name: Zm_Imbibed_Seeds_P Parameter: Tissue Value: Aerial vs. Embryo
  misc_feature: MA Experiment ID: 108535 Result: Up-regulated in Transcription
  misc_feature: MA Experiment 108535 PARAMETER Experiment Name: Zm_Meristem_P Parameter: Age (day) Value: 8
  misc_feature: MA Experiment 108535 PARAMETER Experiment Name: Zm_Meristem_P Parameter: Organism Value: Zea mays
  misc_feature: MA Experiment 108535 PARAMETER Experiment Name: Zm_Meristem_P Parameter: Plant Line Value: 35A19
  misc_feature: MA Experiment 108535 PARAMETER Experiment Name: Zm_Meristem_P Parameter: Tissue Value: Root Meristem vs. Above Root Meristem
  misc_feature: MA Experiment ID: 108543 Result: Up-regulated in Transcription
  misc_feature: MA Experiment ID: 108547 Result: Down-regulated in Transcription
  misc_feature: MA Experiment 108547 PARAMETER Experiment Name: Zm_Imbibed_Seeds_P Parameter: Age (day) Value: 4 vs. 2
  misc_feature: MA Experiment 108547 PARAMETER Experiment Name: Zm_Imbibed_Seeds_P Parameter: Organism Value: Zea mays
  misc_feature: MA Experiment 108547 PARAMETER Experiment Name: Zm_Imbibed_Seeds_P Parameter: Plant Line Value: 35A19
  misc_feature: MA Experiment 108547 PARAMETER Experiment Name: Zm_Imbibed_Seeds_P Parameter: Tissue Value: Aerial vs. Embryo
  misc_feature: MA Experiment ID: 108556 Result: Up-regulated in Transcription
  misc_feature: MA Experiment 108556 PARAMETER Experiment Name: Zm_Drought_P Parameter: Age (day) Value: 9
  misc_feature: MA Experiment 108556 PARAMETER Experiment Name: Zm_Drought_P Parameter: Organism Value: Zea mays
  misc_feature: MA Experiment 108556 PARAMETER Experiment Name: Zm_Drought_P Parameter: Plant Line Value: 35A19
  misc_feature: MA Experiment 108556 PARAMETER Experiment Name: Zm_Drought_P Parameter: Timepoint (hr) Value: 24
  misc_feature: MA Experiment 108556 PARAMETER Experiment Name: Zm_Drought_P Parameter: Tissue Value: Aerial
  misc_feature: MA Experiment 108556 PARAMETER Experiment Name: Zm_Drought_P Parameter: Treatment Value: Drought vs. No Drought
  misc_feature: MA Experiment ID: 108597 Result: Up-regulated in Transcription
  misc_feature: MA Experiment 108597 PARAMETER Experiment Name: Zm_100uM_ABA_P Parameter: Age (day) Value: 9
  misc_feature: MA Experiment 108597 PARAMETER Experiment Name: Zm_100uM_ABA_P Parameter: Organism Value: Zea mays
  misc_feature: MA Experiment 108597 PARAMETER Experiment Name: Zm_100uM_ABA_P Parameter: Plant Line Value: 35A19
  misc_feature: MA Experiment 108597 PARAMETER Experiment Name: Zm_100uM_ABA_P Parameter: Timepoint (hr) Value: 24
  misc_feature: MA Experiment 108597 PARAMETER Experiment Name: Zm_100uM_ABA_P Parameter: Tissue Value: Aerial
  misc_feature: MA Experiment 108597 PARAMETER Experiment Name: Zm_100uM_ABA_P Parameter: Treatment Value: 100uM ABA vs. No Treatment
  misc_feature: MA Experiment ID: 108689 Result: Up-regulated in Transcription
  misc_feature: MA Experiment 108689 PARAMETER Experiment Name: Zm_Drought_Roots_P Parameter: Age (day) Value: 9
  misc_feature: MA Experiment 108689 PARAMETER Experiment Name: Zm_Drought_Roots_P Parameter: Organism Value: Zea mays
  misc_feature: MA Experiment 108689 PARAMETER Experiment Name: Zm_Drought_Roots_P Parameter: Plant Line Value: 35A19
  misc_feature: MA Experiment 108689 PARAMETER Experiment Name: Zm_Drought_Roots_P Parameter: Timepoint (hr) Value: 24
  misc_feature: MA Experiment 108689 PARAMETER Experiment Name: Zm_Drought_Roots_P Parameter: Tissue Value: Roots
  misc_feature: MA Experiment 108689 PARAMETER Experiment Name: Zm_Drought_Roots_P Parameter: Treatment Value: Drought vs. No Drought
  misc_feature: MA Experiment ID: 20000108 Result: Up-regulated in Transcription
  misc_feature: MA Experiment 20000108 PARAMETER Experiment Name: Zm_Root-Tips_P Parameter: Age (day) Value: 12
  misc_feature: MA Experiment 20000108 PARAMETER Experiment Name: Zm_Root-Tips_P Parameter: Organism Value: Zea mays
  misc_feature: MA Experiment 20000108 PARAMETER Experiment Name: Zm_Root-Tips_P Parameter: Tissue Value: Root tips vs. Root mid region    35
  misc_feature: MA Experiment 20000108 PARAMETER Experiment Name: Zm_Root-Tips_P Parameter: Tissue Value: Root tips vs. Root mid region   Sequence Listing-Misc Features (4)
  misc_feature: MA Experiment ID: 20000477 Result: Up-regulated in Transcription
  misc_feature: MA Experiment 20000477 PARAMETER Experiment Name: Zm_5mM_SA_P Parameter: Age (day) Value: 10
  misc_feature: MA Experiment 20000477 PARAMETER Experiment Name: Zm_5mM_SA_P Parameter: Organism Value: Zea mays
  misc_feature: MA Experiment 20000477 PARAMETER Experiment Name: Zm_5mM_SA_P Parameter: Plant Line Value: 35A19
  misc_feature: MA Experiment 20000477 PARAMETER Experiment Name: Zm_5mM_SA_P Parameter: Timepoint (hr) Value: 48
  misc_feature: MA Experiment 20000477 PARAMETER Experiment Name: Zm_5mM_SA_P Parameter: Tissue Value: Aerial
  misc_feature: MA Experiment 20000477 PARAMETER Experiment Name: Zm_5mM_SA_P Parameter: Treatment Value: 5mM SA vs. No Treatment
  misc_feature: MA Experiment ID: 20000478 Result: Up-regulated in Transcription
  misc_feature: MA Experiment 20000478 PARAMETER Experiment Name: Zm_5mM_SA_P Parameter: Age (day) Value: 11
  misc_feature: MA Experiment 20000478 PARAMETER Experiment Name: Zm_5mM_SA_P Parameter: Organism Value: Zea mays
  misc_feature: MA Experiment 20000478 PARAMETER Experiment Name: Zm_5mM_SA_P Parameter: Plant Line Value: 35A19
  misc_feature: MA Experiment 20000478 PARAMETER Experiment Name: Zm_5mM_SA_P Parameter: Timepoint (hr) Value: 72
  misc_feature: MA Experiment 20000478 PARAMETER Experiment Name: Zm_5mM_SA_P Parameter: Tissue Value: Aerial
  misc_feature: MA Experiment 20000478 PARAMETER Experiment Name: Zm_5mM_SA_P Parameter: Treatment Value: 5mM SA vs. No Treatment
  misc_feature: MA Experiment ID: 20000479 Result: Up-regulated in Transcription
  misc_feature: MA Experiment 20000479 PARAMETER Experiment Name: Zm_Drought_P Parameter: Age (day) Value: 10
  misc_feature: MA Experiment 20000479 PARAMETER Experiment Name: Zm_Drought_P Parameter: Organism Value: Zea mays
  misc_feature: MA Experiment 20000479 PARAMETER Experiment Name: Zm_Drought_P Parameter: Plant Line Value: 35A19
  misc_feature: MA Experiment 20000479 PARAMETER Experiment Name: Zm_Drought_P Parameter: Timepoint (hr) Value: 48
  misc_feature: MA Experiment 20000479 PARAMETER Experiment Name: Zm_Drought_P Parameter: Tissue Value: Aerial
  misc_feature: MA Experiment 20000479 PARAMETER Experiment Name: Zm_Drought_P Parameter: Treatment Value: Drought vs. No Drought
aacacgaggagagactgcggcagcggagtgcagagagcggacgcaacgcaacaccgcccactctctatcactgacgatcgaagcgaggagcgcactgaagccagccgccgatgagtcgcctcctctcgcggcagcaccttgccgccgtccgtcgatctgcaccctttgcgtgcgtgtccaggtggctgcacacgccgtcattcgcgacggtgtctccgcaagaggtttcaggttccagcccagcggaagtgcagaattttgtgcagggcagctggacagcatctgctaactggaactggatagtcgatcccctgaacggtgataaattcatcaaagttgctgaggttcagggaacagaaataaagccattcgtggagagtttatctaaatgcccaaagcatggacttcacaacccacttaaagctccagagaggtacctcatgtatggagatatatctgcaaaagctgcgcatatgctgggccaacctgcagtcttagatttctttgctaaacttatccagagggtatctcccaagagctaccaacaagctcttgcagaagttcaagtttctcaaaagtttttggaaaacttttgtggagaccaggtacgctttctggcaaggtcatttgctgtaccaggtaaccatcttggacaaagaagtaatggctaccgttggccatatggcccagttgcaattatcacaccattcaattttccgttggagatccccttactacaattgatgggagcactatacatgggaaataaaccagtactcaaggttgacagcaaggttagcattgtgatggaacaaatgattaggttgcttcatgattgtggattgccagcagaggatatggatttcataaattctgatggtgccgtaatgaacaagcttctgttagaggctaatccgaaaatgacccttttcactgggagttcacgggtagcagagaaattggctgctgatttgaaaggccgagttaaattggaggatgctggttttgattggaaaattcttggtccagatgttcaagaggttgattatgttgcatgggtttgcgatcaggatgcttatgcttgtagcggtcagaaatgctctgctcaatctgttctattcatgcacaagaattggtcttctagtggtctgcttgagaaaatgaagaaactttctgaaagaaggaagcttgaagatttaacaattggtccagtccttacagttactacagaagccatgatagagcacatgaacaaccttctcaaaataagaggatcgaaggttctgtttggtggtgaaccgttagggaatcactcaattcccaaaatttatggtgccatgaagcctactgctgtatttgttcctctagaagaaattctaaaaagtgggaacttcgagcttgtgacaaaggagatatttggtccattccaggtagtcacagaatactctgaggatcagcttgagttggtcttagaagcctgcgaaaggatgaatgcgcatctgacagctgcagttgtctcaaacgacccgctattcctgcaggatgtacttgggagatccgttaacgggacaacctacgccggaattcgagcgaggaccacgggcgctccacagaaccactggtttggcccggccggtgatccgcgaggcgcagggatcgggactccggaagccatcaaacttgtctggtcctgccacagggaagtcatatatgacgtcgggcccgtgcccgagagctgggcgcttccttccgcgacctgattagctagacgaggatagactattccatgtcatcacgaggaataaaaggggaagataagcgaagccagcaggactggagcgaccgaccgagagcgagtggctgcatgcctaggcattcattctctgcacgcaactgcattttcaaccctggagaaaacataataaatgttcgttcccctgtacttgagatacatggtacttggaccggaatgtcggactagctcatgagcggacaagtcgtctgttcgcagctgcactcggttatcttcttaggacttgtttgttagattatatattataataaattttatattaacgcttagttcaaaatttgt

SEQ ID NO: 13162 - protein, 549 aa, Zea mays subsp. mays
  peptide (1)..(549): Ceres Seq. ID no. 12351851
  misc_feature (1)..(549): Homolog of NCBI NO: 18449341 NR Description: putative aldehyde dehydrogenase MIS1 [Zea mays]
  misc_feature (1)..(549): Homolog of NCBI NO: 18449343 NR Description: putative aldehyde dehydrogenase WIS1 [Triticum
  misc_feature (1)..(549): Homolog of NCBI NO: 18449337 NR Description: putative aldehyde dehydrogenase BIS1 [Hordeum
  misc_feature (1)..(549): Homolog of NCBI NO: 34921534 NR Description: Probable aldehyde dehydrogenase (Flax inducible
  misc_feature (22)..(549): Homolog of NCBI NO: 15383744 NR Description: delta-1-pyrroline-5-carboxylate dehydrogenase
  misc_feature (22)..(549): Homolog of NCBI NO: 18424599 NR Description: dehydrogenase; protein id: At5g62530.1, supported cDNA: gi_15383743, supported by cDNA: gi_17473532 [Arabidopsis >gi|17473533|gb|AAL38248.1| dehydrogenase [Arabidopsis thaliana]
  misc_feature (22)..(549): Homolog of NCBI NO: 10178084 NR Description: dehydrogenase [Arabidopsis thaliana]
  misc_feature (47)..(517): Homolog of NCBI NO: 23098316 NR Description: aldehyde dehydrogenase [Oceanobacillus iheyensis >gi|22776542|dbj|BAC12817.1| aldehyde dehydrogenase
  misc_feature (42)..(521): Homolog of NCBI NO: 37523417 NR Description: aldehyde dehydrogenase [Gloeobacter violaceus]
  misc_feature (42)..(521): Homolog of NCBI NO: 23128328 NR Description: hypothetical protein [Nostoc punctiforme]
MSRLLSRQHLAAVRRSAPFACVSRWLHTPSFATVSPQEVSGSSPAEVQNFVQGSWTASANWNWIVDPLNGDKFIKVAEVQGTEIKPFVESLSKCPKHGLHNPLKAPERYLMYGDISAKAAHMLGQPAVLDFFAKLIQRVSPKSYQQALAEVQVSQKFLENFCGDQVRFLARSFAVPGNHLGQRSNGYRWPYGPVAIITPFNFPLEIPLLQLMGALYMGNKPVLKVDSKVSIVMEQMIRLLHDCGLPAEDMDFINSDGAVMNKLLLEANPKMTLFTGSSRVAEKLAADLKGRVKLEDAGFDWKILGPDVQEVDYVAWVCDQDAYACSGQKCSAQSVLFMHKNWSSSGLLEKMKKLSERRKLEDLTIGPVLTVTTEAMIEHMNNLLKIRGSKVLFGGEPLGNHSIPKIYGAMKPTAVFVPLEEILKSGNFELVTKEIFGPFQVVTEYSEDQLELVLEACERMNAHLTAAVVSNDPLFLQDVLGRSVNGTTYAGIRARTTGAPQNHWFGPAGDPRGAGIGTPEAIKLVWSCHREVIYDVGPVPESWALPSAT

SEQ ID NO: 13163 - protein, 439 aa, Zea mays subsp. mays
  peptide (1)..(439): Ceres Seq. ID no. 12351852
  misc_feature (1)..(439): Homolog of NCBI NO: 18449341 NR Description: putative aldehyde dehydrogenase MIS1 [Zea mays]
  misc_feature (1)..(439): Homolog of NCBI NO: 18449343 NR Description: putative aldehyde dehydrogenase WIS1 [Triticum
  misc_feature (1)..(439): Homolog of NCBI NO: 18449337 NR Description: putative aldehyde dehydrogenase BIS1 [Hordeum
  misc_feature (1)..(439): Homolog of NCBI NO: 34921534 NR Description: Probable aldehyde dehydrogenase (Flax inducible
  misc_feature (1)..(439): Homolog of NCBI NO: 15383744 NR Description: delta-1-pyrroline-5-carboxylate dehydrogenase
  misc_feature (1)..(439): Homolog of NCBI NO: 18424599 NR Description: dehydrogenase; protein id: At5g62530.1, supported cDNA: gi_15383743, supported by cDNA: gi_17473532 [Arabidopsis >gi|17473533|gb|AAL38248.1| dehydrogenase [Arabidopsis thaliana]
  misc_feature (1)..(439): Homolog of NCBI NO: 10178084 NR Description: dehydrogenase [Arabidopsis thaliana]
  misc_feature (1)..(407): Homolog of NCBI NO: 23098316 NR Description: aldehyde dehydrogenase [Oceanobacillus iheyensis >gi|22776542|dbj|BAC12817.1| aldehyde dehydrogenase
  misc_feature (1)..(411): Homolog of NCBI NO: 37523417 NR Description: aldehyde dehydrogenase [Gloeobacter violaceus]
  misc_feature (1)..(411): Homolog of NCBI NO: 23128328 NR Description: hypothetical protein [Nostoc punctiforme]
MYGDISAKAAHMLGQPAVLDFFAKLIQRVSPKSYQQALAEVQVSQKFLENFCGDQVRFLARSFAVPGNHLGQRSNGYRWPYGPVAIITPFNFPLEIPLLQLMGALYMGNKPVLKVDSKVSIVMEQMIRLLHDCGLPAEDMDFINSDGAVMNKLLLEANPKMTLFTGSSRVAEKLAADLKGRVKLEDAGFDWKILGPDVQEVDYVAWVCDQDAYACSGQKCSAQSVLFMHKNWSSSGLLEKMKKLSERRKLEDLTIGPVLTVTTEAMIEHMNNLLKIRGSKVLFGGEPLGNHSIPKIYGAMKPTAVFVPLEEILKSGNFELVTKEIFGPFQVVTEYSEDQLELVLEACERMNAHLTAAVVSNDPLFLQDVLGRSVNGTTYAGIRARTTGAPQNHWFGPAGDPRGAGIGTPEAIKLVWSCHREVIYDVGPVPESWALPSAT

SEQ ID NO: 13164 - protein, 428 aa, Zea mays subsp. mays
  peptide (1)..(428): Ceres Seq. ID no. 12351853
  misc_feature (1)..(428): Homolog of NCBI NO: 18449341 NR Description: putative aldehyde dehydrogenase MIS1 [Zea mays]
  misc_feature (1)..(428): Homolog of NCBI NO: 18449343 NR Description: putative aldehyde dehydrogenase WIS1 [Triticum
  misc_feature (1)..(428): Homolog of NCBI NO: 18449337 NR Description: putative aldehyde dehydrogenase BIS1 [Hordeum
  misc_feature (1)..(428): Homolog of NCBI NO: 34921534 NR Description: Probable aldehyde dehydrogenase (Flax inducible
  misc_feature (1)..(428): Homolog of NCBI NO: 15383744 NR Description: delta-1-pyrroline-5-carboxylate dehydrogenase
  misc_feature (1)..(428): Homolog of NCBI NO: 18424599 NR Description: dehydrogenase; protein id: At5g62530.1, supported cDNA: gi_15383743, supported by cDNA: gi_17473532 [Arabidopsis >gi|17473533|gb|AAL38248.1| dehydrogenase [Arabidopsis thaliana]
  misc_feature (1)..(428): Homolog of NCBI NO: 10178084 NR Description: dehydrogenase [Arabidopsis thaliana]
  misc_feature (1)..(396): Homolog of NCBI NO: 23098316 NR Description: aldehyde dehydrogenase [Oceanobacillus iheyensis >gi|22776542|dbj|BAC12817.1| aldehyde dehydrogenase
  misc_feature (1)..(400): Homolog of NCBI NO: 37523417 NR Description: aldehyde dehydrogenase [Gloeobacter violaceus]
  misc_feature (1)..(400): Homolog of NCBI NO: 23128328 NR Description: hypothetical protein [Nostoc punctiforme]
MLGQPAVLDFFAKLIQRVSPKSYQQALAEVQVSQKFLENFCGDQVRFLARSFAVPGNHLGQRSNGYRWPYGPVAIITPFNFPLEIPLLQLMGALYMGNKPVLKVDSKVSIVMEQMIRLLHDCGLPAEDMDFINSDGAVMNKLLLEANPKMTLFTGSSRVAEKLAADLKGRVKLEDAGFDWKILGPDVQEVDYVAWVCDQDAYACSGQKCSAQSVLFMHKNWSSSGLLEKMKKLSERRKLEDLTIGPVLTVTTEAMIEHMNNLLKIRGSKVLFGGEPLGNHSIPKIYGAMKPTAVFVPLEEILKSGNFELVTKEIFGPFQVVTEYSEDQLELVLEACERMNAHLTAAVVSNDPLFLQDVLGRSVNGTTYAGIRARTTGAPQNHWFGPAGDPRGAGIGTPEAIKLVWSCHREVIYDVGPVPESWALPSAT

SEQ ID NO: 13165 - DNA, 1481 bp, Zea mays subsp. mays
  misc_feature (1)..(1481): Ceres Seq. ID no. 12411397
  misc_feature: MA Experiment ID: 108535 Result: Up-regulated in Transcription
  misc_feature: MA Experiment 108535 PARAMETER Experiment Name: Zm_Meristem_P Parameter: Age (day) Value: 8
  misc_feature: MA Experiment 108535 PARAMETER Experiment Name: Zm_Meristem_P Parameter: Organism Value: Zea mays
  misc_feature: MA Experiment 108535 PARAMETER Experiment Name: Zm_Meristem_P Parameter: Plant Line Value: 35A19
  misc_feature: MA Experiment 108535 PARAMETER Experiment Name: Zm_Meristem_P Parameter: Tissue Value: Root Meristem vs. Above Root Meristem
  misc_feature: MA Experiment ID: 108687 Result: Down-regulated in Transcription
  misc_feature: MA Experiment 108687 PARAMETER Experiment Name: Zm_Embryos-Flowers__P Parameter: Tissue Value: Embryo vs. Aerial+
  misc_feature: MA Experiment ID: 20000477 Result: Down-regulated in Transcription
  misc_feature: MA Experiment 20000477 PARAMETER Experiment Name: Zm_5mM_SA_P Parameter: Age (day) Value: 10
  misc_feature: MA Experiment 20000477 PARAMETER Experiment Name: Zm_5mM_SA_P Parameter: Organism Value: Zea mays
  misc_feature: MA Experiment 20000477 PARAMETER Experiment Name: Zm_5mM_SA_P Parameter: Plant Line Value: 35A19
  misc_feature: MA Experiment 20000477 PARAMETER Experiment Name: Zm_5mM_SA_P Parameter: Timepoint (hr) Value: 48
  misc_feature: MA Experiment 20000477 PARAMETER Experiment Name: Zm_5mM_SA_P Parameter: Tissue Value: Aerial
  misc_feature: MA Experiment 20000477 PARAMETER Experiment Name: Zm_5mM_SA_P Parameter: Treatment Value: 5mM SA vs. No Treatment
  misc_feature: MA Experiment ID: 20000478 Result: Down-regulated in Transcription
  misc_feature: MA Experiment 20000478 PARAMETER Experiment Name: Zm_5mM_SA_P Parameter: Age (day) Value: 11
  misc_feature: MA Experiment 20000478 PARAMETER Experiment Name: Zm_5mM_SA_P Parameter: Organism Value: Zea mays
  misc_feature: MA Experiment 20000478 PARAMETER Experiment Name: Zm_5mM_SA_P Parameter: Plant Line Value: 35A19
  misc_feature: MA Experiment 20000478 PARAMETER Experiment Name: Zm_5mM_SA_P Parameter: Timepoint (hr) Value: 72
  misc_feature: MA Experiment 20000478 PARAMETER Experiment Name: Zm_5mM_SA_P Parameter: Tissue Value: Aerial
  misc_feature: MA Experiment 20000478 PARAMETER Experiment Name: Zm_5mM_SA_P Parameter: Treatment Value: 5mM SA vs. No Treatment
  misc_feature: MA Experiment ID: 20000480 Result: Down-regulated in Transcription
  misc_feature: MA Experiment 20000480 PARAMETER Experiment Name: Zm_Drought_P Parameter: Age (day) Value: 11
  misc_feature: MA Experiment 20000480 PARAMETER Experiment Name: Zm_Drought_P Parameter: Organism Value: Zea mays
  misc_feature: MA Experiment 20000480 PARAMETER Experiment Name: Zm_Drought_P Parameter: Plant Line Value: 35A19
  misc_feature: MA Experiment 20000480 PARAMETER Experiment Name: Zm_Drought_P Parameter: Timepoint (hr) Value: 72
  misc_feature: MA Experiment 20000480 PARAMETER Experiment Name: Zm_Drought_P Parameter: Tissue Value: Aerial
  misc_feature: MA Experiment 20000480 PARAMETER Experiment Name: Zm_Drought_P Parameter: Treatment Value: Drought vs. No Drought
accaccacccaccagtccaccaccactgctcgcactcactccaccgctgcccacttcttgtttgtattgtatccagactccagaggaagccgagagggccaatgaggcaaggcatgagctccccttccgccgccgcggcgctcgtgctcctcctggccctgctcgccggaggccagtgccgagaggcccagctcgacgccgcggacgccggcaccggcacggagaactacaccgccagcgacgccgccgtgtactggggcccctggcagagggcccgggccacctggtacggccagcccaacggcgccggccccgacgacaacggtggcgcgtgcggattcaagcacaccaaccagtaccccttcatgtccatgggctcctgcggcaaccagccattgttcaaggacggcaagggctgcggctcctgctacaagattcggtgcaggaaggacccgtcctgctccgggcggacggagacggtgatcatcaccgacatgaactactacccggtgtccaagtaccacttcgacctcagcggcactgcgttcggcaggctggccaagcccggcctcaacgacaagctccgccactccggcatcatcgacatcgagttcaccagggtgccgtgcgagttcccgggcctgaagatcgggttccacgtggaggagtactcgaaccccgtctacttcgcggtgctggtggagtacgaggacggcgacggcgacgtggtgcaggtggacctgatggagtccaagacggcgcgcggcccgccgacggggcggtggacgccgatgcgcgagtcctggggctccgtctggcgcatggacaccaaccaccgcatgcagccgcccttctccatccgcatccgcaacgagtccggcaagacgctcgtcgccaacaacgtcatcccggccaactggcgccccaacaccttctaccgctccttcgtccagtacagctaaccgatcgggatccgtgccctgcccgcaattggagctggctggctggggcgctactcggctcggtcaccatcgtctacagtactatactatgctctactaccactagactgctgctgttactactagtctactaccaccaagtacggcggaacggaacagctagtcgtcgtcggcggccttgggaggggaggtgtctccggtcaccgtgccgttgcagttgtatcgtgatcatggtcctgggagttgttgcatccggggcgcgctttttaggtcaggcgtcgtgtgcgatgtttgtggggtcaggctggcatgtcatgccgtgcgtgaccctgattgcgagccggcaagcaagaagacaaaaaaactaaagccgtgtgggaaaatggaggaggcaggcgtacaagctacgctctcccgcccactgttgcttttataatttatcatcatcatcatcttcattccgatcggtgattaatcgaaaagtatattgtaatgtataaacgccattttcctttcgtc

SEQ ID NO: 13166 - protein, 442 aa, Zea mays subsp. mays
  peptide (1)..(442): Ceres Seq. ID no. 12411398
PPPTSPPPLLALTPPLPTSCLYCIQTPEEAERANEARHELPFRRRGARAPPGPARRRPVPRGPARRRGRRHRHGELHRQRRRRVLGPLAEGPGHLVRPAQRRRPRRQRWRVRIQAHQPVPLHVHGLLRQPAIVQGRQGLRLLLQDSVQEGPVLLRADGDGDHHRHELLPGVQVPLRPQRHCVRQAGQARPQRQAPPLRHHRHRVHQGAVRVPGPEDRVPRGGVLEPRLLRGAGGVRGRRRRRGAGGPDGVQDGARPADGAVDADARVLGLRLAHGHQPPHAAALLHPHPQRVRQDARRQQRHPGQLAPQHLLPLLRPVQLTDRDPCPARNWSWLAGALLGSVTIVYSTILCSTTTRLLLLLLVYYHQVRRNGTASRRRRPWEGRCLRSPCRCSCIVIMVLGVVASGARFLGQASCAMFVGSGWHVMPCVTLIASRQARRQKN

SEQ ID NO: 13167 - protein, 319 aa, Zea mays subsp. mays
  peptide (1)..(319): Ceres Seq. ID no. 12411399
  misc_feature (216)..(303): Pfam Name: Pollen allergen Pfam Description: Pollen allergen
  misc_feature (34)..(319): Homolog of NCBI NO: 14193775 NR Description: beta-expansin 8 [Zea mays]
  misc_feature (38)..(319): Homolog of NCBI NO: 37536762 NR Description: beta-expansin EXPB4 [Oryza sativa (japonica
  misc_feature (38)..(319): Homolog of NCBI NO: 8118425 NR Description: beta-expansin [Oryza sativa]
  misc_feature (34)..(319): Homolog of NCBI NO: 37536756 NR Description: beta-expansin EXPB6 [Oryza sativa (japonica
  misc_feature (69)..(319): Homolog of NCBI NO: 14330330 NR Description: beta expansin B3 [Festuca pratensis]
  misc_feature (69)..(319): Homolog of NCBI NO: 37536760 NR Description: beta-expansin EXPB3 [Oryza sativa (japonica
  misc_feature (44)..(319): Homolog of NCBI NO: 14330328 NR Description: beta expansin B2 [Festuca pratensis]
  misc_feature (49)..(319): Homolog of NCBI NO: 11346546 NR Description: beta-expansin [Oryza sativa]
  misc_feature (75)..(318): Homolog of NCBI NO: 14193773 NR Description: beta-expansin 7 [Zea mays]
  misc_feature (70)..(318): Homolog of NCBI NO: 8118432 NR Description: beta-expansin [Oryza sativa]
HHPPVHHHCSHSLHRCPLLVCIVSRLQRKPRGPMRQGMSSPSAAAALVLLLALLAGGQCREAQLDAADAGTGTENYTASDAAVYWGPWQRARATWYGQPNGAGPDDNGGACGFKHTNQYPFMSMGSCGNQPLFKDGKGCGSCYKIRCRKDPSCSGRTETVIITDMNYYPVSKYHFDLSGTAFGRLAKPGLNDKLRHSGIIDIEFTRVPCEFPGLKIGFHVEEYSNPVYFAVLVEYEDGDGDVVQVDLMESKTARGPPTGRWTPMRESWGSVWRMDTNHRMQPPFSIRIRNESGKTLVANNVIPANWRPNTFYRSFVQYS

SEQ ID NO: 13168 - protein, 286 aa, Zea mays subsp. mays
  peptide (1)..(286): Ceres Seq. ID no. 12411400
  misc_feature (183)..(270): Pfam Name: Pollen allergen Pfam Description: Pollen allergen
  misc_feature (1)..(286): Homolog of NCBI NO: 14193775 NR Description: beta-expansin 8 [Zea mays]
  misc_feature (5)..(286): Homolog of NCBI NO: 37536762 NR Description: beta-expansin EXPB4 [Oryza sativa (japonica
  misc_feature (5)..(286): Homolog of NCBI NO: 8118425 NR Description: beta-expansin [Oryza sativa]
  misc_feature (1)..(286): Homolog of NCBI NO: 37536756 NR Description: beta-expansin EXPB6 [Oryza sativa (japonica
  misc_feature (36)..(286): Homolog of NCBI NO: 14330330 NR Description: beta expansin B3 [Festuca pratensis]
  misc_feature (36)..(286): Homolog of NCBI NO: 37536760 NR Description: beta-expansin EXPB3 [Oryza sativa (japonica
  misc_feature (11)..(286): Homolog of NCBI NO: 14330328 NR Description: beta expansin B2 [Festuca pratensis]
  misc_feature (16)..(286): Homolog of NCBI NO: 11346546 NR Description: beta-expansin [Oryza sativa]
  misc_feature (42)..(285): Homolog of NCBI NO: 14193773 NR Description: beta-expansin 7 [Zea mays]
  misc_feature (37)..(285): Homolog of NCBI NO: 8118432 NR Description: beta-expansin [Oryza sativa]
MRQGMSSPSAAAALVLLLALLAGGQCREAQLDAADAGTGTENYTASDAAVYWGPWQRARATWYGQPNGAGPDDNGGACGFKHTNQYPFMSMGSCGNQPLFKDGKGCGSCYKIRCRKDPSCSGRTETVIITDMNYYPVSKYHFDLSGTAFGRLAKPGLNDKLRHSGIIDIEFTRVPCEFPGLKIGFHVEEYSNPVYFAVLVEYEDGDGDVVQVDLMESKTARGPPTGRWTPMRESWGSVWRMDTNHRMQPPFSIRIRNESGKTLVANNVIPANWRPNTFYRSFVQYS

SEQ ID NO: 13169 - DNA, 2023 bp, Zea mays subsp. mays
  misc_feature (1)..(2023): Ceres Seq. ID no. 12411393
  misc_feature: MA Experiment ID: 108527 Result: Down-regulated in Transcription
  misc_feature: MA Experiment 108527 PARAMETER Experiment Name: Zm_5mM_NO_P Parameter: Age (day) Value: 8
  misc_feature: MA Experiment 108527 PARAMETER Experiment Name: Zm_5mM_NO_P Parameter: Organism Value: Zea mays
  misc_feature: MA Experiment 108527 PARAMETER Experiment Name: Zm_5mM_NO_P Parameter: Plant Line Value: 35A19
  misc_feature: MA Experiment 108527 PARAMETER Experiment Name: Zm_5mM_NO_P Parameter: Timepoint (hr) Value: 6
  misc_feature: MA Experiment 108527 PARAMETER Experiment Name: Zm_5mM_NO_P Parameter: Tissue Value: Aerial
  misc_feature: MA Experiment 108527 PARAMETER Experiment Name: Zm_5mM_NO_P Parameter: Treatment Value: 5mM NO vs. No Treatment
  misc_feature: MA Experiment ID: 20000534 Result: Down-regulated in Transcription
  misc_feature: MA Experiment 20000534 PARAMETER Experiment Name: Zm_Hybrid_Pollen_P Parameter: Age (day) Value: 8
  misc_feature: MA Experiment 20000534 PARAMETER Experiment Name: Zm_Hybrid_Pollen_P Parameter: Organism Value: Zea mays
  misc_feature: MA Experiment 20000534 PARAMETER Experiment Name: Zm_Hybrid_Pollen_P Parameter: Plant Line Value: 35A19
  misc_feature: MA Experiment 20000534 PARAMETER Experiment Name: Zm_Hybrid_Pollen_P Parameter: Tissue Value: Pollen vs. Aerial
agaaggaagccaacagatttcagtatttcacggtcaccagtccctcctacccgcttcccataaaatcttctgatctgtaacgcattcgtcgtcgcccacatccgcttcgctctcttgctcttttagtcccatctcccatcccacctggaggcgaatttcgtctggggaaaaagtcggcggccatggcggggcgagactccctcccggagggctctctcttcctcggattggacagctccactcaatcactgaaagctacggtgctcaataatgagctcacaatagtagcttctgaaattgttaattttgactctgaattgccacactacaaaactgaaggtggggtgtacagagacccagcagatgataggcacattttttcaccaaccattatgtgggtggaagctttggaggtgctgcttgagaagctaaaaccaaagatcaacttcggtaaggtagtggctgtttctgggagtgggcagcaacatggcagtgtttattggaagaagggcagccatgctgtgttatcctccttggatgctagtaaaagcttgttatcgcaactcaaggatgcattttctacaatgaactcaccattatggatggatagtagcacaacaaagcaatgcagagaaatagagaatgcagttggaggtgcactggagttagcaaaactgacaggatctcgtgcgtatgaaagattcactggcccccagataaggaagatctatcagacagagcctgatgtttatgaagataccgagagaatatctttggtgagctcgttcatggcatctatccttgttggaagctatgcaagtattgatgaaactgatggtgcggggatgaacttgatggatatcaagcaaaggacctggtcaaagtctgctttagaggcaactgctcctggacttgaagcaaagcttggaaatctggcaccagcatattcagctgctggccgaattgctccttattttgtagaaaggtttcagtttgataagaactgtttggtcattcagtggtctggagataatcctaatagccttgcaggtttaactctgaatacccctggtgatcttgccattagccttggtactagtgatacagtattcgggataacaacagaagctaaaccaagccttgaaggacatgttttccccaatcctgttgagcctaatggttatatggtcatgctatgctacaaaaatggctccttgaccagagaagatgtacgaaatcgctgtgcagacaaatcatgggacgtttttaacagctatctggagaaaacgccccctctaaatggtgggaagttaggattctactacaaagaccatgaaatcctccctccacttccagtgggtttccatcggtacactgttgaaaacctcaacgacgtctcatcagacgctctgttggagcgtgaagtggaagaatttgacccaccgtccgaggttcgtgccatcattgagggccaaatgctgtcgatgcgaggccacaccgagaggtttggcatgccgaaccctcccaaacggatcatagcaaccggcggggcatcctccaacgaaagcatcctcaagtcagtcgcgcagatcttcggctgccctgtcttcacagtccagagacctgattcggcatcgctgggcgcagcgctgagagctgcccacgggtggctatgcaacgcgcaaggtagcttcgtccccatctcgtgcctgtaccagggcaacctggagaagacctcccttggctcgaagctggcagtcccggccggcgacaaggagcaggaccgggagctcctccagaagtacaccctcctgatgaggaagagaatggagatcgagagacgcctggtggagaagatcgggcgatcgtaggaaaaaaaactcatgaagcgctgctgaggctggcaggaccgaataatttgtgaataaatatggattatctcgatggtaggaaacaaattcatggcaggaccgaacaattcgtgaataaaagtggattatcgtccattatgcagaactttctc

SEQ ID NO: 13170 - protein, 562 aa, Zea mays subsp. mays
  peptide (1)..(562): Ceres Seq. ID no. 12411394
  misc_feature (12)..(290): Pfam Name: FGGY family of carbohydrate kinases, N-terminal domain Pfam Description: FGGY family of carbohydrate kinases, N-terminal
  misc_feature (1)..(562): Homolog of NCBI NO: 23237892 NR Description: putative xylulose kinase [Oryza sativa (japonica group)] >gi|27261103|dbj|BAC45216.1| putative xylulose kinase
  misc_feature (6)..(560): Homolog of NCBI NO: 15240526 NR Description: xylulose kinase; protein id: At5g49650.1, by cDNA: gi_15292818 [Arabidopsis thaliana] putative xylulose kinase [Arabidopsis thaliana]
  misc_feature (6)..(560): Homolog of NCBI NO: 8809688 NR Description: xylulose kinase [Arabidopsis thaliana]
  misc_feature (14)..(508): Homolog of NCBI NO: 18860918 NR Description: xylulokinase homolog; xylulokinase (H.
  misc_feature (14)..(495): Homolog of NCBI NO: 19343554 NR Description: Similar to xylulokinase homolog (H. influenzae)
  misc_feature (14)..(495): Homolog of NCBI NO: 34866669 NR Description: similar to xylulokinase homolog; xylulokinase (H.
  misc_feature (14)..(508): Homolog of NCBI NO: 3298502 NR Description: xylulokinase [Homo sapiens]
  misc_feature (13)..(546): Homolog of NCBI NO: 21356607 NR Description: CG3534-PA [Drosophila melanogaster]
  misc_feature (13)..(497): Homolog of NCBI NO: 17554530 NR Description: Predicted CDS, carbohydrate kinase like elegans] >gi|732210|sp|P30646|YNE7_CAEEL Hypothetical 60.3 kDa
  misc_feature (9)..(494): Homolog of NCBI NO: 39585048 NR Description: Hypothetical protein CBG06848 [Caenorhabditis
MAGRDSLPEGSLFLGLDSSTQSLKATVLNNELTIVASEIVNFDSELPHYKTEGGVYRDPADDRHIFSPTIMWVEALEVLLEKLKPKINFGKVVAVSGSGQQHGSVYWKKGSHAVLSSLDASKSLLSQLKDAFSTMNSPLWMDSSTTKQCREIENAVGGALELAKLTGSRAYERFTGPQIRKIYQTEPDVYEDTERISLVSSFMASILVGSYASIDETDGAGMNLMDIKQRTWSKSALEATAPGLEAKLGNLAPAYSAAGRIAPYFVERFQFDKNCLVIQWSGDNPNSLAGLTLNTPGDLAISLGTSDTVFGITTEAKPSLEGHVFPNPVEPNGYMVMLCYKNGSLTREDVRNRCADKSWDVFNSYLEKTPPLNGGKLGFYYKDHEILPPLPVGFHRYTVENLNDVSSDALLEREVEEFDPPSEVRAIIEGQMLSMRGHTERFGMPNPPKRIIATGGASSNESILKSVAQIFGCPVFTVQRPDSASLGAALRAAHGWLCNAQGSFVPISCLYQGNLEKTSLGSKLAVPAGDKEQDRELLQKYTLLMRKRMEIERRLVEKIGRS

SEQ ID NO: 13171 - protein, 492 aa, Zea mays subsp. mays
  peptide (1)..(492): Ceres Seq. ID no. 12411395
  misc_feature (1)..(220): Pfam Name: FGGY family of carbohydrate kinases, N-terminal domain Pfam Description: FGGY family of carbohydrate kinases, N-terminal
  misc_feature (1)..(492): Homolog of NCBI NO: 23237892 NR Description: putative xylulose kinase [Oryza sativa (japonica group)] >gi|27261103|dbj|BAC45216.1| putative xylulose kinase
  misc_feature (1)..(490): Homolog of NCBI NO: 15240526 NR Description: xylulose kinase; protein id: At5g49650.1, by cDNA: gi_15292818 [Arabidopsis thaliana] putative xylulose kinase [Arabidopsis thaliana]
  misc_feature (1)..(490): Homolog of NCBI NO: 8809688 NR Description: xylulose kinase [Arabidopsis thaliana]
  misc_feature (1)..(438): Homolog of NCBI NO: 18860918 NR Description: xylulokinase homolog; xylulokinase (H.
  misc_feature (1)..(425): Homolog of NCBI NO: 19343554 NR Description: Similar to xylulokinase homolog (H. influenzae)
  misc_feature (1)..(425): Homolog of NCBI NO: 34866669 NR Description: similar to xylulokinase homolog; xylulokinase (H.
  misc_feature (1)..(438): Homolog of NCBI NO: 3298502 NR Description: xylulokinase [Homo sapiens]
  misc_feature (1)..(476): Homolog of NCBI NO: 21356607 NR Description: CG3534-PA [Drosophila melanogaster]
  misc_feature (1)..(427): Homolog of NCBI NO: 17554530 NR Description: Predicted CDS, carbohydrate kinase like elegans] >gi|732210|sp|P30646|YNE7_CAEEL Hypothetical 60.3 kDa
  misc_feature (1)..(424): Homolog of NCBI NO: 39585048 NR Description: Hypothetical protein CBG06848 [Caenorhabditis
MWVEALEVLLEKLKPKINFGKVVAVSGSGQQHGSVYWKKGSHAVLSSLDASKSLLSQLKDAFSTMNSPLWMDSSTTKQCREIENAVGGALELAKLTGSRAYERFTGPQIRKIYQTEPDVYEDTERISLVSSFMASILVGSYASIDETDGAGMNLMDIKQRTWSKSALEATAPGLEAKLGNLAPAYSAAGRIAPYFVERFQFDKNCLVIQWSGDNPNSLAGLTLNTPGDLAISLGTSDTVFGITTEAKPSLEGHVFPNPVEPNGYMVMLCYKNGSLTREDVRNRCADKSWDVFNSYLEKTPPLNGGKLGFYYKDHEILPPLPVGFHRYTVENLNDVSSDALLEREVEEFDPPSEVRAIIEGQMLSMRGHTERFGMPNPPKRIIATGGASSNESILKSVAQIFGCPVFTVQRPDSASLGAALRAAHGWLCNAQGSFVPISCLYQGNLEKTSLGSKLAVPAGDKEQDRELLQKYTLLMRKRMEIERRLVEKIGRS

SEQ ID NO: 13172 - protein, 428 aa, Zea mays subsp. mays
  peptide (1)..(428): Ceres Seq. ID no. 12411396
  misc_feature (1)..(156): Pfam Name: FGGY family of carbohydrate kinases, N-terminal domain Pfam Description: FGGY family of carbohydrate kinases, N-terminal
  misc_feature (1)..(428): Homolog of NCBI NO: 23237892 NR Description: putative xylulose kinase [Oryza sativa (japonica group)] >gi|27261103|dbj|BAC45216.1| putative xylulose kinase
  misc_feature (1)..(426): Homolog of NCBI NO: 15240526 NR Description: xylulose kinase; protein id: At5g49650.1, by cDNA: gi_15292818 [Arabidopsis thaliana] putative xylulose kinase [Arabidopsis thaliana]
  misc_feature (1)..(426): Homolog of NCBI NO: 8809688 NR Description: xylulose kinase [Arabidopsis thaliana]
  misc_feature (1)..(374): Homolog of NCBI NO: 18860918 NR Description: xylulokinase homolog; xylulokinase (H.
  misc_feature (1)..(361): Homolog of NCBI NO: 19343554 NR Description: Similar to xylulokinase homolog (H. influenzae)
  misc_feature (1)..(361): Homolog of NCBI NO: 34866669 NR Description: similar to xylulokinase homolog; xylulokinase (H.
  misc_feature (1)..(374): Homolog of NCBI NO: 3298502 NR Description: xylulokinase [Homo sapiens]
  misc_feature (1)..(412): Homolog of NCBI NO: 21356607 NR Description: CG3534-PA [Drosophila melanogaster]
  misc_feature (1)..(363): Homolog of NCBI NO: 17554530 NR Description: Predicted CDS, carbohydrate kinase like elegans] >gi|732210|sp|P30646|YNE7_CAEEL Hypothetical 60.3 kDa
  misc_feature (1)..(360): Homolog of NCBI NO: 39585048 NR Description: Hypothetical protein CBG06848 [Caenorhabditis
MNSPLWMDSSTTKQCREIENAVGGALELAKLTGSRAYERFTGPQIRKIYQTEPDVYEDTERISLVSSFMASILVGSYASIDETDGAGMNLMDIKQRTWSKSALEATAPGLEAKLGNLAPAYSAAGRIAPYFVERFQFDKNCLVIQWSGDNPNSLAGLTLNTPGDLAISLGTSDTVFGITTEAKPSLEGHVFPNPVEPNGYMVMLCYKNGSLTREDVRNRCADKSWDVFNSYLEKTPPLNGGKLGFYYKDHEILPPLPVGFHRYTVENLNDVSSDALLEREVEEFDPPSEVRAIIEGQMLSMRGHTERFGMPNPPKRIIATGGASSNESILKSVAQIFGCPVFTVQRPDSASLGAALRAAHGWLCNAQGSFVPISCLYQGNLEKTSLGSKLAVPAGDKEQDRELLQKYTLLMRKRMEIERRLVEKIGRS

SEQ ID NO: 13173 - DNA, 1464 bp, Zea mays subsp. mays
  misc_feature (1)..(1464): Ceres Seq. ID no. 12408541
  misc_feature: MA Experiment ID: 108504 Result: Down-regulated in Transcription
  misc_feature: MA Experiment 108504 PARAMETER Experiment Name: Zm_Drought_P Parameter: Age (day) Value: 8
  misc_feature: MA Experiment 108504 PARAMETER Experiment Name: Zm_Drought_P Parameter: Organism Value: Zea mays
  misc_feature: MA Experiment 108504 PARAMETER Experiment Name: Zm_Drought_P Parameter: Plant Line Value: 35A19
  misc_feature: MA Experiment 108504 PARAMETER Experiment Name: Zm_Drought_P Parameter: Timepoint (hr) Value: 12
  misc_feature: MA Experiment 108504 PARAMETER Experiment Name: Zm_Drought_P Parameter: Tissue Value: Aerial
  misc_feature: MA Experiment 108504 PARAMETER Experiment Name: Zm_Drought_P Parameter: Treatment Value: Drought vs. No Drought
  misc_feature: MA Experiment ID: 108515 Result: Down-regulated in Transcription
  misc_feature: MA Experiment 108515 PARAMETER Experiment Name: Zm_2mM_SA_P Parameter: Age (day) Value: 8
  misc_feature: MA Experiment 108515 PARAMETER Experiment Name: Zm_2mM_SA_P Parameter: Organism Value: Zea mays
  misc_feature: MA Experiment 108515 PARAMETER Experiment Name: Zm_2mM_SA_P Parameter: Plant Line Value: 35A19
  misc_feature: MA Experiment 108515 PARAMETER Experiment Name: Zm_2mM_SA_P Parameter: Timepoint (hr) Value: 12
  misc_feature: MA Experiment 108515 PARAMETER Experiment Name: Zm_2mM_SA_P Parameter: Tissue Value: Aerial
  misc_feature: MA Experiment 108515 PARAMETER Experiment Name: Zm_2mM_SA_P Parameter: Treatment Value: 2mM SA vs. No Treatment
  misc_feature: MA Experiment ID: 108527 Result: Down-regulated in Transcription
  misc_feature: MA Experiment 108527 PARAMETER Experiment Name: Zm_5mM_NO_P Parameter: Age (day) Value: 8
  misc_feature: MA Experiment 108527 PARAMETER Experiment Name: Zm_5mM_NO_P Parameter: Organism Value: Zea mays
  misc_feature: MA Experiment 108527 PARAMETER Experiment Name: Zm_5mM_NO_P Parameter: Plant Line Value: 35A19
  misc_feature: MA Experiment 108527 PARAMETER Experiment Name: Zm_5mM_NO_P Parameter: Timepoint (hr) Value: 6
  misc_feature: MA Experiment 108527 PARAMETER Experiment Name: Zm_5mM_NO_P Parameter: Tissue Value: Aerial
  misc_feature: MA Experiment 108527 PARAMETER Experiment Name: Zm_5mM_NO_P Parameter: Treatment Value: 5mM NO vs. No Treatment
  misc_feature: MA Experiment ID: 108528 Result: Up-regulated in Transcription
  misc_feature: MA Experiment 108528 PARAMETER Experiment Name: Zm_Imbibed_Seeds_P Parameter: Age (day) Value: 5 vs. 2
  misc_feature: MA Experiment 108528 PARAMETER Experiment Name: Zm_Imbibed_Seeds_P Parameter: Organism Value: Zea mays
  misc_feature: MA Experiment 108528 PARAMETER Experiment Name: Zm_Imbibed_Seeds_P Parameter: Plant Line Value: 35A19
  misc_feature: MA Experiment 108528 PARAMETER Experiment Name: Zm_Imbibed_Seeds_P Parameter: Tissue Value: Aerial vs. Embryo
  misc_feature: MA Experiment ID: 108530 Result: Up-regulated in Transcription
  misc_feature: MA Experiment 108530 PARAMETER Experiment Name: Zm_Imbibed_Seeds_P Parameter: Age (day) Value: 6 vs. 2
  misc_feature: MA Experiment 108530 PARAMETER Experiment Name: Zm_Imbibed_Seeds_P Parameter: Organism Value: Zea mays
  misc_feature: MA Experiment 108530 PARAMETER Experiment Name: Zm_Imbibed_Seeds_P Parameter: Plant Line Value: 35A19
  misc_feature: MA Experiment 108530 PARAMETER Experiment Name: Zm_Imbibed_Seeds_P Parameter: Tissue Value: Aerial vs. Embryo
  misc_feature: MA Experiment ID: 108534 Result: Up-regulated in Transcription
  misc_feature: MA Experiment 108534 PARAMETER Experiment Name: Zm_4deg_Cold_P Parameter: Age (hr) Value: 8
  misc_feature: MA Experiment 108534 PARAMETER Experiment Name: Zm_4deg_Cold_P Parameter: Organism Value: Zea mays
  misc_feature: MA Experiment 108534 PARAMETER Experiment Name: Zm_4deg_Cold_P Parameter: Plant Line Value: 35A19
  misc_feature: MA Experiment 108534 PARAMETER Experiment Name: Zm_4deg_Cold_P Parameter: Temperature (deg C) Value: 4 vs. 22
  misc_feature: MA Experiment 108534 PARAMETER Experiment Name: Zm_4deg_Cold_P Parameter: Timepoint (hr) Value: 6
  misc_feature: MA Experiment 108534 PARAMETER Experiment Name: Zm_4deg_Cold_P Parameter: Tissue Value: Aerial
  misc_feature: MA Experiment ID: 108540 Result: Down-regulated in Transcription
  misc_feature: MA Experiment 108540 PARAMETER Experiment Name: Zm_20percent_PEG_P Parameter: Age (day) Value: 8
  misc_feature: MA Experiment 108540 PARAMETER Experiment Name: Zm_20percent_PEG_P Parameter: Organism Value: Zea mays
  misc_feature: MA Experiment 108540 PARAMETER Experiment Name: Zm_20percent_PEG_P Parameter: Plant Line Value: 35A19
  misc_feature: MA Experiment 108540 PARAMETER Experiment Name: Zm_20percent_PEG_P Parameter: Timepoint (hr) Value: 6
  misc_feature: MA Experiment 108540 PARAMETER Experiment Name: Zm_20percent_PEG_P Parameter: Tissue Value: Aerial
  misc_feature: MA Experiment 108540 PARAMETER Experiment Name: Zm_20percent_PEG_P Parameter: Treatment Value: 20percent PEG vs. No Treatment
  misc_feature: MA Experiment ID: 108542 Result: Down-regulated in Transcription
  misc_feature: MA Experiment 108542 PARAMETER Experiment Name: Zm_150mM_NaCl_P Parameter: Age (day) Value: 8
  misc_feature: MA Experiment 108542 PARAMETER Experiment Name: Zm_150mM_NaCl_P Parameter: Organism Value: Zea mays
  misc_feature: MA Experiment 108542 PARAMETER Experiment Name: Zm_150mM_NaCl_P Parameter: Plant Line Value: 35A19
  misc_feature: MA Experiment 108542 PARAMETER Experiment Name: Zm_150mM_NaCl_P Parameter: Timepoint (hr) Value: 6
  misc_feature: MA Experiment 108542 PARAMETER Experiment Name: Zm_150mM_NaCl_P Parameter: Tissue Value: Aerial
  misc_feature: MA Experiment 108542 PARAMETER Experiment Name: Zm_150mM_NaCl_P Parameter: Treatment Value: 150mM NaCl vs. No Treatment
  misc_feature: MA Experiment ID: 108545 Result: Up-regulated in Transcription
  misc_feature: MA Experiment 108545 PARAMETER Experiment Name: Zm_Imbibed_Seeds_P Parameter: Age (day) Value: 3 vs. 2
  misc_feature: MA Experiment 108545 PARAMETER Experiment Name: Zm_Imbibed_Seeds_P Parameter: Organism Value: Zea mays
  misc_feature: MA Experiment 108545 PARAMETER Experiment Name: Zm_Imbibed_Seeds_P Parameter: Plant Line Value: 35A19
  misc_feature: MA Experiment 108545 PARAMETER Experiment Name: Zm_Imbibed_Seeds_P Parameter: Tissue Value: Aerial vs. Embryo
  misc_feature: MA Experiment ID: 108547 Result: Up-regulated in Transcription
  misc_feature: MA Experiment 108547 PARAMETER Experiment Name: Zm_Imbibed_Seeds_P Parameter: Age (day) Value: 4 vs. 2
  misc_feature: MA Experiment 108547 PARAMETER Experiment Name: Zm_Imbibed_Seeds_P Parameter: Organism Value: Zea mays
  misc_feature: MA Experiment 108547 PARAMETER Experiment Name: Zm_Imbibed_Seeds_P Parameter: Plant Line Value: 35A19
  misc_feature: MA Experiment 108547 PARAMETER Experiment Name: Zm_Imbibed_Seeds_P Parameter: Tissue Value: Aerial vs. Embryo
  misc_feature: MA Experiment ID: 108556 Result: Down-regulated in Transcription
  misc_feature: MA Experiment 108556 PARAMETER Experiment Name: Zm_Drought_P Parameter: Age (day) Value: 9
  misc_feature: MA Experiment 108556 PARAMETER Experiment Name: Zm_Drought_P Parameter: Organism Value: Zea mays
  misc_feature: MA Experiment 108556 PARAMETER Experiment Name: Zm_Drought_P Parameter: Plant Line Value: 35A19
  misc_feature: MA Experiment 108556 PARAMETER Experiment Name: Zm_Drought_P Parameter: Timepoint (hr) Value: 24
  misc_feature: MA Experiment 108556 PARAMETER Experiment Name: Zm_Drought_P Parameter: Tissue Value: Aerial
  misc_feature: MA Experiment 108556 PARAMETER Experiment Name: Zm_Drought_P Parameter: Treatment Value: Drought vs. No Drought
  misc_feature: MA Experiment ID: 108559 Result: Down-regulated in Transcription
  misc_feature: MA Experiment 108559 PARAMETER Experiment Name: Zm_5mM_NO_P Parameter: Age (day) Value: 8
  misc_feature: MA Experiment 108559 PARAMETER Experiment Name: Zm_5mM_NO_P Parameter: Organism Value: Zea mays
  misc_feature: MA Experiment 108559 PARAMETER Experiment Name: Zm_5mM_NO_P Parameter: Plant Line Value: 35A19
  misc_feature: MA Experiment 108559 PARAMETER Experiment Name: Zm_5mM_NO_P Parameter: Timepoint (hr) Value: 12
  misc_feature: MA Experiment 108559 PARAMETER Experiment Name: Zm_5mM_NO_P Parameter: Tissue Value: Aerial
  misc_feature: MA Experiment 108559 PARAMETER Experiment Name: Zm_5mM_NO_P Parameter: Treatment Value: 5mM NO vs. No Treatment
  misc_feature: MA Experiment ID: 108597 Result: Down-regulated in Transcription
  misc_feature: MA Experiment 108597 PARAMETER Experiment Name: Zm_100uM_ABA_P Parameter: Age (day) Value: 9
  misc_feature: MA Experiment 108597 PARAMETER Experiment Name: Zm_100uM_ABA_P Parameter: Organism Value: Zea mays
  misc_feature: MA Experiment 108597 PARAMETER Experiment Name: Zm_100uM_ABA_P Parameter: Plant Line Value: 35A19
  misc_feature: MA Experiment 108597 PARAMETER Experiment Name: Zm_100uM_ABA_P Parameter: Timepoint (hr) Value: 24
  misc_feature: MA Experiment 108597 PARAMETER Experiment Name: Zm_100uM_ABA_P Parameter: Tissue Value: Aerial
  misc_feature: MA Experiment 108597 PARAMETER Experiment Name: Zm_100uM_ABA_P Parameter: Treatment Value: 100uM ABA vs. No Treatment
  misc_feature: MA Experiment ID: 108687 Result: Down-regulated in Transcription
  misc_feature: MA Experiment 108687 PARAMETER Experiment Name: Zm_Embryos-Flowers__P Parameter: Tissue Value: Embryo vs. Aerial+
  misc_feature: MA Experiment ID: 20000478 Result: Down-regulated in Transcription
  misc_feature: MA Experiment 20000478 PARAMETER Experiment Name: Zm_5mM_SA_P Parameter: Age (day) Value: 11
  misc_feature: MA Experiment 20000478 PARAMETER Experiment Name: Zm_5mM_SA_P Parameter: Organism Value: Zea mays
  misc_feature: MA Experiment 20000478 PARAMETER Experiment Name: Zm_5mM_SA_P Parameter: Plant Line Value: 35A19
  misc_feature: MA Experiment 20000478 PARAMETER Experiment Name: Zm_5mM_SA_P Parameter: Timepoint (hr) Value: 72
  misc_feature: MA Experiment 20000478 PARAMETER Experiment Name: Zm_5mM_SA_P Parameter: Tissue Value: Aerial
  misc_feature: MA Experiment 20000478 PARAMETER Experiment Name: Zm_5mM_SA_P Parameter: Treatment Value: 5mM SA vs. No Treatment
  misc_feature: MA Experiment ID: 20000480 Result: Down-regulated in Transcription
  misc_feature: MA Experiment 20000480 PARAMETER Experiment Name: Zm_Drought_P Parameter: Age (day) Value: 11
  misc_feature: MA Experiment 20000480 PARAMETER Experiment Name: Zm_Drought_P Parameter: Organism Value: Zea mays
  misc_feature: MA Experiment 20000480 PARAMETER Experiment Name: Zm_Drought_P Parameter: Plant Line Value: 35A19
  misc_feature: MA Experiment 20000480 PARAMETER Experiment Name: Zm_Drought_P Parameter: Timepoint (hr) Value: 72
  misc_feature: MA Experiment 20000480 PARAMETER Experiment Name: Zm_Drought_P Parameter: Tissue Value: Aerial
  misc_feature: MA Experiment 20000480 PARAMETER Experiment Name: Zm_Drought_P Parameter: Treatment Value: Drought vs. No Drought
  misc_feature: MA Experiment ID: 20000492 Result: Down-regulated in Transcription
  misc_feature: MA Experiment 20000492 PARAMETER Experiment Name: Zm_Hybrid_Seed_Dev_P Parameter: DAP Value: 12
  misc_feature: MA Experiment 20000492 PARAMETER Experiment Name: Zm_Hybrid_Seed_Dev_P Parameter: Organism Value: Zea mays
  misc_feature: MA Experiment 20000492 PARAMETER Experiment Name: Zm_Hybrid_Seed_Dev_P Parameter: Plant Line Value: 35A19
  misc_feature: MA Experiment 20000492 PARAMETER Experiment Name: Zm_Hybrid_Seed_Dev_P Parameter: Tissue Value: Fert Kernel vs. Unfert Floret
  misc_feature: MA Experiment ID: 20000535 Result: Down-regulated in Transcription
  misc_feature: MA Experiment 20000535 PARAMETER Experiment Name: Zm_Hybrid_Seed_Dev_P Parameter: DAP Value: 30 vs. 12
  misc_feature: MA Experiment 20000535 PARAMETER Experiment Name: Zm_Hybrid_Seed_Dev_P Parameter: Organism Value: Zea mays
  misc_feature: MA Experiment 20000535 PARAMETER Experiment Name: Zm_Hybrid_Seed_Dev_P Parameter: Plant Line Value: 35A19
  misc_feature: MA Experiment 20000535 PARAMETER Experiment Name: Zm_Hybrid_Seed_Dev_P Parameter: Tissue Value: Embryo vs. Unfert Floret
  misc_feature: MA Experiment ID: 20001608 Result: Down-regulated in Transcription
  misc_feature: MA Experiment 20001608 PARAMETER Experiment Name: Zm_50ppm_KNO3_L-to-H_P Parameter: Age (day) Value: 21
  misc_feature: MA Experiment 20001608 PARAMETER Experiment Name: Zm_50ppm_KNO3_L-to-H_P Parameter: Organism Value: Zea mays
  misc_feature: MA Experiment 20001608 PARAMETER Experiment Name: Zm_50ppm_KNO3_L-to-H_P Parameter: Plant Line Value: 35A19
  misc_feature: MA Experiment 20001608 PARAMETER Experiment Name: Zm_50ppm_KNO3_L-to-H_P Parameter: Timepoint (hr) Value: 48
  misc_feature: MA Experiment 20001608 PARAMETER Experiment Name: Zm_50ppm_KNO3_L-to-H_P Parameter: Tissue Value: Shoots
  misc_feature: MA Experiment 20001608 PARAMETER Experiment Name: Zm_50ppm_KNO3_L-to-H_P Parameter: Treatment Value: 50ppm KNO3 vs. 50ppm KCl
ctgccattaagactagctaactagcgtgaaagagctcctccgacgactactagctctcgcttgctccgacgacccctgccggccgcctctggtacaacgtacgagaggaagagagacgatcgatggccggcgccaccgtgaccgtggacgaggtgaggaagggccagcgcgcgaccggccccgccaccgtgctggccatcgggacggcgacgcccgccaactgcgtgtaccaggccgactacccggactactacttccggatcaccaagagcgaccacctcaccgacctcaaggagaagttcaagaggatgtgcgacaagtcgatgatccggaagcggtacatgcacctgacggaggagttcctgtcggagaacccgagcatgtgcgcgtacatggcgccgtcgctggacgcgcggcaggacgtggtggtgacggaggtgccgaagctggggaaggcggccggcgcagaaggcgatcaaggagtgggggcagcccaagtcgcggatcacgcacctggtgttctgcaccacgtcgggggtggacatgccgggcgccgactaccagctgaccaaggcgctggggctgcgcccgtccgtgaaccgcctgatgatgtaccagcaggggtgcttcgcgggcggcacggtgctgcgcgtggccaaggacctggcggagaacaaccgcggggcgagggtcctggtggtgtgctcggagatcacggccgtgacgttccgcgggccgtccgagtcgcacctggactcgctcgtggggcaggcgctgttcggcgacggcgcggcggccgtcgtggtgggcgccgacccggacgggcgggtcgagcgcccgctgttccagctcgtgtcggcggcgcagaccatcctgcccgactcggagggcgccatcgacggccacctccgcgaggtggggctgacgttccacctgctcaaggacgtgcccgggctcatctccaagaacatcgagcgcgcgctggaggacgcgttcgagccgctcggcatctccgactggaactccatcttctgggtggcgcaccccggcgggcccgccatcctggaccaggtggaggccagggtcgggctggacaaggccaggatgcgcgccacccgccacgtcctctccgagtacggcaacatgtccagcgcctgcgtgctcttcatcctggacgagatgcgcaagcgctccgccgaggacggccaggccaccaccggcgaggggctcgactggggcgtcctcttcggcttcggcccgggcctcaccgtcgagaccgtcgtgctccacagcgtccccatcaccaccggagcgcccaccgccgcctgagtcgtccatctatcctcgcgatcgctccagacatgaacgacccgacctacgaataatgtatctgcgtaattaattactatctgtcttgtgtcctagtagctgttttaaaacccttaattaattttattatgggcg

SEQ ID NO: 13174 - protein, 420 aa, Zea mays subsp. mays
  peptide (1)..(420): Ceres Seq. ID no. 12408542
  misc_feature (5)..(113): Pfam Name: Chalcone and stilbene synthases, N-terminal domain Pfam Description: Chalcone and stilbene synthases, N-terminal
  misc_feature (1)..(113): Homolog of NCBI NO: 116380 NR Description: CHALCONE SYNTHASE C2 (NARINGENIN-CHALCONE
  misc_feature (1)..(116): Homolog of NCBI NO: 116374 NR Description: CHALCONE SYNTHASE WHP1 (NARINGENIN-CHALCONE
  misc_feature (1)..(113): Homolog of NCBI NO: 21263491 NR Description: Chalcone synthase 6 (Naringenin-chalcone synthase >gi|5305917|gb|AAD41878.1|AF152553_1 chalcone synthase 6 [Sorghum
  misc_feature (1)..(113): Homolog of NCBI NO: 21263494 NR Description: Chalcone synthase 3 (Naringenin-chalcone synthase >gi|5305911|gb|AAD41875.1|AF152550_1 chalcone synthase 3 [Sorghum
  misc_feature (1)..(113): Homolog of NCBI NO: 12229613 NR Description: Chalcone synthase 1 (Naringenin-chalcone synthase >gi|5305907|gb|AAD41873.1|AF152548_1 chalcone synthase 1 [Sorghum
  misc_feature (1)..(113): Homolog of NCBI NO: 21263495 NR Description: Chalcone synthase 2 (Naringenin-chalcone synthase >gi|5305909|gb|AAD41874.1|AF152549_1 chalcone synthase 2 [Sorghum
  misc_feature (1)..(113): Homolog of NCBI NO: 21263492 NR Description: Chalcone synthase 5 (Naringenin-chalcone synthase >gi|5305915|gb|AAD41877.1|AF152552_1 chalcone synthase 5 [Sorghum
  misc_feature (1)..(113): Homolog of NCBI NO: 21263493 NR Description: Chalcone synthase 4 (Naringenin-chalcone synthase >gi|5305913|gb|AAD41876.1|AF152551_1 chalcone synthase 4 [Sorghum
  misc_feature (1)..(113): Homolog of NCBI NO: 12229612 NR Description: Chalcone synthase 7 (Naringenin-chalcone synthase >gi|5305919|gb|AAD41879.1|AF152554_1 chalcone synthase 7 [Sorghum
  misc_feature (4)..(113): Homolog of NCBI NO: 13442780 NR Description: chalcone synthase [Oryza sativa (japonica
MAGATVTVDEVRKGQRATGPATVLAIGTATPANCVYQADYPDYYFRITKSDHLTDLKEKFKRMCDKSMIRKRYMHLTEEFLSENPSMCAYMAPSLDARQDVVVTEVPKLGKAAGAEGDQGVGAAQVADHAPGVLHHVGGGHAGRRLPADQGAGAAPVREPPDDVPAGVLRGRHGAARGQGPGGEQPRGEGPGGVLGDHGRDVPRAVRVAPGLARGAGAVRRRRGGRRGGRRPGRAGRAPAVPARVGGADHPARLGGRHRRPPPRGGADVPPAQGRARAHLQEHRARAGGRVRAARHLRLELHLLGGAPRRARHPGPGGGQGRAGQGQDARHPPRPLRVRQHVQRLRALHPGRDAQALRRGRPGHHRRGARLGRPLRLRPGPHRRDRRAPQRPHHHRSAHRRLSRPSILAIAPDMNDPTYE

SEQ ID NO: 13175 - protein, 358 aa, Zea mays subsp. mays
  peptide (1)..(358): Ceres Seq. ID no. 12408543
  misc_feature (1)..(51): Pfam Name: Chalcone and stilbene synthases, N-terminal domain Pfam Description: Chalcone and stilbene synthases, N-terminal
  misc_feature (1)..(51): Homolog of NCBI NO: 116380 NR Description: CHALCONE SYNTHASE C2 (NARINGENIN-CHALCONE
  misc_feature (1)..(54): Homolog of NCBI NO: 116374 NR Description: CHALCONE SYNTHASE WHP1 (NARINGENIN-CHALCONE
  misc_feature (1)..(51): Homolog of NCBI NO: 21263491 NR Description: Chalcone synthase 6 (Naringenin-chalcone synthase >gi|5305917|gb|AAD41878.1|AF152553_1 chalcone synthase 6 [Sorghum
  misc_feature (1)..(51): Homolog of NCBI NO: 21263494 NR Description: Chalcone synthase 3 (Naringenin-chalcone synthase >gi|5305911|gb|AAD41875.1|AF152550_1 chalcone synthase 3 [Sorghum
  misc_feature (1)..(51): Homolog of NCBI NO: 12229613 NR Description: Chalcone synthase 1 (Naringenin-chalcone synthase >gi|5305907|gb|AAD41873.1|AF152548_1 chalcone synthase 1 [Sorghum
  misc_feature (1)..(51): Homolog of NCBI NO: 21263495 NR Description: Chalcone synthase 2 (Naringenin-chalcone synthase >gi|5305909|gb|AAD41874.1|AF152549_1 chalcone synthase 2 [Sorghum
  misc_feature (1)..(51): Homolog of NCBI NO: 21263492 NR Description: Chalcone synthase 5 (Naringenin-chalcone synthase >gi|5305915|gb|AAD41877.1|AF152552_1 chalcone synthase 5 [Sorghum
  misc_feature (1)..(51): Homolog of NCBI NO: 21263493 NR Description: Chalcone synthase 4 (Naringenin-chalcone synthase >gi|5305913|gb|AAD41876.1|AF152551_1 chalcone synthase 4 [Sorghum
  misc_feature (1)..(51): Homolog of NCBI NO: 12229612 NR Description: Chalcone synthase 7 (Naringenin-chalcone synthase >gi|5305919|gb|AAD41879.1|AF152554_1 chalcone synthase 7 [Sorghum
  misc_feature (1)..(51): Homolog of NCBI NO: 13442780 NR Description: chalcone synthase [Oryza sativa (japonica
MCDKSMIRKRYMHLTEEFLSENPSMCAYMAPSLDARQDVVVTEVPKLGKAAGAEGDQGVGAAQVADHAPGVLHHVGGGHAGRRLPADQGAGAAPVREPPDDVPAGVLRGRHGAARGQGPGGEQPRGEGPGGVLGDHGRDVPRAVRVAPGLARGAGAVRRRRGGRRGGRRPGRAGRAPAVPARVGGADHPARLGGRHRRPPPRGGADVPPAQGRARAHLQEHRARAGGRVRAARHLRLELHLLGGAPRRARHPGPGGGQGRAGQGQDARHPPRPLRVRQHVQRLRALHPGRDAQALRRGRPGHHRRGARLGRPLRLRPGPHRRDRRAPQRPHHHRSAHRRLSRPSILAIAPDMNDPTYE

SEQ ID NO: 13176 - protein, 353 aa, Zea mays subsp. mays
  peptide (1)..(353): Ceres Seq. ID no. 12408544
  misc_feature (1)..(46): Homolog of NCBI NO: 116380 NR Description: CHALCONE SYNTHASE C2 (NARINGENIN-CHALCONE
  misc_feature (1)..(49): Homolog of NCBI NO: 116374 NR Description: CHALCONE SYNTHASE WHP1 (NARINGENIN-CHALCONE
  misc_feature (1)..(46): Homolog of NCBI NO: 21263491 NR Description: Chalcone synthase 6 (Naringenin-chalcone synthase >gi|5305917|gb|AAD41878.1|AF152553_1 chalcone synthase 6 [Sorghum
  misc_feature (1)..(46): Homolog of NCBI NO: 21263494 NR Description: Chalcone synthase 3 (Naringenin-chalcone synthase >gi|5305911|gb|AAD41875.1|AF152550_1 chalcone synthase 3 [Sorghum
  misc_feature (1)..(46): Homolog of NCBI NO: 12229613 NR Description: Chalcone synthase 1 (Naringenin-chalcone synthase >gi|5305907|gb|AAD41873.1|AF152548_1 chalcone synthase 1 [Sorghum
  misc_feature (1)..(46): Homolog of NCBI NO: 21263495 NR Description: Chalcone synthase 2 (Naringenin-chalcone synthase >gi|5305909|gb|AAD41874.1|AF152549_1 chalcone synthase 2 [Sorghum
  misc_feature (1)..(46): Homolog of NCBI NO: 21263492 NR Description: Chalcone synthase 5 (Naringenin-chalcone synthase >gi|5305915|gb|AAD41877.1|AF152552_1 chalcone synthase 5 [Sorghum
  misc_feature (1)..(46): Homolog of NCBI NO: 21263493 NR Description: Chalcone synthase 4 (Naringenin-chalcone synthase >gi|5305913|gb|AAD41876.1|AF152551_1 chalcone synthase 4 [Sorghum
  misc_feature (1)..(46): Homolog of NCBI NO: 12229612 NR Description: Chalcone synthase 7 (Naringenin-chalcone synthase >gi|5305919|gb|AAD41879.1|AF152554_1 chalcone synthase 7 [Sorghum
  misc_feature (1)..(46): Homolog of NCBI NO: 13442780 NR Description: chalcone synthase [Oryza sativa (japonica
MIRKRYMHLTEEFLSENPSMCAYMAPSLDARQDVVVTEVPKLGKAAGAEGDQGVGAAQVADHAPGVLHHVGGGHAGRRLPADQGAGAAPVREPPDDVPAGVLRGRHGAARGQGPGGEQPRGEGPGGVLGDHGRDVPRAVRVAPGLARGAGAVRRRRGGRRGGRRPGRAGRAPAVPARVGGADHPARLGGRHRRPPPRGGADVPPAQGRARAHLQEHRARAGGRVRAARHLRLELHLLGGAPRRARHPGPGGGQGRAGQGQDARHPPRPLRVRQHVQRLRALHPGRDAQALRRGRPGHHRRGARLGRPLRLRPGPHRRDRRAPQRPHHHRSAHRRLSRPSILAIAPDMNDPTYE

SEQ ID NO: 13177 - DNA, 1878 bp, Zea mays subsp. mays
  misc_feature (1)..(1878): Ceres Seq. ID no. 12345179
  misc_feature: MA Experiment ID: 108530 Result: Up-regulated in Transcription
  misc_feature: MA Experiment 108530 PARAMETER Experiment Name: Zm_Imbibed_Seeds_P Parameter: Age (day) Value: 6 vs. 2
  misc_feature: MA Experiment 108530 PARAMETER Experiment Name: Zm_Imbibed_Seeds_P Parameter: Organism Value: Zea mays
  misc_feature: MA Experiment 108530 PARAMETER Experiment Name: Zm_Imbibed_Seeds_P Parameter: Plant Line Value: 35A19
  misc_feature: MA Experiment 108530 PARAMETER Experiment Name: Zm_Imbibed_Seeds_P Parameter: Tissue Value: Aerial vs. Embryo
  misc_feature: MA Experiment ID: 108535 Result: Down-regulated in Transcription
  misc_feature: MA Experiment 108535 PARAMETER Experiment Name: Zm_Meristem_P Parameter: Age (day) Value: 8
  misc_feature: MA Experiment 108535 PARAMETER Experiment Name: Zm_Meristem_P Parameter: Organism Value: Zea mays
  misc_feature: MA Experiment 108535 PARAMETER Experiment Name: Zm_Meristem_P Parameter: Plant Line Value: 35A19
  misc_feature: MA Experiment 108535 PARAMETER Experiment Name: Zm_Meristem_P Parameter: Tissue Value: Root Meristem vs. Above Root Meristem
  misc_feature: MA Experiment ID: 108543 Result: Up-regulated in Transcription
  misc_feature: MA Experiment ID: 108544 Result: Up-regulated in Transcription
  misc_feature: MA Experiment ID: 108687 Result: Down-regulated in Transcription
  misc_feature: MA Experiment 108687 PARAMETER Experiment Name: Zm_Embryos-Flowers__P Parameter: Tissue Value: Embryo vs. Aerial+
  misc_feature: MA Experiment ID: 20000535 Result: Down-regulated in Transcription
  misc_feature: MA Experiment 20000535 PARAMETER Experiment Name: Zm_Hybrid_Seed_Dev_P Parameter: DAP Value: 30 vs. 12
  misc_feature: MA Experiment 20000535 PARAMETER Experiment Name: Zm_Hybrid_Seed_Dev_P Parameter: Organism Value: Zea mays
  misc_feature: MA Experiment 20000535 PARAMETER Experiment Name: Zm_Hybrid_Seed_Dev_P Parameter: Plant Line Value: 35A19
  misc_feature: MA Experiment 20000535 PARAMETER Experiment Name: Zm_Hybrid_Seed_Dev_P Parameter: Tissue Value: Embryo vs. Unfert Floret
atccgattggttggcctatttatctcccagtcccactccgtccactcgagctctccaccagctttccccttctctacggtccgggaatcggaagctcacggcagaagtttagccatggggcagacgcatcttttgttgctcgcttgtttctgggtcctgtcaacatgctccttgctacttgatgcttcctccgatggactgttaagaatcaacctgaacaagaagagactggacaaggaagctttgactgctgcgaaattggcgaagaaggagagcaaccttcgaaggtctgtgggtgctgaccagtatctcagtgcctcaactgatgacatagtccctttggacaactacctggacacccagtactttggacagatcagcatcggcacgccaccacagaacttcacagtgatattcgacactggaagctccaacttgtgggttcccctcatccaagtgctacttttcgatagcatgctacttacaccacagatacaagtcaaccaagtcgaagacttacacaaagaatggagaatcttgtacgataacatatggttctgggcaaatcgctggcttcttcagtgaggacaatgtgttggttggcaaccttgttgtgcaaaatcagaaatttattgagacaactcgagaaaccagccctactttcatcattgggaagtttgatggaattcttggtctcggatttcctgaaatttctgtaggaggagcccctccaatttggcagagcatgaaacagcagaaactggtcgcaaaggatgtcttctctttctggcttaatcgtgaccctgatgcatcttctggaggaggcgagcttgtctttggtggtgttgacccaaaacactacaaaggggaccatacatatgttcccgttacacgcaaaggctactggcagtttgacatgggagatcttattattggtggccactcaactggtttctgtgctggtggctgtgctgctattgtggactcagggacttcattgcttgctggtccaactaccatagtggctcaagtcaatcatgcaattggggctgagggaatcatcagtacagaatgcaaagaagtggtgagcgagtatggagagatgatccttgagttgctcatatcgcagacaagcccacagaaagtgtgcactcagattggtctctgtgtatttgatggtgcccattctgtcagcaatccaattgaatctgttgttgagaaacagaagcgtggttctgatcttttctgtactgcttgtgagatggctgttgtctggatacagaatcagctccgtgaaaacaagacaaaagaactcattttgaattatgctaatcagctctgtgagcgtctccctagccccaatggcgagtcaactgttgattgccatcagatctcaaagatgccaaatcttgcattcaccatagcaaacaagactttcaccttaacaccagagcagtacatagtgaagctggagcaagcaggacaaactatctgcatcagtgggtttatggcatttgacgtaccgcctcctcgtggtcctctctggatacttggtgatgtttttatgggtgcctaccacactgtttttgacttcggtgagaacaggattgggtttgccaaatctgcatgaggactggagttctgcgctttagtagcatgtccagtttgttatccgggtattgtacatatatatgttgccaactggtgtaatccgcagtgtttaatagtatatattcatgcagaaatctagaagattgtggcatgatatgtgtttgcaaatggagctatgctatgtatggagctccaggacctagagttttatgtaaagggagacgatgaggattagggcttttaacctattctcatcacgttattgtc

SEQ ID NO: 13178 - protein, 294 aa, Zea mays subsp. mays
  peptide (1)..(294): Ceres Seq. ID no. 12345180
  misc_feature (1)..(149): Pfam Name: Eukaryotic aspartyl protease Pfam Description: Eukaryotic aspartyl protease
  misc_feature (1)..(294): Homolog of NCBI NO: 1168537 NR Description: Aspartic proteinase precursor
  misc_feature (1)..(294): Homolog of NCBI NO: 7435839 NR Description: aspartic proteinase precursor, wound-induced - >gi|951449|gb|AAB18280.1| aspartic protease precursor
MKQQKLVAKDVFSFWLNRDPDASSGGGELVFGGVDPKHYKGDHTYVPVTRKGYWQFDMGDLIIGGHSTGFCAGGCAAIVDSGTSLLAGPTTIVAQVNHAIGAEGIISTECKEVVSEYGEMILELLISQTSPQKVCTQIGLCVFDGAHSVSNPIESVVEKQKRGSDLFCTACEMAVVWIQNQLRENKTKELILNYANQLCERLPSPNGESTVDCHQISKMPNLAFTIANKTFTLTPEQYIVKLEQAGQTICISGFMAFDVPPPRGPLWILGDVFMGAYHTVFDFGENRIGFAKSA

SEQ ID NO: 13179 - protein, 237 aa, Zea mays subsp. mays
  peptide (1)..(237): Ceres Seq. ID no. 12345181
  misc_feature (1)..(92): Pfam Name: Eukaryotic aspartyl protease Pfam Description: Eukaryotic aspartyl protease
  misc_feature (1)..(237): Homolog of NCBI NO: 1168537 NR Description: Aspartic proteinase precursor
  misc_feature (1)..(237): Homolog of NCBI NO: 7435839 NR Description: aspartic proteinase precursor, wound-induced - >gi|951449|gb|AAB18280.1| aspartic protease precursor
MGDLIIGGHSTGFCAGGCAAIVDSGTSLLAGPTTIVAQVNHAIGAEGIISTECKEVVSEYGEMILELLISQTSPQKVCTQIGLCVFDGAHSVSNPIESVVEKQKRGSDLFCTACEMAVVWIQNQLRENKTKELILNYANQLCERLPSPNGESTVDCHQISKMPNLAFTIANKTFTLTPEQYIVKLEQAGQTICISGFMAFDVPPPRGPLWILGDVFMGAYHTVFDFGENRIGFAKSA

SEQ ID NO: 13180 - protein, 194 aa, Zea mays subsp. mays
  peptide (1)..(194): Ceres Seq. ID no. 12345182
  misc_feature (67)..(149): Pfam Name: Eukaryotic aspartyl protease Pfam Description: Eukaryotic aspartyl protease
  misc_feature (39)..(149): Homolog of NCBI NO: 1168537 NR Description: Aspartic proteinase precursor
  misc_feature (39)..(149): Homolog of NCBI NO: 7435839 NR Description: aspartic proteinase precursor, wound-induced - >gi|951449|gb|AAB18280.1| aspartic protease precursor
IRLVGLFISQSHSVHSSSPPAFPFSTVRESEAHGRSLAMGQTHLLLLACFWVLSTCSLLLDASSDGLLRINLNKKRLDKEALTAAKLAKKESNLRRSVGADQYLSASTDDIVPLDNYLDTQYFGQISIGTPPQNFTVIFDTGSSNLWVPLIQVLLFDSMLLTPQIQVNQVEDLHKEWRILYDNIWFWANRWLLQ

SEQ ID NO: 13181 - DNA, 1260 bp, Zea mays subsp. mays
  misc_feature (1)..(1260): Ceres Seq. ID no. 12411385
  misc_feature: MA Experiment ID: 108504 Result: Up-regulated in Transcription
  misc_feature: MA Experiment 108504 PARAMETER Experiment Name: Zm_Drought_P Parameter: Age (day) Value: 8
  misc_feature: MA Experiment 108504 PARAMETER Experiment Name: Zm_Drought_P Parameter: Organism Value: Zea mays
  misc_feature: MA Experiment 108504 PARAMETER Experiment Name: Zm_Drought_P Parameter: Plant Line Value: 35A19
  misc_feature: MA Experiment 108504 PARAMETER Experiment Name: Zm_Drought_P Parameter: Timepoint (hr) Value: 12
  misc_feature: MA Experiment 108504 PARAMETER Experiment Name: Zm_Drought_P Parameter: Tissue Value: Aerial
  misc_feature: MA Experiment 108504 PARAMETER Experiment Name: Zm_Drought_P Parameter: Treatment Value: Drought vs. No Drought
  misc_feature: MA Experiment ID: 108515 Result: Up-regulated in Transcription
  misc_feature: MA Experiment 108515 PARAMETER Experiment Name: Zm_2mM_SA_P Parameter: Age (day) Value: 8
  misc_feature: MA Experiment 108515 PARAMETER Experiment Name: Zm_2mM_SA_P Parameter: Organism Value: Zea mays
  misc_feature: MA Experiment 108515 PARAMETER Experiment Name: Zm_2mM_SA_P Parameter: Plant Line Value: 35A19
  misc_feature: MA Experiment 108515 PARAMETER Experiment Name: Zm_2mM_SA_P Parameter: Timepoint (hr) Value: 12
  misc_feature: MA Experiment 108515 PARAMETER Experiment Name: Zm_2mM_SA_P Parameter: Tissue Value: Aerial
  misc_feature: MA Experiment 108515 PARAMETER Experiment Name: Zm_2mM_SA_P Parameter: Treatment Value: 2mM SA vs. No Treatment
  misc_feature: MA Experiment ID: 108522 Result: Up-regulated in Transcription
  misc_feature: MA Experiment 108522 PARAMETER Experiment Name: Zm_42deg_Heat_P Parameter: Age (day) Value: 8
  misc_feature: MA Experiment 108522 PARAMETER Experiment Name: Zm_42deg_Heat_P Parameter: Organism Value: Zea mays
  misc_feature: MA Experiment 108522 PARAMETER Experiment Name: Zm_42deg_Heat_P Parameter: Plant Line Value: 35A19
  misc_feature: MA Experiment 108522 PARAMETER Experiment Name: Zm_42deg_Heat_P Parameter: Temperature (deg C) Value: 42 vs. 22
  misc_feature: MA Experiment 108522 PARAMETER Experiment Name: Zm_42deg_Heat_P Parameter: Timepoint (hr) Value: 1
  misc_feature: MA Experiment 108522 PARAMETER Experiment Name: Zm_42deg_Heat_P Parameter: Tissue Value: Aerial
  misc_feature: MA Experiment ID: 108527 Result: Up-regulated in Transcription
  misc_feature: MA Experiment 108527 PARAMETER Experiment Name: Zm_5mM_NO_P Parameter: Age (day) Value: 8
  misc_feature: MA Experiment 108527 PARAMETER Experiment Name: Zm_5mM_NO_P Parameter: Organism Value: Zea mays
  misc_feature: MA Experiment 108527 PARAMETER Experiment Name: Zm_5mM_NO_P Parameter: Plant Line Value: 35A19
  misc_feature: MA Experiment 108527 PARAMETER Experiment Name: Zm_5mM_NO_P Parameter: Timepoint (hr) Value: 6
  misc_feature: MA Experiment 108527 PARAMETER Experiment Name: Zm_5mM_NO_P Parameter: Tissue Value: Aerial
  misc_feature: MA Experiment 108527 PARAMETER Experiment Name: Zm_5mM_NO_P Parameter: Treatment Value: 5mM NO vs. No Treatment
  misc_feature: MA Experiment ID: 108535 Result: Down-regulated in Transcription
  misc_feature: MA Experiment 108535 PARAMETER Experiment Name: Zm_Meristem_P Parameter: Age (day) Value: 8
  misc_feature: MA Experiment 108535 PARAMETER Experiment Name: Zm_Meristem_P Parameter: Organism Value: Zea mays
  misc_feature: MA Experiment 108535 PARAMETER Experiment Name: Zm_Meristem_P Parameter: Plant Line Value: 35A19
  misc_feature: MA Experiment 108535 PARAMETER Experiment Name: Zm_Meristem_P Parameter: Tissue Value: Root Meristem vs. Above Root Meristem
  misc_feature: MA Experiment ID: 108542 Result: Up-regulated in Transcription
  misc_feature: MA Experiment 108542 PARAMETER Experiment Name: Zm_150mM_NaCl_P Parameter: Age (day) Value: 8
  misc_feature: MA Experiment 108542 PARAMETER Experiment Name: Zm_150mM_NaCl_P Parameter: Organism Value: Zea mays
  misc_feature: MA Experiment 108542 PARAMETER Experiment Name: Zm_150mM_NaCl_P Parameter: Plant Line Value: 35A19
  misc_feature: MA Experiment 108542 PARAMETER Experiment Name: Zm_150mM_NaCl_P Parameter: Timepoint (hr) Value: 6
  misc_feature: MA Experiment 108542 PARAMETER Experiment Name: Zm_150mM_NaCl_P Parameter: Tissue Value: Aerial
  misc_feature: MA Experiment 108542 PARAMETER Experiment Name: Zm_150mM_NaCl_P Parameter: Treatment Value: 150mM NaCl vs. No Treatment
  misc_feature: MA Experiment ID: 108543 Result: Down-regulated in Transcription
  misc_feature: MA Experiment ID: 108544 Result: Down-regulated in Transcription
  misc_feature: MA Experiment ID: 108556 Result: Up-regulated in Transcription
  misc_feature: MA Experiment 108556 PARAMETER Experiment Name: Zm_Drought_P Parameter: Age (day) Value: 9
  misc_feature: MA Experiment 108556 PARAMETER Experiment Name: Zm_Drought_P Parameter: Organism Value: Zea mays
  misc_feature: MA Experiment 108556 PARAMETER Experiment Name: Zm_Drought_P Parameter: Plant Line Value: 35A19
  misc_feature: MA Experiment 108556 PARAMETER Experiment Name: Zm_Drought_P Parameter: Timepoint (hr) Value: 24
  misc_feature: MA Experiment 108556 PARAMETER Experiment Name: Zm_Drought_P Parameter: Tissue Value: Aerial
  misc_feature: MA Experiment 108556 PARAMETER Experiment Name: Zm_Drought_P Parameter: Treatment Value: Drought vs. No Drought
  misc_feature: MA Experiment ID: 20000478 Result: Up-regulated in Transcription
  misc_feature: MA Experiment 20000478 PARAMETER Experiment Name: Zm_5mM_SA_P Parameter: Age (day) Value: 11
  misc_feature: MA Experiment 20000478 PARAMETER Experiment Name: Zm_5mM_SA_P Parameter: Organism Value: Zea mays
  misc_feature: MA Experiment 20000478 PARAMETER Experiment Name: Zm_5mM_SA_P Parameter: Plant Line Value: 35A19
  misc_feature: MA Experiment 20000478 PARAMETER Experiment Name: Zm_5mM_SA_P Parameter: Timepoint (hr) Value: 72
  misc_feature: MA Experiment 20000478 PARAMETER Experiment Name: Zm_5mM_SA_P Parameter: Tissue Value: Aerial
  misc_feature: MA Experiment 20000478 PARAMETER Experiment Name: Zm_5mM_SA_P Parameter: Treatment Value: 5mM SA vs. No Treatment
  misc_feature: MA Experiment ID: 20000480 Result: Up-regulated in Transcription
  misc_feature: MA Experiment 20000480 PARAMETER Experiment Name: Zm_Drought_P Parameter: Age (day) Value: 11
  misc_feature: MA Experiment 20000480 PARAMETER Experiment Name: Zm_Drought_P Parameter: Organism Value: Zea mays
  misc_feature: MA Experiment 20000480 PARAMETER Experiment Name: Zm_Drought_P Parameter: Plant Line Value: 35A19
  misc_feature: MA Experiment 20000480 PARAMETER Experiment Name: Zm_Drought_P Parameter: Timepoint (hr) Value: 72
  misc_feature: MA Experiment 20000480 PARAMETER Experiment Name: Zm_Drought_P Parameter: Tissue Value: Aerial
  misc_feature: MA Experiment 20000480 PARAMETER Experiment Name: Zm_Drought_P Parameter: Treatment Value: Drought vs. No Drought
  misc_feature: MA Experiment ID: 20000488 Result: Down-regulated in Transcription
  misc_feature: MA Experiment 20000488 PARAMETER Experiment Name: Zm_50mM_NH4NO3_L_to_H_P Parameter: Organism Value: Zea mays
  misc_feature: MA Experiment 20000488 PARAMETER Experiment Name: Zm_50mM_NH4NO3_L_to_H_P Parameter: Timepoint (hr) Value: 8
  misc_feature: MA Experiment 20000488 PARAMETER Experiment Name: Zm_50mM_NH4NO3_L_to_H_P Parameter: Tissue Value: Leaves
  misc_feature: MA Experiment 20000488 PARAMETER Experiment Name: Zm_50mM_NH4NO3_L_to_H_P Parameter: Treatment Value: 50mM NH4NO3 vs. 100mM Mannitol
  misc_feature: MA Experiment ID: 20000532 Result: Up-regulated in Transcription
  misc_feature: MA Experiment 20000532 PARAMETER Experiment Name: Zm_0.001percent_MeJA_P Parameter: Age (day) Value: 10
  misc_feature: MA Experiment 20000532 PARAMETER Experiment Name: Zm_0.001percent_MeJA_P Parameter: Organism Value: Zea mays
  misc_feature: MA Experiment 20000532 PARAMETER Experiment Name: Zm_0.001percent_MeJA_P Parameter: Plant Line Value: 35A19
  misc_feature: MA Experiment 20000532 PARAMETER Experiment Name: Zm_0.001percent_MeJA_P Parameter: Timepoint (hr) Value: 48
  misc_feature: MA Experiment 20000532 PARAMETER Experiment Name: Zm_0.001percent_MeJA_P Parameter: Tissue Value: Aerial
  misc_feature: MA Experiment 20000532 PARAMETER Experiment Name: Zm_0.001percent_MeJA_P Parameter: Treatment Value: 0.001percent MeJA vs. No Treatment
  misc_feature: MA Experiment ID: 20000533 Result: Up-regulated in Transcription
  misc_feature: MA Experiment 20000533 PARAMETER Experiment Name: Zm_0.001percent_MeJA_P Parameter: Age (day) Value: 11
  misc_feature: MA Experiment 20000533 PARAMETER Experiment Name: Zm_0.001percent_MeJA_P Parameter: Organism Value: Zea mays
  misc_feature: MA Experiment 20000533 PARAMETER Experiment Name: Zm_0.001percent_MeJA_P Parameter: Plant Line Value: 35A19
  misc_feature: MA Experiment 20000533 PARAMETER Experiment Name: Zm_0.001percent_MeJA_P Parameter: Timepoint (hr) Value: 72
  misc_feature: MA Experiment 20000533 PARAMETER Experiment Name: Zm_0.001percent_MeJA_P Parameter: Tissue Value: Aerial
  misc_feature: MA Experiment 20000533 PARAMETER Experiment Name: Zm_0.001percent_MeJA_P Parameter: Treatment Value: 0.001percent MeJA vs. No Treatment
  misc_feature: MA Experiment ID: 20000535 Result: Down-regulated in Transcription
  misc_feature: MA Experiment 20000535 PARAMETER Experiment Name: Zm_Hybrid_Seed_Dev_P Parameter: DAP Value: 30 vs. 12
  misc_feature: MA Experiment 20000535 PARAMETER Experiment Name: Zm_Hybrid_Seed_Dev_P Parameter: Organism Value: Zea mays
  misc_feature: MA Experiment 20000535 PARAMETER Experiment Name: Zm_Hybrid_Seed_Dev_P Parameter: Plant Line Value: 35A19
  misc_feature: MA Experiment 20000535 PARAMETER Experiment Name: Zm_Hybrid_Seed_Dev_P Parameter: Tissue Value: Embryo vs. Unfert Floret
  misc_feature: MA Experiment ID: 20000626 Result: Up-regulated in Transcription
  misc_feature: MA Experiment 20000626 PARAMETER Experiment Name: Zm_Herbicide-Treatments_P Parameter: Timepoint (hr) Value: 12
  misc_feature: MA Experiment 20000626 PARAMETER Experiment Name: Zm_Herbicide-Treatments_P Parameter: Tissue Value: Aerial
  misc_feature: MA Experiment 20000626 PARAMETER Experiment Name: Zm_Herbicide-Treatments_P Parameter: Treatment Value: Roundup vs. No Treatment
gtattccttcagggaacggcttccatagcgctgaagcgaggcgtgccgcattgggttgttcgagagctcctagtgttgccctactacatgatggagggcgatctccccacgcccgcgaacgctagggttgttgccgtggtcaccggcggcaacaaggggatcgggctggaggtgtgccgcagctggcctgcagcggcgtcaccgtcgtcttgacagccagggacgacgcgaggggcgcggcggccgtggagaacctcagaggcctggggctctccgatgtcctcttccaccgactggacgttaccgacgctccgagcatcgctcgactcgctggtttcctcgagacccgtttcgggaagctagacatcctggtaaataatgccgcgattggcggggttgagtatgttcatgaccaagattgtggctcagtaacgagcgaggaaaaggcaaagttgagcggcatggacatggatcagaggcttggatggctgtgggagaattgccgggagacctacgacgatgcaaagacaggcctacgaacaaactactacggcacaaagcaagtaatcgagactttactgcctctactgcaagcctcctccgatgggaggatcgttaacgtctcctcccacttcggccagctaaggcttttccgaaacgaggagctgaagcgggagctgaacgacattgacaacctcaccccggagaggctggatggcctgctggacatgttcttaaatgacttggaggccggcgaggtggagtcgtcgaacggctggccgatgtatttctcggcgtacaaggtggccaaggcggccatgaacgcgtactcgaggatcctggcgaggcggcaccccgagctgcgcgtcaactgcgtgcaccccggctatgtcaggaccgacatgaccatacactcggggctgttgacaccggaggaaggtggcagcagggtggccatggtggcgctgctgccgggaggcgggccaaccggcgcgttctttgaagattttcaacagtcgtcgttcgtgtgatgttgaacatgcagctgcatctcatatgtattctatagatattatttatgtgaaagatgctacagtacgctccccctgcgtttacattcagcgcacctctgaactcttaaacttcaagtcttcaacgacaaatctagacatgatgctgcaaaacatttttaatgtctcctctttcaaaacacgagtttcgtgcgtcatgcacgaagcacaaagagttttttttctcttc

SEQ ID NO: 13182 - protein, 189 aa, Zea mays subsp. mays
  peptide (1)..(189): Ceres Seq. ID no. 12411386
  misc_feature (1)..(189): Homolog of NCBI NO: 38346772 NR Description: OSJNBa0081C01.23 [Oryza sativa (japonica
  misc_feature (1)..(189): Homolog of NCBI NO: 38346769 NR Description: OSJNBa0081C01.20 [Oryza sativa (japonica
  misc_feature (1)..(189): Homolog of NCBI NO: 38346768 NR Description: OSJNBa0081C01.19 [Oryza sativa (japonica
  misc_feature (1)..(189): Homolog of NCBI NO: 38346774 NR Description: OSJNBa0081C01.25 [Oryza sativa (japonica
  misc_feature (1)..(189): Homolog of NCBI NO: 38346767 NR Description: OSJNBa0081C01.18 [Oryza sativa (japonica
  misc_feature (1)..(181): Homolog of NCBI NO: 33146492 NR Description: carbonyl reductase -like protein [Oryza sativa
  misc_feature (1)..(188): Homolog of NCBI NO: 15224100 NR Description: putative carbonyl reductase; protein id: [Arabidopsis thaliana] >gi|25412197|pir||F84633 probable carbonyl
  misc_feature (1)..(188): Homolog of NCBI NO: 18378884 NR Description: carbonyl reductase, putative; protein id: [Arabidopsis thaliana] >gi|13878161|gb|AAK44158.1|AF370343_1 carbonyl reductase [Arabidopsis thaliana]
  misc_feature (1)..(188): Homolog of NCBI NO: 25518668 NR Description: hypothetical protein T1N6.22 - Arabidopsis
  misc_feature (1)..(188): Homolog of NCBI NO: 15233062 NR Description: putative protein; protein id: At3g61220.1, by cDNA: gi_15028054, supported by cDNA: gi_20259056 [Arabidopsis
MDMDQRLGWLWENCRETYDDAKTGLRTNYYGTKQVIETLLPLLQASSDGRIVNVSSHFGQLRLFRNEELKRELNDIDNLTPERLDGLLDMFLNDLEAGEVESSNGWPMYFSAYKVAKAAMNAYSRILARRHPELRVNCVHPGYVRTDMTIHSGLLTPEEGGSRVAMVALLPGGGPTGAFFEDFQQSSFV

SEQ ID NO: 13183 - protein, 187 aa, Zea mays subsp. mays
  peptide (1)..(187): Ceres Seq. ID no. 12411387
  misc_feature (1)..(187): Homolog of NCBI NO: 38346772 NR Description: OSJNBa0081C01.23 [Oryza sativa (japonica
  misc_feature (1)..(187): Homolog of NCBI NO: 38346769 NR Description: OSJNBa0081C01.20 [Oryza sativa (japonica
  misc_feature (1)..(187): Homolog of NCBI NO: 38346768 NR Description: OSJNBa0081C01.19 [Oryza sativa (japonica
  misc_feature (1)..(187): Homolog of NCBI NO: 38346774 NR Description: OSJNBa0081C01.25 [Oryza sativa (japonica
  misc_feature (1)..(187): Homolog of NCBI NO: 38346767 NR Description: OSJNBa0081C01.18 [Oryza sativa (japonica
  misc_feature (1)..(179): Homolog of NCBI NO: 33146492 NR Description: carbonyl reductase -like protein [Oryza sativa
  misc_feature (1)..(186): Homolog of NCBI NO: 15224100 NR Description: putative carbonyl reductase; protein id: [Arabidopsis thaliana] >gi|25412197|pir||F84633 probable carbonyl
  misc_feature (1)..(186): Homolog of NCBI NO: 18378884 NR Description: carbonyl reductase, putative; protein id: [Arabidopsis thaliana] >gi|13878161|gb|AAK44158.1|AF370343_1 carbonyl reductase [Arabidopsis thaliana]
  misc_feature (1)..(186): Homolog of NCBI NO: 25518668 NR Description: hypothetical protein T1N6.22 - Arabidopsis
  misc_feature (1)..(186): Homolog of NCBI NO: 15233062 NR Description: putative protein; protein id: At3g61220.1, by cDNA: gi_15028054, supported by cDNA: gi_20259056 [Arabidopsis
MDQRLGWLWENCRETYDDAKTGLRTNYYGTKQVIETLLPLLQASSDGRIVNVSSHFGQLRLFRNEELKRELNDIDNLTPERLDGLLDMFLNDLEAGEVESSNGWPMYFSAYKVAKAAMNAYSRILARRHPELRVNCVHPGYVRTDMTIHSGLLTPEEGGSRVAMVALLPGGGPTGAFFEDFQQSSFV

SEQ ID NO: 13184 - protein, 100 aa, Zea mays subsp. mays
  peptide (1)..(100): Ceres Seq. ID no. 12411388
  misc_feature (1)..(99): Homolog of NCBI NO: 15224100 NR Description: putative carbonyl reductase; protein id: [Arabidopsis thaliana] >gi|25412197|pir||F84633 probable carbonyl
  misc_feature (1)..(99): Homolog of NCBI NO: 18378884 NR Description: carbonyl reductase, putative; protein id: [Arabidopsis thaliana] >gi|13878161|gb|AAK44158.1|AF370343_1 carbonyl reductase [Arabidopsis thaliana]
  misc_feature (1)..(99): Homolog of NCBI NO: 25518668 NR Description: hypothetical protein T1N6.22 - Arabidopsis
  misc_feature (1)..(99): Homolog of NCBI NO: 15233062 NR Description: putative protein; protein id: At3g61220.1, by cDNA: gi_15028054, supported by cDNA: gi_20259056 [Arabidopsis
  misc_feature (1)..(100): Homolog of NCBI NO: 38346772 NR Description: OSJNBa0081C01.23 [Oryza sativa (japonica
  misc_feature (1)..(100): Homolog of NCBI NO: 38346769 NR Description: OSJNBa0081C01.20 [Oryza sativa (japonica
  misc_feature (1)..(100): Homolog of NCBI NO: 38346768 NR Description: OSJNBa0081C01.19 [Oryza sativa (japonica
  misc_feature (1)..(100): Homolog of NCBI NO: 38346774 NR Description: OSJNBa0081C01.25 [Oryza sativa (japonica
  misc_feature (1)..(100): Homolog of NCBI NO: 38346767 NR Description: OSJNBa0081C01.18 [Oryza sativa (japonica
  misc_feature (1)..(92): Homolog of NCBI NO: 33146492 NR Description: carbonyl reductase -like protein [Oryza sativa
MFLNDLEAGEVESSNGWPMYFSAYKVAKAAMNAYSRILARRHPELRVNCVHPGYVRTDMTIHSGLLTPEEGGSRVAMVALLPGGGPTGAFFEDFQQSSFV

SEQ ID NO: 13185 - DNA, 1444 bp, Zea mays subsp. mays
  misc_feature (1)..(1444): Ceres Seq. ID no. 13502459
  misc_feature: MA Experiment ID: 108504 Result: Down-regulated in Transcription
  misc_feature: MA Experiment 108504 PARAMETER Experiment Name: Zm_Drought_P Parameter: Age (day) Value: 8
  misc_feature: MA Experiment 108504 PARAMETER Experiment Name: Zm_Drought_P Parameter: Organism Value: Zea mays
  misc_feature: MA Experiment 108504 PARAMETER Experiment Name: Zm_Drought_P Parameter: Plant Line Value: 35A19
  misc_feature: MA Experiment 108504 PARAMETER Experiment Name: Zm_Drought_P Parameter: Timepoint (hr) Value: 12
  misc_feature: MA Experiment 108504 PARAMETER Experiment Name: Zm_Drought_P Parameter: Tissue Value: Aerial
  misc_feature: MA Experiment 108504 PARAMETER Experiment Name: Zm_Drought_P Parameter: Treatment Value: Drought vs. No Drought
  misc_feature: MA Experiment ID: 108515 Result: Up-regulated in Transcription
  misc_feature: MA Experiment 108515 PARAMETER Experiment Name: Zm_2mM_SA_P Parameter: Age (day) Value: 8
  misc_feature: MA Experiment 108515 PARAMETER Experiment Name: Zm_2mM_SA_P Parameter: Organism Value: Zea mays
  misc_feature: MA Experiment 108515 PARAMETER Experiment Name: Zm_2mM_SA_P Parameter: Plant Line Value: 35A19
  misc_feature: MA Experiment 108515 PARAMETER Experiment Name: Zm_2mM_SA_P Parameter: Timepoint (hr) Value: 12
  misc_feature: MA Experiment 108515 PARAMETER Experiment Name: Zm_2mM_SA_P Parameter: Tissue Value: Aerial
  misc_feature: MA Experiment 108515 PARAMETER Experiment Name: Zm_2mM_SA_P Parameter: Treatment Value: 2mM SA vs. No Treatment
  misc_feature: MA Experiment ID: 108523 Result: Down-regulated in Transcription
  misc_feature: MA Experiment 108523 PARAMETER Experiment Name: Zm_42deg_Heat_P Parameter: Age (day) Value: 8
  misc_feature: MA Experiment 108523 PARAMETER Experiment Name: Zm_42deg_Heat_P Parameter: Organism Value: Zea mays
  misc_feature: MA Experiment 108523 PARAMETER Experiment Name: Zm_42deg_Heat_P Parameter: Plant Line Value: 35A19
  misc_feature: MA Experiment 108523 PARAMETER Experiment Name: Zm_42deg_Heat_P Parameter: Temperature (deg C) Value: 42 vs. 22
  misc_feature: MA Experiment 108523 PARAMETER Experiment Name: Zm_42deg_Heat_P Parameter: Timepoint (hr) Value: 6
  misc_feature: MA Experiment 108523 PARAMETER Experiment Name: Zm_42deg_Heat_P Parameter: Tissue Value: Aerial
  misc_feature: MA Experiment ID: 108529 Result: Down-regulated in Transcription
  misc_feature: MA Experiment 108529 PARAMETER Experiment Name: Zm_Imbibed_Seeds_P Parameter: Age (day) Value: 5 vs. 2
  misc_feature: MA Experiment 108529 PARAMETER Experiment Name: Zm_Imbibed_Seeds_P Parameter: Organism Value: Zea mays
  misc_feature: MA Experiment 108529 PARAMETER Experiment Name: Zm_Imbibed_Seeds_P Parameter: Plant Line Value: 35A19
  misc_feature: MA Experiment 108529 PARAMETER Experiment Name: Zm_Imbibed_Seeds_P Parameter: Tissue Value: Roots vs. Embryo
  misc_feature: MA Experiment ID: 108530 Result: Down-regulated in Transcription
  misc_feature: MA Experiment 108530 PARAMETER Experiment Name: Zm_Imbibed_Seeds_P Parameter: Age (day) Value: 6 vs. 2
  misc_feature: MA Experiment 108530 PARAMETER Experiment Name: Zm_Imbibed_Seeds_P Parameter: Organism Value: Zea mays
  misc_feature: MA Experiment 108530 PARAMETER Experiment Name: Zm_Imbibed_Seeds_P Parameter: Plant Line Value: 35A19
  misc_feature: MA Experiment 108530 PARAMETER Experiment Name: Zm_Imbibed_Seeds_P Parameter: Tissue Value: Aerial vs. Embryo
  misc_feature: MA Experiment ID: 108556 Result: Down-regulated in Transcription
  misc_feature: MA Experiment 108556 PARAMETER Experiment Name: Zm_Drought_P Parameter: Age (day) Value: 9
  misc_feature: MA Experiment 108556 PARAMETER Experiment Name: Zm_Drought_P Parameter: Organism Value: Zea mays
  misc_feature: MA Experiment 108556 PARAMETER Experiment Name: Zm_Drought_P Parameter: Plant Line Value: 35A19
  misc_feature: MA Experiment 108556 PARAMETER Experiment Name: Zm_Drought_P Parameter: Timepoint (hr) Value: 24
  misc_feature: MA Experiment 108556 PARAMETER Experiment Name: Zm_Drought_P Parameter: Tissue Value: Aerial
  misc_feature: MA Experiment 108556 PARAMETER Experiment Name: Zm_Drought_P Parameter: Treatment Value: Drought vs. No Drought
  misc_feature: MA Experiment ID: 108559 Result: Down-regulated in Transcription
  misc_feature: MA Experiment 108559 PARAMETER Experiment Name: Zm_5mM_NO_P Parameter: Age (day) Value: 8
  misc_feature: MA Experiment 108559 PARAMETER Experiment Name: Zm_5mM_NO_P Parameter: Organism Value: Zea mays
  misc_feature: MA Experiment 108559 PARAMETER Experiment Name: Zm_5mM_NO_P Parameter: Plant Line Value: 35A19
  misc_feature: MA Experiment 108559 PARAMETER Experiment Name: Zm_5mM_NO_P Parameter: Timepoint (hr) Value: 12
  misc_feature: MA Experiment 108559 PARAMETER Experiment Name: Zm_5mM_NO_P Parameter: Tissue Value: Aerial
  misc_feature: MA Experiment 108559 PARAMETER Experiment Name: Zm_5mM_NO_P Parameter: Treatment Value: 5mM NO vs. No Treatment
  misc_feature: MA Experiment ID: 108597 Result: Down-regulated in Transcription
  misc_feature: MA Experiment 108597 PARAMETER Experiment Name: Zm_100uM_ABA_P Parameter: Age (day) Value: 9
  misc_feature: MA Experiment 108597 PARAMETER Experiment Name: Zm_100uM_ABA_P Parameter: Organism Value: Zea mays
  misc_feature: MA Experiment 108597 PARAMETER Experiment Name: Zm_100uM_ABA_P Parameter: Plant Line Value: 35A19
  misc_feature: MA Experiment 108597 PARAMETER Experiment Name: Zm_100uM_ABA_P Parameter: Timepoint (hr) Value: 24
  misc_feature: MA Experiment 108597 PARAMETER Experiment Name: Zm_100uM_ABA_P Parameter: Tissue Value: Aerial
  misc_feature: MA Experiment 108597 PARAMETER Experiment Name: Zm_100uM_ABA_P Parameter: Treatment Value: 100uM ABA vs. No Treatment
  misc_feature: MA Experiment ID: 20000478 Result: Down-regulated in Transcription
  misc_feature: MA Experiment 20000478 PARAMETER Experiment Name: Zm_5mM_SA_P Parameter: Age (day) Value: 11
  misc_feature: MA Experiment 20000478 PARAMETER Experiment Name: Zm_5mM_SA_P Parameter: Organism Value: Zea mays
  misc_feature: MA Experiment 20000478 PARAMETER Experiment Name: Zm_5mM_SA_P Parameter: Plant Line Value: 35A19
  misc_feature: MA Experiment 20000478 PARAMETER Experiment Name: Zm_5mM_SA_P Parameter: Timepoint (hr) Value: 72
  misc_feature: MA Experiment 20000478 PARAMETER Experiment Name: Zm_5mM_SA_P Parameter: Tissue Value: Aerial
  misc_feature: MA Experiment 20000478 PARAMETER Experiment Name: Zm_5mM_SA_P Parameter: Treatment Value: 5mM SA vs. No Treatment
  misc_feature: MA Experiment ID: 20000480 Result: Down-regulated in Transcription
  misc_feature: MA Experiment 20000480 PARAMETER Experiment Name: Zm_Drought_P Parameter: Age (day) Value: 11
  misc_feature: MA Experiment 20000480 PARAMETER Experiment Name: Zm_Drought_P Parameter: Organism Value: Zea mays
  misc_feature: MA Experiment 20000480 PARAMETER Experiment Name: Zm_Drought_P Parameter: Plant Line Value: 35A19
  misc_feature: MA Experiment 20000480 PARAMETER Experiment Name: Zm_Drought_P Parameter: Timepoint (hr) Value: 72
  misc_feature: MA Experiment 20000480 PARAMETER Experiment Name: Zm_Drought_P Parameter: Tissue Value: Aerial
  misc_feature: MA Experiment 20000480 PARAMETER Experiment Name: Zm_Drought_P Parameter: Treatment Value: Drought vs. No Drought
  misc_feature: MA Experiment ID: 20000487 Result: Down-regulated in Transcription
  misc_feature: MA Experiment 20000487 PARAMETER Experiment Name: Zm_50mM_NH4NO3_L_to_H_P Parameter: Organism Value: Zea mays
  misc_feature: MA Experiment 20000487 PARAMETER Experiment Name: Zm_50mM_NH4NO3_L_to_H_P Parameter: Timepoint (hr) Value: 4
  misc_feature: MA Experiment 20000487 PARAMETER Experiment Name: Zm_50mM_NH4NO3_L_to_H_P Parameter: Tissue Value: Leaves
  misc_feature: MA Experiment 20000487 PARAMETER Experiment Name: Zm_50mM_NH4NO3_L_to_H_P Parameter: Treatment Value: 50mM NH4NO3 vs. 100mM Mannitol
  misc_feature: MA Experiment ID: 20000535 Result: Up-regulated in Transcription
  misc_feature: MA Experiment 20000535 PARAMETER Experiment Name: Zm_Hybrid_Seed_Dev_P Parameter: DAP Value: 30 vs. 12
  misc_feature: MA Experiment 20000535 PARAMETER Experiment Name: Zm_Hybrid_Seed_Dev_P Parameter: Organism Value: Zea mays
  misc_feature: MA Experiment 20000535 PARAMETER Experiment Name: Zm_Hybrid_Seed_Dev_P Parameter: Plant Line Value: 35A19
  misc_feature: MA Experiment 20000535 PARAMETER Experiment Name: Zm_Hybrid_Seed_Dev_P Parameter: Tissue Value: Embryo vs. Unfert Floret
  misc_feature: MA Experiment ID: 20000627 Result: Up-regulated in Transcription
  misc_feature: MA Experiment 20000627 PARAMETER Experiment Name: Zm_Herbicide-Treatments_P Parameter: Timepoint (hr) Value: 12
  misc_feature: MA Experiment 20000627 PARAMETER Experiment Name: Zm_Herbicide-Treatments_P Parameter: Tissue Value: Aerial
  misc_feature: MA Experiment 20000627 PARAMETER Experiment Name: Zm_Herbicide-Treatments_P Parameter: Treatment Value: Finale vs. No Treatment
  misc_feature: MA Experiment ID: 20000632 Result: Down-regulated in Transcription
  misc_feature: MA Experiment 20000632 PARAMETER Experiment Name: Zm_Herbicide-Treatments_P Parameter: Timepoint (hr) Value: 4
  misc_feature: MA Experiment 20000632 PARAMETER Experiment Name: Zm_Herbicide-Treatments_P Parameter: Tissue Value: Aerial
  misc_feature: MA Experiment 20000632 PARAMETER Experiment Name: Zm_Herbicide-Treatments_P Parameter: Treatment Value: Glean vs. No Treatment
gcacgagaccattacctagaacatcctaatcgaaaagtcatcaatcaaatactcagacaaccatggggcaccagcaggcgcagcacggcaaggacgacaccgaggagctgcttgcagcccaccggcagctgtggtgccatgccctgggctacgtcaagtccatggcgctcaagtgcgccctggacctgcgcatccccgacaccatcgaccgctgcggcgggagcgccaccctgggcgagctgctcgccgccagcgagatcccggcgtccaaccacgactacctccggcgggtcatgcgcacgctgacagccatgcgcatcttcgcggccagccacgaccccgccaaggccgacgacgcggccgccatctcctaccagctgaccccggcgtcccggctgctcgtcagcagcagcagcagcgtcgacgacgccgccggcgcctcgaaggagaacactactaccccgagcatcctccccaacatcgcccacctggtccgccccaacaccatctccctgctgttcagcatgggcgagtggatgaaggacgagagcgcggcgtccgtgtcgctgtacgagacggtgcaccggcaggggatgtgggcgtgcgtggaggacgacgcggccaacagggccagcttctacgagagcatggacgccgacacccggctcgtgatgcaggccgtggtccgccggtgcccgcacgtgttcgacggcgtcaagtcgctcgtcgacgtcggcggcggccgcggcaccgccgccgccgccgtcgtcgccgccttcccgcacatccagaggtgcaccgtcatggacctcccccacgtcgtcgccgaggctcccgccggcaccgccggcctgtccttccacggcggcgacatgttcgagcacatcccgtcggctgacgcactcatgctcaagtggatcctgcacgactgggatgaggacaagtgcatcaagataatggagcgctgcaaggaagcgatcggtggcaaggaagcaggggggaaggtgattataatagacacggtgctcggatctcgggcagacgacgacgacgacgacaagacgtgcagggagacgtatgtgttggatctccacatactgagcttcgtgaacggggcggagcgggaggagcaggagtggaggaggatcttcctggcggctgggttccgtgactacaagatcacgcacacccgaggcatcccgtccatcatcgaggtcttcccgtgatgatgatggatcgagagtcgatcatatatgcatgtttgtacgtgtttgtgtcataataaatcgatcgatcatgttgtttaccctttttatttcggtatgtagttgcatctgcgggcgggctaaaataaatcacggcaggctgggcttcatcaagcccatgtatccatctgtgtgtaataatgcaatggaaaacgaaccaaaaagaatgcttccattcc

SEQ ID NO: 13186 - protein, 387 aa, Zea mays subsp. mays
  peptide (1)..(387): Ceres Seq. ID no. 13502460
  misc_feature (100)..(373): Pfam Name: O-methyltransferase Pfam Description: O-methyltransferase
  misc_feature (13)..(387): Homolog of NCBI NO: 4098238 NR Description: o-methyltransferase [Triticum aestivum]
  misc_feature (84)..(387): Homolog of NCBI NO: 37530600 NR Description: putative o-methyltransferase ZRP4 [Oryza sativa
  misc_feature (4)..(115): Homolog of NCBI NO: 37530600 NR Description: putative o-methyltransferase ZRP4 [Oryza sativa
  misc_feature (84)..(387): Homolog of NCBI NO: 37530606 NR Description: putative o-methyltransferase ZRP4 [Oryza sativa
  misc_feature (13)..(116): Homolog of NCBI NO: 37530606 NR Description: putative o-methyltransferase ZRP4 [Oryza sativa
  misc_feature (14)..(387): Homolog of NCBI NO: 1353193 NR Description: O-METHYLTRANSFERASE ZRP4 (OMT)
  misc_feature (14)..(387): Homolog of NCBI NO: 22093735 NR Description: putative o-methyltransferase [Oryza sativa
  misc_feature (14)..(387): Homolog of NCBI NO: 34909608 NR Description: putative o-methyltransferase [Oryza sativa
  misc_feature (135)..(387): Homolog of NCBI NO: 20514367 NR Description: orcinol O-methyltransferase [Rosa hybrid cultivar]
  misc_feature (3)..(114): Homolog of NCBI NO: 20514367 NR Description: orcinol O-methyltransferase [Rosa hybrid cultivar]
MGHQQAQHGKDDTEELLAAHRQLWCHALGYVKSMALKCALDLRIPDTIDRCGGSATLGELLAASEIPASNHDYLRRVMRTLTAMRIFAASHDPAKADDAAAISYQLTPASRLLVSSSSSVDDAAGASKENTTTPSILPNIAHLVRPNTISLLFSMGEWMKDESAASVSLYETVHRQGMWACVEDDAANRASFYESMDADTRLVMQAVVRRCPHVFDGVKSLVDVGGGRGTAAAAVVAAFPHIQRCTVMDLPHVVAEAPAGTAGLSFHGGDMFEHIPSADALMLKWILHDWDEDKCIKIMERCKEAIGGKEAGGKVIIIDTVLGSRADDDDDDKTCRETYVLDLHILSFVNGAEREEQEWRRIFLAAGFRDYKITHTRGIPSIIEVFP

SEQ ID NO: 13187 - protein, 354 aa, Zea mays subsp. mays
  peptide (1)..(354): Ceres Seq. ID no. 13502461
  misc_feature (67)..(340): Pfam Name: O-methyltransferase Pfam Description: O-methyltransferase
  misc_feature (1)..(354): Homolog of NCBI NO: 4098238 NR Description: o-methyltransferase [Triticum aestivum]
  misc_feature (51)..(354): Homolog of NCBI NO: 37530600 NR Description: putative o-methyltransferase ZRP4 [Oryza sativa
  misc_feature (1)..(82): Homolog of NCBI NO: 37530600 NR Description: putative o-methyltransferase ZRP4 [Oryza sativa
  misc_feature (51)..(354): Homolog of NCBI NO: 37530606 NR Description: putative o-methyltransferase ZRP4 [Oryza sativa
  misc_feature (1)..(83): Homolog of NCBI NO: 37530606 NR Description: putative o-methyltransferase ZRP4 [Oryza sativa
  misc_feature (1)..(354): Homolog of NCBI NO: 1353193 NR Description: O-METHYLTRANSFERASE ZRP4 (OMT)
  misc_feature (1)..(354): Homolog of NCBI NO: 22093735 NR Description: putative o-methyltransferase [Oryza sativa
  misc_feature (1)..(354): Homolog of NCBI NO: 34909608 NR Description: putative o-methyltransferase [Oryza sativa
  misc_feature (102)..(354): Homolog of NCBI NO: 20514367 NR Description: orcinol O-methyltransferase [Rosa hybrid cultivar]
  misc_feature (1)..(81): Homolog of NCBI NO: 20514367 NR Description: orcinol O-methyltransferase [Rosa hybrid cultivar]
MALKCALDLRIPDTIDRCGGSATLGELLAASEIPASNHDYLRRVMRTLTAMRIFAASHDPAKADDAAAISYQLTPASRLLVSSSSSVDDAAGASKENTTTPSILPNIAHLVRPNTISLLFSMGEWMKDESAASVSLYETVHRQGMWACVEDDAANRASFYESMDADTRLVMQAVVRRCPHVFDGVKSLVDVGGGRGTAAAAVVAAFPHIQRCTVMDLPHVVAEAPAGTAGLSFHGGDMFEHIPSADALMLKWILHDWDEDKCIKIMERCKEAIGGKEAGGKVIIIDTVLGSRADDDDDDKTCRETYVLDLHILSFVNGAEREEQEWRRIFLAAGFRDYKITHTRGIPSIIEVFP

SEQ ID NO: 13188 - protein, 310 aa, Zea mays subsp. mays
  peptide (1)..(310): Ceres Seq. ID no. 13502462
  misc_feature (23)..(296): Pfam Name: O-methyltransferase Pfam Description: O-methyltransferase
  misc_feature (1)..(310): Homolog of NCBI NO: 4098238 NR Description: o-methyltransferase [Triticum aestivum]
  misc_feature (7)..(310): Homolog of NCBI NO: 37530600 NR Description: putative o-methyltransferase ZRP4 [Oryza sativa
  misc_feature (1)..(38): Homolog of NCBI NO: 37530600 NR Description: putative o-methyltransferase ZRP4 [Oryza sativa
  misc_feature (7)..(310): Homolog of NCBI NO: 37530606 NR Description: putative o-methyltransferase ZRP4 [Oryza sativa
  misc_feature (1)..(39): Homolog of NCBI NO: 37530606 NR Description: putative o-methyltransferase ZRP4 [Oryza sativa
  misc_feature (1)..(310): Homolog of NCBI NO: 1353193 NR Description: O-METHYLTRANSFERASE ZRP4 (OMT)
  misc_feature (1)..(310): Homolog of NCBI NO: 22093735 NR Description: putative o-methyltransferase [Oryza sativa
  misc_feature (1)..(310): Homolog of NCBI NO: 34909608 NR Description: putative o-methyltransferase [Oryza sativa
  misc_feature (58)..(310): Homolog of NCBI NO: 20514367 NR Description: orcinol O-methyltransferase [Rosa hybrid cultivar]
  misc_feature (1)..(37): Homolog of NCBI NO: 20514367 NR Description: orcinol O-methyltransferase [Rosa hybrid cultivar]
MRTLTAMRIFAASHDPAKADDAAAISYQLTPASRLLVSSSSSVDDAAGASKENTTTPSILPNIAHLVRPNTISLLFSMGEWMKDESAASVSLYETVHRQGMWACVEDDAANRASFYESMDADTRLVMQAVVRRCPHVFDGVKSLVDVGGGRGTAAAAVVAAFPHIQRCTVMDLPHVVAEAPAGTAGLSFHGGDMFEHIPSADALMLKWILHDWDEDKCIKIMERCKEAIGGKEAGGKVIIIDTVLGSRADDDDDDKTCRETYVLDLHILSFVNGAEREEQEWRRIFLAAGFRDYKITHTRGIPSIIEVFP

SEQ ID NO: 13189 - DNA, 1715 bp, Zea mays subsp. mays
  misc_feature (1)..(1715): Ceres Seq. ID no. 12411377
  misc_feature: MA Experiment ID: 108527 Result: Up-regulated in Transcription
  misc_feature: MA Experiment 108527 PARAMETER Experiment Name: Zm_5mM_NO_P Parameter: Age (day) Value: 8
  misc_feature: MA Experiment 108527 PARAMETER Experiment Name: Zm_5mM_NO_P Parameter: Organism Value: Zea mays
  misc_feature: MA Experiment 108527 PARAMETER Experiment Name: Zm_5mM_NO_P Parameter: Plant Line Value: 35A19
  misc_feature: MA Experiment 108527 PARAMETER Experiment Name: Zm_5mM_NO_P Parameter: Timepoint (hr) Value: 6
  misc_feature: MA Experiment 108527 PARAMETER Experiment Name: Zm_5mM_NO_P Parameter: Tissue Value: Aerial
  misc_feature: MA Experiment 108527 PARAMETER Experiment Name: Zm_5mM_NO_P Parameter: Treatment Value: 5mM NO vs. No Treatment
gaaaaccaccatccccgttccccaacccccccaaagccgagagccatcccgcccgcagccgcaaccaggcaagcaagcgggagccgccaactcgtgcctctcggcagcggcgtctgaactctgaaccgaccgaccgttccgttcacccccaccatggaggcgccgccgggaccggggcccatggagctggacgccccacctcccgccgccgccgcggcgattcctcccgccggcagcgacaagcacaaggtggacggggaagggggagacgctgtgacgggccatatcatctccaccaccatcggcgggaagaacggcgagcccaatcggaccatcagttacatggcagaacgtgtcgtgggtacaggctcatttgggatcgtcttccaggctaagtgtctggaaacaggagagacctttgccatcaagaaggtgctgcaagatcggcgttacaagaaccgggagctgcaacttatgcgtgccatggagcaccccaacgtcatctgcctgaagcactgcttcttctcgacaacgagcagggacgaattgtttttaaaccttgtcatggaattcgtccctgagactctataccgggtcctgaagcactacagcaatgcgaaccagaggatgcctcttatctacgtcaagctctacatgtatcagctttttagaggcctagcttatattcataatgtaccaggagtctgccatagggatgtgaagccacaaaatgttttggttgatcctctcacccaccaggtcaagctctgtgactttggtagtgcaaaagttctgattcctggtgaaccgaacatatcttacatatgctctcgttactatcgtgcccctgagctcatatttggtgcgacggagtatacaagttcaatagacatatggtcagctggttgtgttctagctgagttgcttcttggacagccactatttccaggagagagcgctgttgatcagttggtagagatcatcaaggttcttggtactccaacccgtgaggagatacggtgcatgaatcccaactatactgagttcaggtttcctcagataaaggctcatccatggcacaagattttccacaagagaatgcctcctgaagccatagaccttgcttcccgtctccttcagtattcaccaagtcttcgctgctctgctcttgacgcatgtgctcatcccttcttcgatgagctgcggacaccgaatgcacgcctaccaaacggccgcccgttccctccgctctttaacttcaagcacgaactagcaaatgcctctccagaccttgtcagcaggcttgtgccggagcacattagacggcagatcggtgtcaacttcgggagcagctaggagggcaggcgctgcgatggtcggagttttcggtcttggtttccccttctggagagtgggaggggctcaagcagtacctgagaaaagtagtgaaaccgtgtatattatctgaccgtgaaggagtactaccgccagtaactggcgcatgttcgtccagtagttatggtaagaatgtaggaggtgaagactggttaatgtgtagggtcgtttttttttgttttgatattactaccattttgttgtaatgttcgtcggtacttccagcagtagtgtagctggccacgttttgttcgtccgccatgatgtaaatgatcatcgcccaactgtaatgcatgttctctctgatcgtttcgtagtcc

SEQ ID NO: 13190 - protein, 400 aa, Zea mays subsp. mays
  peptide (1)..(400): Ceres Seq. ID no. 12411378
  misc_feature (63)..(347): Pfam Name: Protein kinase domain Pfam Description: Protein kinase domain
  misc_feature (4)..(400): Homolog of NCBI NO: 15221476 NR Description: shaggy-like kinase, putative; protein id: supported by cDNA: gi_14334749, supported by cDNA: gi_15293238, by cDNA: gi_2444276 [Arabidopsis thaliana]
  misc_feature (36)..(397): Homolog of NCBI NO: 15233984 NR Description: shaggy-like protein kinase etha (EC 2.7.1.-); id: At4g18710.1, supported by cDNA: 256076., supported by cDNA:
  misc_feature (36)..(397): Homolog of NCBI NO: 12643751 NR Description: Shaggy-related protein kinase eta (ASK-eta)
  misc_feature (36)..(397): Homolog of NCBI NO: 18700188 NR Description: AT4g18710/F28A21_120 [Arabidopsis thaliana]
  misc_feature (1)..(397): Homolog of NCBI NO: 12643750 NR Description: Shaggy-related protein kinase delta (ASK-delta)
  misc_feature (1)..(397): Homolog of NCBI NO: 15224593 NR Description: putative shaggy-like protein kinase dzeta; id: At2g30980.1, supported by cDNA: 36479., supported by cDNA: supported by cDNA: gi_20453107, supported by cDNA: gi_20465726
  misc_feature (1)..(397): Homolog of NCBI NO: 21593135 NR Description: putative shaggy-like protein kinase dzeta
  misc_feature (1)..(394): Homolog of NCBI NO: 7434281 NR Description: probable shaggy-like protein kinase etha (EC
  misc_feature (37)..(392): Homolog of NCBI NO: 15230058 NR Description: shaggy related protein kinase, ASK-GAMMA; protein At3g05840.1, supported by cDNA: 17739., supported by cDNA:
  misc_feature (1)..(391): Homolog of NCBI NO: 7434282 NR Description: shaggy protein kinase (EC 2.7.1.-) 6 - common
MEAPPGPGPMELDAPPPAAAAAIPPAGSDKHKVDGEGGDAVTGHIISTTIGGKNGEPNRTISYMAERVVGTGSFGIVFQAKCLETGETFAIKKVLQDRRYKNRELQLMRAMEHPNVICLKHCFFSTTSRDELFLNLVMEFVPETLYRVLKHYSNANQRMPLIYVKLYMYQLFRGLAYIHNVPGVCHRDVKPQNVLVDPLTHQVKLCDFGSAKVLIPGEPNISYICSRYYRAPELIFGATEYTSSIDIWSAGCVLAELLLGQPLFPGESAVDQLVEIIKVLGTPTREEIRCMNPNYTEFRFPQIKAHPWHKIFHKRMPPEAIDLASRLLQYSPSLRCSALDACAHPFFDELRTPNARLPNGRPFPPLFNFKHELANASPDLVSRLVPEHIRRQIGVNFGSS

SEQ ID NO: 13191 - protein, 391 aa, Zea mays subsp. mays
  peptide (1)..(391): Ceres Seq. ID no. 12411379
  misc_feature (54)..(338): Pfam Name: Protein kinase domain Pfam Description: Protein kinase domain
  misc_feature (1)..(391): Homolog of NCBI NO: 15221476 NR Description: shaggy-like kinase, putative; protein id: supported by cDNA: gi_14334749, supported by cDNA: gi_15293238, by cDNA: gi_2444276 [Arabidopsis thaliana]
  misc_feature (27)..(388): Homolog of NCBI NO: 15233984 NR Description: shaggy-like protein kinase etha (EC 2.7.1.-); id: At4g18710.1, supported by cDNA: 256076., supported by cDNA:
  misc_feature (27)..(388): Homolog of NCBI NO: 12643751 NR Description: Shaggy-related protein kinase eta (ASK-eta)
  misc_feature (27)..(388): Homolog of NCBI NO: 18700188 NR Description: AT4g18710/F28A21_120 [Arabidopsis thaliana]
  misc_feature (1)..(388): Homolog of NCBI NO: 12643750 NR Description: Shaggy-related protein kinase delta (ASK-delta)
  misc_feature (1)..(388): Homolog of NCBI NO: 15224593 NR Description: putative shaggy-like protein kinase dzeta; id: At2g30980.1, supported by cDNA: 36479., supported by cDNA: supported by cDNA: gi_20453107, supported by cDNA: gi_20465726
  misc_feature (1)..(388): Homolog of NCBI NO: 21593135 NR Description: putative shaggy-like protein kinase dzeta
  misc_feature (1)..(385): Homolog of NCBI NO: 7434281 NR Description: probable shaggy-like protein kinase etha (EC
  misc_feature (28)..(383): Homolog of NCBI NO: 15230058 NR Description: shaggy related protein kinase, ASK-GAMMA; protein At3g05840.1, supported by cDNA: 17739., supported by cDNA:
  misc_feature (1)..(382): Homolog of NCBI NO: 7434282 NR Description: shaggy protein kinase (EC 2.7.1.-) 6 - common
MELDAPPPAAAAAIPPAGSDKHKVDGEGGDAVTGHIISTTIGGKNGEPNRTISYMAERVVGTGSFGIVFQAKCLETGETFAIKKVLQDRRYKNRELQLMRAMEHPNVICLKHCFFSTTSRDELFLNLVMEFVPETLYRVLKHYSNANQRMPLIYVKLYMYQLFRGLAYIHNVPGVCHRDVKPQNVLVDPLTHQVKLCDFGSAKVLIPGEPNISYICSRYYRAPELIFGATEYTSSIDIWSAGCVLAELLLGQPLFPGESAVDQLVEIIKVLGTPTREEIRCMNPNYTEFRFPQIKAHPWHKIFHKRMPPEAIDLASRLLQYSPSLRCSALDACAHPFFDELRTPNARLPNGRPFPPLFNFKHELANASPDLVSRLVPEHIRRQIGVNFGSS

SEQ ID NO: 13192 - protein, 337 aa, Zea mays subsp. mays; identical to SEQ ID NO: 1597
  peptide (1)..(337): Ceres Seq. ID no. 12411380
  misc_feature (1)..(284): Pfam Name: Protein kinase domain Pfam Description: Protein kinase domain
  misc_feature (1)..(337): Homolog of NCBI NO: 15221476 NR Description: shaggy-like kinase, putative; protein id: supported by cDNA: gi_14334749, supported by cDNA: gi_15293238, by cDNA: gi_2444276 [Arabidopsis thaliana]
  misc_feature (1)..(334): Homolog of NCBI NO: 15233984 NR Description: shaggy-like protein kinase etha (EC 2.7.1.-); id: At4g18710.1, supported by cDNA: 256076., supported by cDNA:
  misc_feature (1)..(334): Homolog of NCBI NO: 12643751 NR Description: Shaggy-related protein kinase eta (ASK-eta)
  misc_feature (1)..(334): Homolog of NCBI NO: 18700188 NR Description: AT4g18710/F28A21_120 [Arabidopsis thaliana]
  misc_feature (1)..(334): Homolog of NCBI NO: 12643750 NR Description: Shaggy-related protein kinase delta (ASK-delta)
  misc_feature (1)..(334): Homolog of NCBI NO: 15224593 NR Description: putative shaggy-like protein kinase dzeta; id: At2g30980.1, supported by cDNA: 36479., supported by cDNA: supported by cDNA: gi_20453107, supported by cDNA: gi_20465726
  misc_feature (1)..(334): Homolog of NCBI NO: 21593135 NR Description: putative shaggy-like protein kinase dzeta
  misc_feature (1)..(331): Homolog of NCBI NO: 7434281 NR Description: probable shaggy-like protein kinase etha (EC
  misc_feature (1)..(329): Homolog of NCBI NO: 15230058 NR Description: shaggy related protein kinase, ASK-GAMMA; protein At3g05840.1, supported by cDNA: 17739., supported by cDNA:
  misc_feature (1)..(328): Homolog of NCBI NO: 7434282 NR Description: shaggy protein kinase (EC 2.7.1.-) 6 - common

SEQ ID NO: 13193 - DNA, 1262 bp, Zea mays subsp. mays
  misc_feature (1)..(1262): Ceres Seq. ID no. 12351854
  misc_feature: MA Experiment ID: 108527 Result: Down-regulated in Transcription
  misc_feature: MA Experiment 108527 PARAMETER Experiment Name: Zm_5mM_NO_P Parameter: Age (day) Value: 8
  misc_feature: MA Experiment 108527 PARAMETER Experiment Name: Zm_5mM_NO_P Parameter: Organism Value: Zea mays
  misc_feature: MA Experiment 108527 PARAMETER Experiment Name: Zm_5mM_NO_P Parameter: Plant Line Value: 35A19
  misc_feature: MA Experiment 108527 PARAMETER Experiment Name: Zm_5mM_NO_P Parameter: Timepoint (hr) Value: 6
  misc_feature: MA Experiment 108527 PARAMETER Experiment Name: Zm_5mM_NO_P Parameter: Tissue Value: Aerial
  misc_feature: MA Experiment 108527 PARAMETER Experiment Name: Zm_5mM_NO_P Parameter: Treatment Value: 5mM NO vs. No Treatment
  misc_feature: MA Experiment ID: 108545 Result: Up-regulated in Transcription
  misc_feature: MA Experiment 108545 PARAMETER Experiment Name: Zm_Imbibed_Seeds_P Parameter: Age (day) Value: 3 vs. 2
  misc_feature: MA Experiment 108545 PARAMETER Experiment Name: Zm_Imbibed_Seeds_P Parameter: Organism Value: Zea mays
  misc_feature: MA Experiment 108545 PARAMETER Experiment Name: Zm_Imbibed_Seeds_P Parameter: Plant Line Value: 35A19
  misc_feature: MA Experiment 108545 PARAMETER Experiment Name: Zm_Imbibed_Seeds_P Parameter: Tissue Value: Aerial vs. Embryo
  misc_feature: MA Experiment ID: 108547 Result: Up-regulated in Transcription
  misc_feature: MA Experiment 108547 PARAMETER Experiment Name: Zm_Imbibed_Seeds_P Parameter: Age (day) Value: 4 vs. 2
  misc_feature: MA Experiment 108547 PARAMETER Experiment Name: Zm_Imbibed_Seeds_P Parameter: Organism Value: Zea mays
  misc_feature: MA Experiment 108547 PARAMETER Experiment Name: Zm_Imbibed_Seeds_P Parameter: Plant Line Value: 35A19
  misc_feature: MA Experiment 108547 PARAMETER Experiment Name: Zm_Imbibed_Seeds_P Parameter: Tissue Value: Aerial vs. Embryo
  misc_feature: MA Experiment ID: 20000487 Result: Up-regulated in Transcription
  misc_feature: MA Experiment 20000487 PARAMETER Experiment Name: Zm_50mM_NH4NO3_L_to_H_P Parameter: Organism Value: Zea mays
  misc_feature: MA Experiment 20000487 PARAMETER Experiment Name: Zm_50mM_NH4NO3_L_to_H_P Parameter: Timepoint (hr) Value: 4
  misc_feature: MA Experiment 20000487 PARAMETER Experiment Name: Zm_50mM_NH4NO3_L_to_H_P Parameter: Tissue Value: Leaves
  misc_feature: MA Experiment 20000487 PARAMETER Experiment Name: Zm_50mM_NH4NO3_L_to_H_P Parameter: Treatment Value: 50mM NH4NO3 vs. 100mM Mannitol
  misc_feature: MA Experiment ID: 20000534 Result: Down-regulated in Transcription
  misc_feature: MA Experiment 20000534 PARAMETER Experiment Name: Zm_Hybrid_Pollen_P Parameter: Age (day) Value: 8
  misc_feature: MA Experiment 20000534 PARAMETER Experiment Name: Zm_Hybrid_Pollen_P Parameter: Organism Value: Zea mays
  misc_feature: MA Experiment 20000534 PARAMETER Experiment Name: Zm_Hybrid_Pollen_P Parameter: Plant Line Value: 35A19
  misc_feature: MA Experiment 20000534 PARAMETER Experiment Name: Zm_Hybrid_Pollen_P Parameter: Tissue Value: Pollen vs. Aerial
aatcactccattcatcgccggagtcccgaccaaattatccacacacgcgcctcgcctcccactcccccgaactcacacgccgcggcggagcaccaccgcggccgcccaccatgacctccgcctccaccttcctctctctgcgcctgcccactccctcccacgccacttcgtccctttccttccccccgtctctgctccggcaggcgcgtggcggtgtggcgtcctcgacgctggtggcgcgggcggcagggccaacgggagcggcgggagctccatcgccgctattcaacccccggggagacccgttcctgtctaccctcgcagccgcctcaccggaggaccttgcggccgccgctggtggcgagcgccgtggagaggaccacctgccgttcctcgagatcttccagaacaccaaactcatggcctcgcccgcgcaggtggaacggtctagcagctcgtatagtcagcacagacctagaaggcctcctccagatttgccttcattgcttcttcacggccgaatcgtttatattggcatgccgttggtaccagcagtgactgagctcattgttgcccagttgatgtaccttgaatggatgaacagtaaagaacctgtttatatatacatcaactcaactggaacggctcgcgatgatggtgaaccggtcgggatggagagcgaaggttttgcaatctatgatgcaatgatgcgtatgaaaactgagatccacacactttgtataggagctgcagcaggcccatgcatgtcttgtgcttgcagctggaaaaaaaggcaaacgttatatgttccctcatgccaaagctatgattcagcaaccacgtattccttcttatgggatgatgcaagcatcagatgttgttattcgtgcaaaggaggttgtgcacaacaggaacacattggtcaaacttttagcaaggcatactggaaatccaccagagaaaatagacaaggtaatgagaggaccattttacatggactccttgaaggcaaaggagtttggagtcattgacaagatcctttggcgcggtcaggagaagtacatggctgacatgctctccccagatgagtgggacaaagttgccggagtcagacatcctgatctaatgtaatgttattcattgaaagttcaacatttggttaggttaatagcttccagggggcagaaacaggtgacgctgaacaataatgcttgattatcaatgataatggttggtaagagccaaggagtacttgtttaact

SEQ ID NO: 13194 - protein, 342 aa, Zea mays subsp. mays
  peptide (1)..(342): Ceres Seq. ID no. 12351855
  misc_feature (158)..(264): Pfam Name: Clp protease Pfam Description: Clp protease
  misc_feature (55)..(264): Homolog of NCBI NO: 18390982 NR Description: ATP-dependent Clp protease proteolytic subunit
  misc_feature (55)..(236): Homolog of NCBI NO: 25402516 NR Description: hypothetical protein [imported] - Arabidopsis
  misc_feature (159)..(252): Homolog of NCBI NO: 22299302 NR Description: ATP-dependent Clp protease proteolytic subunit 3
  misc_feature (153)..(252): Homolog of NCBI NO: 17231850 NR Description: ATP-dependent Clp protease proteolytic subunit
  misc_feature (153)..(252): Homolog of NCBI NO: 23126723 NR Description: hypothetical protein [Nostoc punctiforme]
  misc_feature (161)..(271): Homolog of NCBI NO: 13812146 NR Description: ATP-dependent Clp protease proteolytic subunit
  misc_feature (102)..(271): Homolog of NCBI NO: 19698857 NR Description: unknown protein [Arabidopsis thaliana]
  misc_feature (102)..(271): Homolog of NCBI NO: 18414804 NR Description: ATP-dependent Clp protease proteolytic subunit putative; protein id: At4g17040.1, supported by cDNA: 36017.,
  misc_feature (159)..(252): Homolog of NCBI NO: 18203214 NR Description: Putative ATP-dependent Clp protease proteolytic
  misc_feature (157)..(252): Homolog of NCBI NO: 18402863 NR Description: ATP-dependent Clp protease proteolytic subunit protein id: At1g49970.1, supported by cDNA: 29389., supported by gi_15010751, supported by cDNA: gi_5360594 [Arabidopsis thaliana]
SLHSSPESRPNYPHTRLASHSPELTRRGGAPPRPPTMTSASTFLSLRLPTPSHATSSLSFPPSLLRQARGGVASSTLVARAAGPTGAAGAPSPLFNPRGDPFLSTLAAASPEDLAAAAGGERRGEDHLPFLEIFQNTKLMASPAQVERSSSSYSQHRPRRPPPDLPSLLLHGRIVYIGMPLVPAVTELIVAQLMYLEWMNSKEPVYIYINSTGTARDDGEPVGMESEGFAIYDAMMRMKTEIHTLCIGAAAGPCMSCACSWKKRQTLYVPSCQSYDSATTYSFLWDDASIRCCYSCKGGCAQQEHIGQTFSKAYWKSTRENRQGNERTILHGLLEGKGVWSH

SEQ ID NO: 13195 - protein, 306 aa, Zea mays subsp. mays
  peptide (1)..(306): Ceres Seq. ID no. 12351856
  misc_feature (122)..(228): Pfam Name: Clp protease Pfam Description: Clp protease
  misc_feature (19)..(228): Homolog of NCBI NO: 18390982 NR Description: ATP-dependent Clp protease proteolytic subunit
  misc_feature (19)..(200): Homolog of NCBI NO: 25402516 NR Description: hypothetical protein [imported] - Arabidopsis
  misc_feature (123)..(216): Homolog of NCBI NO: 22299302 NR Description: ATP-dependent Clp protease proteolytic subunit 3
  misc_feature (117)..(216): Homolog of NCBI NO: 17231850 NR Description: ATP-dependent Clp protease proteolytic subunit
  misc_feature (117)..(216): Homolog of NCBI NO: 23126723 NR Description: hypothetical protein [Nostoc punctiforme]
  misc_feature (125)..(235): Homolog of NCBI NO: 13812146 NR Description: ATP-dependent Clp protease proteolytic subunit
  misc_feature (66)..(235): Homolog of NCBI NO: 19698857 NR Description: unknown protein [Arabidopsis thaliana]
  misc_feature (66)..(235): Homolog of NCBI NO: 18414804 NR Description: ATP-dependent Clp protease proteolytic subunit putative; protein id: At4g17040.1, supported by cDNA: 36017.,
  misc_feature (123)..(216): Homolog of NCBI NO: 18203214 NR Description: Putative ATP-dependent Clp protease proteolytic
  misc_feature (121)..(216): Homolog of NCBI NO: 18402863 NR Description: ATP-dependent Clp protease proteolytic subunit protein id: At1g49970.1, supported by cDNA: 29389., supported by gi_15010751, supported by cDNA: gi_5360594 [Arabidopsis thaliana]
MTSASTFLSLRLPTPSHATSSLSFPPSLLRQARGGVASSTLVARAAGPTGAAGAPSPLFNPRGDPFLSTLAAASPEDLAAAAGGERRGEDHLPFLEIFQNTKLMASPAQVERSSSSYSQHRPRRPPPDLPSLLLHGRIVYIGMPLVPAVTELIVAQLMYLEWMNSKEPVYIYINSTGTARDDGEPVGMESEGFAIYDAMMRMKTEIHTLCIGAAAGPCMSCACSWKKRQTLYVPSCQSYDSATTYSFLWDDASIRCCYSCKGGCAQQEHIGQTFSKAYWKSTRENRQGNERTILHGLLEGKGVWSH

SEQ ID NO: 13196 - protein, 203 aa, Zea mays subsp. mays
  peptide (1)..(203): Ceres Seq. ID no. 12351857
  misc_feature (19)..(125): Pfam Name: Clp protease Pfam Description: Clp protease
  misc_feature (1)..(125): Homolog of NCBI NO: 18390982 NR Description: ATP-dependent Clp protease proteolytic subunit
  misc_feature (1)..(97): Homolog of NCBI NO: 25402516 NR Description: hypothetical protein [imported] - Arabidopsis
  misc_feature (20)..(113): Homolog of NCBI NO: 22299302 NR Description: ATP-dependent Clp protease proteolytic subunit 3
  misc_feature (14)..(113): Homolog of NCBI NO: 17231850 NR Description: ATP-dependent Clp protease proteolytic subunit
  misc_feature (14)..(113): Homolog of NCBI NO: 23126723 NR Description: hypothetical protein [Nostoc punctiforme]
  misc_feature (22)..(132): Homolog of NCBI NO: 13812146 NR Description: ATP-dependent Clp protease proteolytic subunit
  misc_feature (1)..(132): Homolog of NCBI NO: 19698857 NR Description: unknown protein [Arabidopsis thaliana]
  misc_feature (1)..(132): Homolog of NCBI NO: 18414804 NR Description: ATP-dependent Clp protease proteolytic subunit putative; protein id: At4g17040.1, supported by cDNA: 36017.,
  misc_feature (20)..(113): Homolog of NCBI NO: 18203214 NR Description: Putative ATP-dependent Clp protease proteolytic
  misc_feature (18)..(113): Homolog of NCBI NO: 18402863 NR Description: ATP-dependent Clp protease proteolytic subunit protein id: At1g49970.1, supported by cDNA: 29389., supported by gi_15010751, supported by cDNA: gi_5360594 [Arabidopsis thaliana]
MASPAQVERSSSSYSQHRPRRPPPDLPSLLLHGRIVYIGMPLVPAVTELIVAQLMYLEWMNSKEPVYIYINSTGTARDDGEPVGMESEGFAIYDAMMRMKTEIHTLCIGAAAGPCMSCACSWKKRQTLYVPSCQSYDSATTYSFLWDDASIRCCYSCKGGCAQQEHIGQTFSKAYWKSTRENRQGNERTILHGLLEGKGVWSH

SEQ ID NO: 13197 - DNA, 1344 bp, Zea mays subsp. mays
  misc_feature (1)..(1344): Ceres Seq. ID no. 13498889
  misc_feature: MA Experiment ID: 108527 Result: Up-regulated in Transcription
  misc_feature: MA Experiment 108527 PARAMETER Experiment Name: Zm_5mM_NO_P Parameter: Age (day) Value: 8
  misc_feature: MA Experiment 108527 PARAMETER Experiment Name: Zm_5mM_NO_P Parameter: Organism Value: Zea mays
  misc_feature: MA Experiment 108527 PARAMETER Experiment Name: Zm_5mM_NO_P Parameter: Plant Line Value: 35A19
  misc_feature: MA Experiment 108527 PARAMETER Experiment Name: Zm_5mM_NO_P Parameter: Timepoint (hr) Value: 6
  misc_feature: MA Experiment 108527 PARAMETER Experiment Name: Zm_5mM_NO_P Parameter: Tissue Value: Aerial
  misc_feature: MA Experiment 108527 PARAMETER Experiment Name: Zm_5mM_NO_P Parameter: Treatment Value: 5mM NO vs. No Treatment
  misc_feature: MA Experiment ID: 108529 Result: Up-regulated in Transcription
  misc_feature: MA Experiment 108529 PARAMETER Experiment Name: Zm_Imbibed_Seeds_P Parameter: Age (day) Value: 5 vs. 2
  misc_feature: MA Experiment 108529 PARAMETER Experiment Name: Zm_Imbibed_Seeds_P Parameter: Organism Value: Zea mays
  misc_feature: MA Experiment 108529 PARAMETER Experiment Name: Zm_Imbibed_Seeds_P Parameter: Plant Line Value: 35A19
  misc_feature: MA Experiment 108529 PARAMETER Experiment Name: Zm_Imbibed_Seeds_P Parameter: Tissue Value: Roots vs. Embryo
  misc_feature: MA Experiment ID: 108689 Result: Down-regulated in Transcription
  misc_feature: MA Experiment 108689 PARAMETER Experiment Name: Zm_Drought_Roots_P Parameter: Age (day) Value: 9
  misc_feature: MA Experiment 108689 PARAMETER Experiment Name: Zm_Drought_Roots_P Parameter: Organism Value: Zea mays
  misc_feature: MA Experiment 108689 PARAMETER Experiment Name: Zm_Drought_Roots_P Parameter: Plant Line Value: 35A19
  misc_feature: MA Experiment 108689 PARAMETER Experiment Name: Zm_Drought_Roots_P Parameter: Timepoint (hr) Value: 24
  misc_feature: MA Experiment 108689 PARAMETER Experiment Name: Zm_Drought_Roots_P Parameter: Tissue Value: Roots
  misc_feature: MA Experiment 108689 PARAMETER Experiment Name: Zm_Drought_Roots_P Parameter: Treatment Value: Drought vs. No Drought
  misc_feature: MA Experiment ID: 20000627 Result: Up-regulated in Transcription
  misc_feature: MA Experiment 20000627 PARAMETER Experiment Name: Zm_Herbicide-Treatments_P Parameter: Timepoint (hr) Value: 12
  misc_feature: MA Experiment 20000627 PARAMETER Experiment Name: Zm_Herbicide-Treatments_P Parameter: Tissue Value: Aerial
  misc_feature: MA Experiment 20000627 PARAMETER Experiment Name: Zm_Herbicide-Treatments_P Parameter: Treatment Value: Finale vs. No Treatment
agaactagcagttgttccccttttccctccccacgccgaacgcacccgatcgcaaacaaagcgagcagcagaaacatgcgagacatgccggttgtccgccgccaggaacccaccgtcgtcaggacggaggacgacgtggtttccggcggtgaggactcggacggcgagttcgagttcccctccgtgagccgggagtccgcggcgggcgttggnnggnnccgcgtctagccgacganntnntnngcgggcggnnacgcccgggcgttctacccggtgtttgnncgagtgctggacgaggccgcagcgccggcaccgagggcgccactagggcggctgttccagctggagcaggngcggacctcgtccgtngcgtccacgtcctcctcctcctcatcatcatcggcgtcgacggcggcgggcacgggcgcggacctcgacggcgtcggcgcgtcgccggacagntactgcgtctggacgcccgggtcgtcgccggcgtcctcgccctcgcggccgccgcggaagagcgggtccacgggctccatcgcgcggtggcgccgcatcggtgagctcgtcgtcggccgcagccgcagcgacggcaaggacaagttcctcttcctctcggcgccgccgtccccggccagggacagggagcacgcccccgcctccaaggccaaggccaagctgccgcccaaaggaagcaaagccgccgcaaccgagctagacacggtctccgcgggccgccggttgtcatatggcggcggcggcgccaaggcctccaccnncggccggcgcacgttcctgccgtaccggcaggacctcgtggggctgttcgccagcgtgcacgggctcagcaggagcccacacccgttntganccggtgagccacgaccacgacgcgccgtggaggacccgttccaaacagtgagacttcaggtttgaaatcgggatttgaaatttcagacatttgacttggagatctcctgcgagccgagtcaaaaagacaaggtgtgaagtcagagaaagcaggggaaatgtgagccttctttcaggattcggctcggaatcgtgctctgcagtcggtggctaaccacctgccatgcgatttgtgtaggcgggtacacatatactacgacaaattggacaagaagtttacatgtgattgttcgtatatgttggtatatatgtagctgtgtacatactgtacattgtatagtattgcaatttaggtatacaggagtaggtgtttgcgaggaattcagaattcctcgtttgcattctacagtttcgtttatctgcgtgttgtcgcatctctaatgtctaatctaactaattgcttttctgcct

SEQ ID NO: 13198 - protein, 75 aa, Zea mays subsp. mays
  peptide (1)..(75): Ceres Seq. ID no. 13498890
  misc_feature (41)..(75): Homolog of NCBI NO: 34911600 NR Description: P0004A09.25 [Oryza sativa (japonica
  misc_feature (71)..(71): Xaa is any aa, unknown or other
  misc_feature (72)..(72): Xaa is any aa, unknown or other
  misc_feature (73)..(73): Xaa is any aa, unknown or other
RTSSCSPFPSPRRTHPIANKASSRNMRDMPVVRRQEPTVVRTEDDVVSGGEDSDGEFEFPSVSRESAAGVXXXRV

SEQ ID NO: 13199 - protein, 61 aa, Zea mays subsp. mays
  peptide (1)..(61): Ceres Seq. ID no. 13498891
  misc_feature (38)..(61): Homolog of NCBI NO: 25989119 NR Description: unknown [Streptomyces aureofaciens]
  misc_feature (3)..(61): Homolog of NCBI NO: 5821151 NR Description: RNA binding protein [Homo sapiens]
  misc_feature (3)..(61): Homolog of NCBI NO: 6634015 NR Description: KIAA0324 protein [Homo sapiens]
  misc_feature (3)..(61): Homolog of NCBI NO: 7512967 NR Description: hypothetical protein KIAA0324 - human (fragment)
  misc_feature (10)..(61): Homolog of NCBI NO: 25143299 NR Description: pre-mRNA splicing SR protein related RSR-1 (68.2
  misc_feature (3)..(61): Homolog of NCBI NO: 6649242 NR Description: splicing coactivator subunit SRm300 [Homo sapiens]
  misc_feature (3)..(61): Homolog of NCBI NO: 19923466 NR Description: splicing coactivator subunit SRm300; RNA binding
  misc_feature (6)..(61): Homolog of NCBI NO: 23018055 NR Description: hypothetical protein [Thermobifida fusca]
  misc_feature (9)..(61): Homolog of NCBI NO: 25143299 NR Description: pre-mRNA splicing SR protein related RSR-1 (68.2
  misc_feature (35)..(61): Homolog of NCBI NO: 25143299 NR Description: pre-mRNA splicing SR protein related RSR-1 (68.2
ELAVVPLFPPHAERTRSQTKRAAETCETCRLSAARNPPSSGRRTTWFPAVRTRTASSSSPP

SEQ ID NO: 13200 - protein, 57 aa, Zea mays subsp. mays
  peptide (1)..(57): Ceres Seq. ID no. 13498892
  misc_feature (1)..(44): Homolog of NCBI NO: 25989119 NR Description: unknown [Streptomyces aureofaciens]
  misc_feature (1)..(44): Homolog of NCBI NO: 5821151 NR Description: RNA binding protein [Homo sapiens]
  misc_feature (1)..(44): Homolog of NCBI NO: 6634015 NR Description: KIAA0324 protein [Homo sapiens]
  misc_feature (1)..(44): Homolog of NCBI NO: 7512967 NR Description: hypothetical protein KIAA0324 - human (fragment)
  misc_feature (1)..(55): Homolog of NCBI NO: 25143299 NR Description: pre-mRNA splicing SR protein related RSR-1 (68.2
  misc_feature (1)..(44): Homolog of NCBI NO: 6649242 NR Description: splicing coactivator subunit SRm300 [Homo sapiens]
  misc_feature (1)..(44): Homolog of NCBI NO: 19923466 NR Description: splicing coactivator subunit SRm300; RNA binding
  misc_feature (1)..(36): Homolog of NCBI NO: 23018055 NR Description: hypothetical protein [Thermobifida fusca]
  misc_feature (1)..(21): Homolog of NCBI NO: 34393619 NR Description: hypothetical protein [Oryza sativa (japonica
  misc_feature (10)..(10): Xaa is any aa, unknown or other
  misc_feature (11)..(11): Xaa is any aa, unknown or other
  misc_feature (40)..(40): Xaa is any aa, unknown or other
  misc_feature (41)..(41): Xaa is any aa, unknown or other
MAAAAPRPPXXAGARSCRTGRTSWGCSPACTGSAGAHTRXXPVSHDHDAPWRTRSKQ

SEQ ID NO: 13201 - protein, 50 aa, Zea mays subsp. mays
  peptide (1)..(50): Ceres Seq. ID no. 13498893
  misc_feature (16)..(50): Homolog of NCBI NO: 34911600 NR Description: P0004A09.25 [Oryza sativa (japonica
  misc_feature (46)..(46): Xaa is any aa, unknown or other
  misc_feature (47)..(47): Xaa is any aa, unknown or other
  misc_feature (48)..(48): Xaa is any aa, unknown or other
MRDMPVVRRQEPTVVRTEDDVVSGGEDSDGEFEFPSVSRESAAGVXXXRV

SEQ ID NO: 13202 - DNA, 1654 bp, Zea mays subsp. mays
  misc_feature (1)..(1654): Ceres Seq. ID no. 13492518
  misc_feature: MA Experiment ID: 108527 Result: Up-regulated in Transcription
  misc_feature: MA Experiment 108527 PARAMETER Experiment Name: Zm_5mM_NO_P Parameter: Age (day) Value: 8
  misc_feature: MA Experiment 108527 PARAMETER Experiment Name: Zm_5mM_NO_P Parameter: Organism Value: Zea mays
  misc_feature: MA Experiment 108527 PARAMETER Experiment Name: Zm_5mM_NO_P Parameter: Plant Line Value: 35A19
  misc_feature: MA Experiment 108527 PARAMETER Experiment Name: Zm_5mM_NO_P Parameter: Timepoint (hr) Value: 6
  misc_feature: MA Experiment 108527 PARAMETER Experiment Name: Zm_5mM_NO_P Parameter: Tissue Value: Aerial
  misc_feature: MA Experiment 108527 PARAMETER Experiment Name: Zm_5mM_NO_P Parameter: Treatment Value: 5mM NO vs. No Treatment
catttccgcgtcgtctccgcccgcagccggcagccccaccacccaccacatcggccgccatgccgggtggggcccacggcgccggcgccgcggacccgatgcaggtggaccagccgctcccccctgccgccgcaggcacagcacacgcccccgccgacgccaagcatgctggttctatgattgaagggagtgatccggtcacaggccatataatctcgacaaccattggagggaagaatggagagcctaaaaggactatcagctacatggcagagagagttgtgggaactggatcatttggaatcgtcttccaggcaaaatgtctggagactggtgagactgttgcgattaagaaggttttgcaggacaagcgctacaagaacagggagctacaaatcatgcgatccatggatcactgcaatgttgtttccttgaagcattgcttcttctctaccacaagcagagatgaacttttccttaacttagtgatggagtttgttcccgagtcattatatcgggtgttgaaacattacagcaatatgaaccagaggatgccactcatttatgtcaaattatatacctaccagatatttcgaggcttagcctatattcacacagtacctggagtttgccacagggatgtgaaaccacaaaatcttttggttgatccaccgactcaccaagtgaagatatgtgattttgggagtgccaaaatgttggtcaaaggtgaagcaaacatatcatatatatgttcacgttattaccgtgctccagagctcatatttggggcaactgagtacacaacatcaattgatatttggtcagctggatgtgttcttgctgagctgcttcttggccagcctctcttccctggtgaaagtgctgtggatcagcttgttgagataataaaggttcttggtaccccaacgcgcgaggaaatccgatgtatgaatccaaactacaccgagtttagatttcctcagatcaaagctcacccatggcacaagattttccacaagcggatgcctccagaagctatagatctcgcttcacgcttgctccagtattcaccaaatctaagatgcactgctcttgaagcgtgtgcacatccattctttgacgatttgcgagaaccacatgcgaggttgccaaatggacggccatttcctccactgttcaactttaaacaggaactagcaaatgcctccccagagctcatcaacaggttgatcccagaccatgctaggcggcatcttgggctcacattattgcccgctactggaccataggcgaaggctctatggtggtgcttcgttgtgcggaaggcaacctgcattcaaggtgtagaatctgacaattattggaaggtcaaacatgagctggcgcgtaaggagaggtggtatgttctcgtgcagccagccttaatttgtcgcatgtcttaatgcaaaaatctgatttttgcccaagtagtgagaggagggaagggggtggtcggtgtattgttaagctattgaaggaattcgatccctgctattgtgttactttctccaacgtttaaacgttgtagtgcgcctgtaagtgttccatatatcccctgttgtcagtcagtgtaattctgtaaatgttattaatgggaaattatttcgtgcttttc

SEQ ID NO: 13203 - protein, 428 aa, Zea mays subsp. mays
  peptide (1)..(428): Ceres Seq. ID no. 13492519
  misc_feature (88)..(372): Pfam Name: Protein kinase domain Pfam Description: Protein kinase domain
  misc_feature (52)..(418): Homolog of NCBI NO: 15224593 NR Description: shaggy-related protein kinase dzeta [Arabidopsis
  misc_feature (52)..(418): Homolog of NCBI NO: 12643750 NR Description: Shaggy-related protein kinase delta (ASK-delta)
  misc_feature (52)..(418): Homolog of NCBI NO: 21593135 NR Description: putative shaggy-like protein kinase dzeta
  misc_feature (52)..(427): Homolog of NCBI NO: 15233984 NR Description: shaggy-related protein kinase etha (EC 2.7.1.-)
  misc_feature (52)..(427): Homolog of NCBI NO: 12643751 NR Description: Shaggy-related protein kinase eta (ASK-eta)
  misc_feature (52)..(427): Homolog of NCBI NO: 18700188 NR Description: AT4g18710/F28A21_120 [Arabidopsis thaliana]
  misc_feature (18)..(422): Homolog of NCBI NO: 15221476 NR Description: shaggy-related kinase [Arabidopsis thaliana]
  misc_feature (18)..(419): Homolog of NCBI NO: 7434281 NR Description: probable shaggy-like protein kinase etha (EC
  misc_feature (52)..(423): Homolog of NCBI NO: 22326813 NR Description: serine/threonine protein kinase, Msk family thaliana] >gi|18086450|gb|AAL57679.1| AT5g14640/T15N1_130
  misc_feature (17)..(416): Homolog of NCBI NO: 1076649 NR Description: shaggy protein kinase 4 (EC 2.7.1.-) - garden >gi|619894|emb|CAA58594.1| Petunia Shaggy kinase 4 [Petunia x
FPRRLRPQPAAPPPTTSAAMPGGAHGAGAADPMQVDQPLPPAAAGTAHAPADAKHAGSMIEGSDPVTGHIISTTIGGKNGEPKRTISYMAERVVGTGSFGIVFQAKCLETGETVAIKKVLQDKRYKNRELQIMRSMDHCNVVSLKHCFFSTTSRDELFLNLVMEFVPESLYRVLKHYSNMNQRMPLIYVKLYTYQIFRGLAYIHTVPGVCHRDVKPQNLLVDPPTHQVKICDFGSAKMLVKGEANISYICSRYYRAPELIFGATEYTTSIDIWSAGCVLAELLLGQPLFPGESAVDQLVEIIKVLGTPTREEIRCMNPNYTEFRFPQIKAHPWHKIFHKRMPPEAIDLASRLLQYSPNLRCTALEACAHPFFDDLREPHARLPNGRPFPPLFNFKQELANASPELINRLIPDHARRHLGLTLLPATGP

SEQ ID NO: 13204 - protein, 409 aa, Zea mays subsp. mays
  peptide (1)..(409): Ceres Seq. ID no. 13492520
  misc_feature (69)..(353): Pfam Name: Protein kinase domain Pfam Description: Protein kinase domain
  misc_feature (1)..(400): Homolog of NCBI NO: 7434281 NR Description: probable shaggy-like protein kinase etha (EC
  misc_feature (33)..(408): Homolog of NCBI NO: 15233984 NR Description: shaggy-related protein kinase etha (EC 2.7.1.-)
  misc_feature (1)..(403): Homolog of NCBI NO: 15221476 NR Description: shaggy-related kinase [Arabidopsis thaliana]
  misc_feature (33)..(408): Homolog of NCBI NO: 12643751 NR Description: Shaggy-related protein kinase eta (ASK-eta)
  misc_feature (33)..(408): Homolog of NCBI NO: 18700188 NR Description: AT4g18710/F28A21_120 [Arabidopsis thaliana]
  misc_feature (33)..(399): Homolog of NCBI NO: 15224593 NR Description: shaggy-related protein kinase dzeta [Arabidopsis
  misc_feature (33)..(399): Homolog of NCBI NO: 12643750 NR Description: Shaggy-related protein kinase delta (ASK-delta)
  misc_feature (33)..(399): Homolog of NCBI NO: 21593135 NR Description: putative shaggy-like protein kinase dzeta
  misc_feature (33)..(404): Homolog of NCBI NO: 22326813 NR Description: serine/threonine protein kinase, Msk family thaliana] >gi|18086450|gb|AAL57679.1| AT5g14640/T15N1_130
  misc_feature (1)..(397): Homolog of NCBI NO: 1076649 NR Description: shaggy protein kinase 4 (EC 2.7.1.-) - garden >gi|619894|emb|CAA58594.1| Petunia Shaggy kinase 4 [Petunia x
MPGGAHGAGAADPMQVDQPLPPAAAGTAHAPADAKHAGSMIEGSDPVTGHIISTTIGGKNGEPKRTISYMAERVVGTGSFGIVFQAKCLETGETVAIKKVLQDKRYKNRELQIMRSMDHCNVVSLKHCFFSTTSRDELFLNLVMEFVPESLYRVLKHYSNMNQRMPLIYVKLYTYQIFRGLAYIHTVPGVCHRDVKPQNLLVDPPTHQVKICDFGSAKMLVKGEANISYICSRYYRAPELIFGATEYTTSIDIWSAGCVLAELLLGQPLFPGESAVDQLVEIIKVLGTPTREEIRCMNPNYTEFRFPQIKAHPWHKIFHKRMPPEAIDLASRLLQYSPNLRCTALEACAHPFFDDLREPHARLPNGRPFPPLFNFKQELANASPELINRLIPDHARRHLGLTLLPATGP

SEQ ID NO: 13205 - protein, 396 aa, Zea mays subsp. mays
  peptide (1)..(396): Ceres Seq. ID no. 13492521
  misc_feature (56)..(340): Pfam Name: Protein kinase domain Pfam Description: Protein kinase domain
  misc_feature (1)..(387): Homolog of NCBI NO: 7434281 NR Description: probable shaggy-like protein kinase etha (EC
  misc_feature (20)..(395): Homolog of NCBI NO: 15233984 NR Description: shaggy-related protein kinase etha (EC 2.7.1.-)
  misc_feature (1)..(390): Homolog of NCBI NO: 15221476 NR Description: shaggy-related kinase [Arabidopsis thaliana]
  misc_feature (20)..(395): Homolog of NCBI NO: 12643751 NR Description: Shaggy-related protein kinase eta (ASK-eta)
  misc_feature (20)..(395): Homolog of NCBI NO: 18700188 NR Description: AT4g18710/F28A21_120 [Arabidopsis thaliana]
  misc_feature (20)..(386): Homolog of NCBI NO: 15224593 NR Description: shaggy-related protein kinase dzeta [Arabidopsis
  misc_feature (20)..(386): Homolog of NCBI NO: 12643750 NR Description: Shaggy-related protein kinase delta (ASK-delta)
  misc_feature (20)..(386): Homolog of NCBI NO: 21593135 NR Description: putative shaggy-like protein kinase dzeta
  misc_feature (20)..(391): Homolog of NCBI NO: 22326813 NR Description: serine/threonine protein kinase, Msk family thaliana] >gi|18086450|gb|AAL57679.1| AT5g14640/T15N1_130
  misc_feature (1)..(384): Homolog of NCBI NO: 1076649 NR Description: shaggy protein kinase 4 (EC 2.7.1.-) - garden >gi|619894|emb|CAA58594.1| Petunia Shaggy kinase 4 [Petunia x
MQVDQPLPPAAAGTAHAPADAKHAGSMIEGSDPVTGHIISTTIGGKNGEPKRTISYMAERVVGTGSFGIVFQAKCLETGETVAIKKVLQDKRYKNRELQIMRSMDHCNVVSLKHCFFSTTSRDELFLNLVMEFVPESLYRVLKHYSNMNQRMPLIYVKLYTYQIFRGLAYIHTVPGVCHRDVKPQNLLVDPPTHQVKICDFGSAKMLVKGEANISYICSRYYRAPELIFGATEYTTSIDIWSAGCVLAELLLGQPLFPGESAVDQLVEIIKVLGTPTREEIRCMNPNYTEFRFPQIKAHPWHKIFHKRMPPEAIDLASRLLQYSPNLRCTALEACAHPFFDDLREPHARLPNGRPFPPLFNFKQELANASPELINRLIPDHARRHLGLTLLPATGP

SEQ ID NO: 13206 - DNA, 1176 bp, Zea mays subsp. mays
  misc_feature (1)..(1176): Ceres Seq. ID no. 12347474
  misc_feature: MA Experiment ID: 108528 Result: Up-regulated in Transcription
  misc_feature: MA Experiment 108528 PARAMETER Experiment Name: Zm_Imbibed_Seeds_P Parameter: Age (day) Value: 5 vs. 2
  misc_feature: MA Experiment 108528 PARAMETER Experiment Name: Zm_Imbibed_Seeds_P Parameter: Organism Value: Zea mays
  misc_feature: MA Experiment 108528 PARAMETER Experiment Name: Zm_Imbibed_Seeds_P Parameter: Plant Line Value: 35A19
  misc_feature: MA Experiment 108528 PARAMETER Experiment Name: Zm_Imbibed_Seeds_P Parameter: Tissue Value: Aerial vs. Embryo
  misc_feature: MA Experiment ID: 108530 Result: Up-regulated in Transcription
  misc_feature: MA Experiment 108530 PARAMETER Experiment Name: Zm_Imbibed_Seeds_P Parameter: Age (day) Value: 6 vs. 2
  misc_feature: MA Experiment 108530 PARAMETER Experiment Name: Zm_Imbibed_Seeds_P Parameter: Organism Value: Zea mays
  misc_feature: MA Experiment 108530 PARAMETER Experiment Name: Zm_Imbibed_Seeds_P Parameter: Plant Line Value: 35A19
  misc_feature: MA Experiment 108530 PARAMETER Experiment Name: Zm_Imbibed_Seeds_P Parameter: Tissue Value: Aerial vs. Embryo
  misc_feature: MA Experiment ID: 108545 Result: Up-regulated in Transcription
  misc_feature: MA Experiment 108545 PARAMETER Experiment Name: Zm_Imbibed_Seeds_P Parameter: Age (day) Value: 3 vs. 2
  misc_feature: MA Experiment 108545 PARAMETER Experiment Name: Zm_Imbibed_Seeds_P Parameter: Organism Value: Zea mays
  misc_feature: MA Experiment 108545 PARAMETER Experiment Name: Zm_Imbibed_Seeds_P Parameter: Plant Line Value: 35A19
  misc_feature: MA Experiment 108545 PARAMETER Experiment Name: Zm_Imbibed_Seeds_P Parameter: Tissue Value: Aerial vs. Embryo
  misc_feature: MA Experiment ID: 108547 Result: Up-regulated in Transcription
  misc_feature: MA Experiment 108547 PARAMETER Experiment Name: Zm_Imbibed_Seeds_P Parameter: Age (day) Value: 4 vs. 2
  misc_feature: MA Experiment 108547 PARAMETER Experiment Name: Zm_Imbibed_Seeds_P Parameter: Organism Value: Zea mays
  misc_feature: MA Experiment 108547 PARAMETER Experiment Name: Zm_Imbibed_Seeds_P Parameter: Plant Line Value: 35A19
  misc_feature: MA Experiment 108547 PARAMETER Experiment Name: Zm_Imbibed_Seeds_P Parameter: Tissue Value: Aerial vs. Embryo
  misc_feature: MA Experiment ID: 108559 Result: Down-regulated in Transcription
  misc_feature: MA Experiment 108559 PARAMETER Experiment Name: Zm_5mM_NO_P Parameter: Age (day) Value: 8
  misc_feature: MA Experiment 108559 PARAMETER Experiment Name: Zm_5mM_NO_P Parameter: Organism Value: Zea mays
  misc_feature: MA Experiment 108559 PARAMETER Experiment Name: Zm_5mM_NO_P Parameter: Plant Line Value: 35A19
  misc_feature: MA Experiment 108559 PARAMETER Experiment Name: Zm_5mM_NO_P Parameter: Timepoint (hr) Value: 12
  misc_feature: MA Experiment 108559 PARAMETER Experiment Name: Zm_5mM_NO_P Parameter: Tissue Value: Aerial
  misc_feature: MA Experiment 108559 PARAMETER Experiment Name: Zm_5mM_NO_P Parameter: Treatment Value: 5mM NO vs. No Treatment
  misc_feature: MA Experiment ID: 20000480 Result: Down-regulated in Transcription
  misc_feature: MA Experiment 20000480 PARAMETER Experiment Name: Zm_Drought_P Parameter: Age (day) Value: 11
  misc_feature: MA Experiment 20000480 PARAMETER Experiment Name: Zm_Drought_P Parameter: Organism Value: Zea mays
  misc_feature: MA Experiment 20000480 PARAMETER Experiment Name: Zm_Drought_P Parameter: Plant Line Value: 35A19
  misc_feature: MA Experiment 20000480 PARAMETER Experiment Name: Zm_Drought_P Parameter: Timepoint (hr) Value: 72
  misc_feature: MA Experiment 20000480 PARAMETER Experiment Name: Zm_Drought_P Parameter: Tissue Value: Aerial
  misc_feature: MA Experiment 20000480 PARAMETER Experiment Name: Zm_Drought_P Parameter: Treatment Value: Drought vs. No Drought
  misc_feature: MA Experiment ID: 20000535 Result: Down-regulated in Transcription
  misc_feature: MA Experiment 20000535 PARAMETER Experiment Name: Zm_Hybrid_Seed_Dev_P Parameter: DAP Value: 30 vs. 12
  misc_feature: MA Experiment 20000535 PARAMETER Experiment Name: Zm_Hybrid_Seed_Dev_P Parameter: Organism Value: Zea mays
  misc_feature: MA Experiment 20000535 PARAMETER Experiment Name: Zm_Hybrid_Seed_Dev_P Parameter: Plant Line Value: 35A19
  misc_feature: MA Experiment 20000535 PARAMETER Experiment Name: Zm_Hybrid_Seed_Dev_P Parameter: Tissue Value: Embryo vs. Unfert Floret
aaacatccccaacccacgaccctccgccaccggccatcgcctgcatcagatctcccgcccgtccgttacatctcagcgcgacgcggccgcggccatgacgccatcctccgctctcgccctcgcgcaccacgccgcggcatccccgctcccgtcctccacgccgcggccctcccccaggtccagctctctgagcctgggcccgggctccgccgggctcgggccgcgccggctcgtcgcggcagcgcccccacgggcgttcttctcctcgtccccctaccagccgccccagccggaggggttctcgcagcaccgcgagtacggcctggtccccatggtcatcgagaccacctcccggggggagcgcgcctacgacatcttctcgcgcctgcttaaggagcgcatcgtctgcatccacgggcccatcgccgacgacacggcctcgctcgtcgtcgcgcagctgctcttcctcgagtccgagaacccgctcaagcccgtccacctctacatcaactcccccgggggcgtcgtcaccgcggggctcgccatctacgacaccatgcagtacatccgctgccccgtcaccaccctctgcatcggccaggcggcctccatgggctcgctcctcctcgcggctggggcgccgggtgagaggcgcgcgcttcccaacgccagggtcatgatccaccagccctcgggcggcgcgcaggggcaagccaccgacatcgcccatccaggccaaggagatcctcaaaatgcgcgaccgcctcaacaagatctaccagaagcacacgcgccagcccatcgataagattgagcagtgcatggagagggacctcttcatggaccctgaagaggcgcgcgactggggcctcatcgacgaggtcatcgagaatcgacctgcctcgttcatgcccgacggaatcggtggaggcctcgatgtgcccaggctcggtggcgttggcggcggacgggggagggacgtcgaggaaccttccgcggtgtgaggattggcctcaaaggtgaaatccttcctcatccggtggatgtgttgtttgttgttagatccaaaggttcaattcttactatacaaggttaaccttgttattatggttatggaaacgtccggctccccattgtccttgttgcttaaattgcttcaattgagctattggggat

SEQ ID NO: 13207 - protein, 268 aa, Zea mays subsp. mays
  peptide (1)..(268): Ceres Seq. ID no. 12347475
  misc_feature (117)..(246): Pfam Name: Clp protease Pfam Description: Clp protease
  misc_feature (75)..(242): Homolog of NCBI NO: 38344435 NR Description: OSJNBa0038O10.7 [Oryza sativa (japonica
  misc_feature (104)..(246): Homolog of NCBI NO: 18420643 NR Description: ATP-dependent Clp protease proteolytic subunit
  misc_feature (54)..(242): Homolog of NCBI NO: 34882298 NR Description: similar to ClpP protease [Rattus norvegicus]
  misc_feature (108)..(241): Homolog of NCBI NO: 31238393 NR Description: ENSANGP00000017225 [Anopheles gambiae]
  misc_feature (68)..(242): Homolog of NCBI NO: 8393156 NR Description: caseinolytic protease, ATP-dependent, proteolytic
  misc_feature (104)..(242): Homolog of NCBI NO: 5174419 NR Description: endopeptidase Clp precursor; ATP-dependent
  misc_feature (108)..(241): Homolog of NCBI NO: 23108078 NR Description: hypothetical protein [Novosphingobium
  misc_feature (108)..(246): Homolog of NCBI NO: 18203228 NR Description: ATP-dependent Clp protease proteolytic subunit Clp) >gi|6942106|gb|AAF32318.1|AF218420_1 ClpP [Brucella
  misc_feature (108)..(246): Homolog of NCBI NO: 23501987 NR Description: ATP-dependent Clp protease, proteolytic subunit
  misc_feature (108)..(241): Homolog of NCBI NO: 16126206 NR Description: ATP-dependent Clp protease, proteolytic subunit
NIPNPRPSATGHRLHQISRPSVTSQRDAAAAMTPSSALALAHHAAASPLPSSTPRPSPRSSSLSLGPGSAGLGPRRLVAAAPPRAFFSSSPYQPPQPEGFSQHREYGLVPMVIETTSRGERAYDIFSRLLKERIVCIHGPIADDTASLVVAQLLFLESENPLKPVHLYINSPGGVVTAGLAIYDTMQYIRCPVTTLCIGQAASMGSLLLAAGAPGERRALPNARVMIHQPSGGAQGQATDIAHPGQGDPQNARPPQQDLPEAHAPAHR

SEQ ID NO: 13208 - protein, 237 aa, Zea mays subsp. mays
  peptide (1)..(237): Ceres Seq. ID no. 12347476
  misc_feature (86)..(215): Pfam Name: Clp protease Pfam Description: Clp protease
  misc_feature (44)..(211): Homolog of NCBI NO: 38344435 NR Description: OSJNBa0038O10.7 [Oryza sativa (japonica
  misc_feature (73)..(215): Homolog of NCBI NO: 18420643 NR Description: ATP-dependent Clp protease proteolytic subunit
  misc_feature (23)..(211): Homolog of NCBI NO: 34882298 NR Description: similar to ClpP protease [Rattus norvegicus]
  misc_feature (77)..(210): Homolog of NCBI NO: 31238393 NR Description: ENSANGP00000017225 [Anopheles gambiae]
  misc_feature (37)..(211): Homolog of NCBI NO: 8393156 NR Description: caseinolytic protease, ATP-dependent, proteolytic
  misc_feature (73)..(211): Homolog of NCBI NO: 5174419 NR Description: endopeptidase Clp precursor; ATP-dependent
  misc_feature (77)..(210): Homolog of NCBI NO: 23108078 NR Description: hypothetical protein [Novosphingobium
  misc_feature (77)..(215): Homolog of NCBI NO: 18203228 NR Description: ATP-dependent Clp protease proteolytic subunit Clp) >gi|6942106|gb|AAF32318.1|AF218420_1 ClpP [Brucella
  misc_feature (77)..(215): Homolog of NCBI NO: 23501987 NR Description: ATP-dependent Clp protease, proteolytic subunit
  misc_feature (77)..(210): Homolog of NCBI NO: 16126206 NR Description: ATP-dependent Clp protease, proteolytic subunit
MTPSSALALAHHAAASPLPSSTPRPSPRSSSLSLGPGSAGLGPRRLVAAAPPRAFFSSSPYQPPQPEGFSQHREYGLVPMVIETTSRGERAYDIFSRLLKERIVCIHGPIADDTASLVVAQLLFLESENPLKPVHLYINSPGGVVTAGLAIYDTMQYIRCPVTTLCIGQAASMGSLLLAAGAPGERRALPNARVMIHQPSGGAQGQATDIAHPGQGDPQNARPPQQDLPEAHAPAHR

SEQ ID NO: 13209 - protein, 158 aa, Zea mays subsp. mays
  peptide (1)..(158): Ceres Seq. ID no. 12347477
  misc_feature (7)..(136): Pfam Name: Clp protease Pfam Description: Clp protease
  misc_feature (1)..(132): Homolog of NCBI NO: 38344435 NR Description: OSJNBa0038O10.7 [Oryza sativa (japonica
  misc_feature (1)..(136): Homolog of NCBI NO: 18420643 NR Description: ATP-dependent Clp protease proteolytic subunit
  misc_feature (1)..(132): Homolog of NCBI NO: 34882298 NR Description: similar to ClpP protease [Rattus norvegicus]
  misc_feature (1)..(131): Homolog of NCBI NO: 31238393 NR Description: ENSANGP00000017225 [Anopheles gambiae]
  misc_feature (1)..(132): Homolog of NCBI NO: 8393156 NR Description: caseinolytic protease, ATP-dependent, proteolytic
  misc_feature (1)..(132): Homolog of NCBI NO: 5174419 NR Description: endopeptidase Clp precursor; ATP-dependent
  misc_feature (1)..(131): Homolog of NCBI NO: 23108078 NR Description: hypothetical protein [Novosphingobium
  misc_feature (1)..(136): Homolog of NCBI NO: 18203228 NR Description: ATP-dependent Clp protease proteolytic subunit Clp) >gi|6942106|gb|AAF32318.1|AF218420_1 ClpP [Brucella
  misc_feature (1)..(136): Homolog of NCBI NO: 23501987 NR Description: ATP-dependent Clp protease, proteolytic subunit
  misc_feature (1)..(131): Homolog of NCBI NO: 16126206 NR Description: ATP-dependent Clp protease, proteolytic subunit
MVIETTSRGERAYDIFSRLLKERIVCIHGPIADDTASLVVAQLLFLESENPLKPVHLYINSPGGVVTAGLAIYDTMQYIRCPVTTLCIGQAASMGSLLLAAGAPGERRALPNARVMIHQPSGGAQGQATDIAHPGQGDPQNARPPQQDLPEAHAPAHR

SEQ ID NO: 13210 - DNA, 1623 bp, Zea mays subsp. mays
  misc_feature (1)..(1623): Ceres Seq. ID no. 12345183
  misc_feature: MA Experiment ID: 108523 Result: Down-regulated in Transcription
  misc_feature: MA Experiment 108523 PARAMETER Experiment Name: Zm_42deg_Heat_P Parameter: Age (day) Value: 8
  misc_feature: MA Experiment 108523 PARAMETER Experiment Name: Zm_42deg_Heat_P Parameter: Organism Value: Zea mays
  misc_feature: MA Experiment 108523 PARAMETER Experiment Name: Zm_42deg_Heat_P Parameter: Plant Line Value: 35A19
  misc_feature: MA Experiment 108523 PARAMETER Experiment Name: Zm_42deg_Heat_P Parameter: Temperature (deg C) Value: 42 vs. 22
  misc_feature: MA Experiment 108523 PARAMETER Experiment Name: Zm_42deg_Heat_P Parameter: Timepoint (hr) Value: 6
  misc_feature: MA Experiment 108523 PARAMETER Experiment Name: Zm_42deg_Heat_P Parameter: Tissue Value: Aerial
  misc_feature: MA Experiment ID: 108530 Result: Up-regulated in Transcription
  misc_feature: MA Experiment 108530 PARAMETER Experiment Name: Zm_Imbibed_Seeds_P Parameter: Age (day) Value: 6 vs. 2
  misc_feature: MA Experiment 108530 PARAMETER Experiment Name: Zm_Imbibed_Seeds_P Parameter: Organism Value: Zea mays
  misc_feature: MA Experiment 108530 PARAMETER Experiment Name: Zm_Imbibed_Seeds_P Parameter: Plant Line Value: 35A19
  misc_feature: MA Experiment 108530 PARAMETER Experiment Name: Zm_Imbibed_Seeds_P Parameter: Tissue Value: Aerial vs. Embryo
  misc_feature: MA Experiment ID: 108535 Result: Down-regulated in Transcription
  misc_feature: MA Experiment 108535 PARAMETER Experiment Name: Zm_Meristem_P Parameter: Age (day) Value: 8
  misc_feature: MA Experiment 108535 PARAMETER Experiment Name: Zm_Meristem_P Parameter: Organism Value: Zea mays
  misc_feature: MA Experiment 108535 PARAMETER Experiment Name: Zm_Meristem_P Parameter: Plant Line Value: 35A19
  misc_feature: MA Experiment 108535 PARAMETER Experiment Name: Zm_Meristem_P Parameter: Tissue Value: Root Meristem vs. Above Root Meristem
  misc_feature: MA Experiment ID: 108543 Result: Up-regulated in Transcription
  misc_feature: MA Experiment ID: 108544 Result: Up-regulated in Transcription
  misc_feature: MA Experiment ID: 20000108 Result: Down-regulated in Transcription
  misc_feature: MA Experiment 20000108 PARAMETER Experiment Name: Zm_Root-Tips_P Parameter: Age (day) Value: 12
  misc_feature: MA Experiment 20000108 PARAMETER Experiment Name: Zm_Root-Tips_P Parameter: Organism Value: Zea mays
  misc_feature: MA Experiment 20000108 PARAMETER Experiment Name: Zm_Root-Tips_P Parameter: Tissue Value: Root tips vs. Root mid region    35
  misc_feature: MA Experiment 20000108 PARAMETER Experiment Name: Zm_Root-Tips_P Parameter: Tissue Value: Root tips vs. Root mid region   Sequence Listing-Misc Features (4)
acctcacaagtccaaatcagtttgtctgctccgcccgttgcccgtggcccgtcggtctctcttgcagtctcgccgctccccttcctcccccgcaggaatccgaatcagtaagtccggcgacctaggtctctcggcttgtccgcagcccgccggtcagtaatggcgcaggatgatccggttgtttctgctcagtggctgcacgagcacctagggatgcctgatgttaaggtaaaaaaaaaacatctagtttgcgtgttcatattcacttcagagacacttcagtaatgcttccttcatcgaagaagaaagttcagagatatacttcttctatcccctgcgttactggtatgtggagaatataacagtttggttgtctatcaatttgatattcccttttatgtgttgtgttcttattactcccagaaataattagagggttagggacatatgtgctttgtgacagttatcagcttgttttaggttttggatgcttcctggtacatgccggtagagaacagggatccatggaaagaatatcaggtggcacacatccccggtgcgctattcttcgacttagatggcatagttgatcggacaactgatttaccgcacatgctgccatcagaagaggcttttgcagcagcaatttctgagctggatataaaaaaccaggataaagttattgtctatgatggaaagggattcttcagtgcacctcgtgtttggtggatgtttagagtgtttgggcacaagaaagtctgggtactagacggcggtttgcctcagtggcaagcttctgggttcaacgtggaaaaggccagccctgacgatgacgcagttctgaaatcaatcgctgcaaacagggctgtcaaaagggtttataatggtgaacagacaaatacaatctcgtttcagactgaatttcagcctaatctattctgggcactggaaaaggtcgcacaaaacgtcactgctaagacgtaccaacagatagatgccagagcaaagggcagattcgacggcgtggcgccagagccacgggaaggggtaaggagtgggcatataccaggaagcgtctgcgttccgttccccgagatgttcgacggcgcaccaccgagccttctcctccccgccgacgagctgcggcggaagtttcagcacgcaggaatctccctggaccgacccatcgtcgtgacctgcggatccggcgtgactgcctgcatactcgctctggggctgtacaggatcggaaagcgtgatgtgccagtctacgatgggtcctcgacggagtgggagggtcagtcggactccgattaccccaaagtcaccgctcctggtacagcttgagcgtctgggactgggagttggcagttttagactgccagcatgatggcattgtgtttgcgacaggctgaaccgattttatcgagcactggaagcattgtattcgctactggtaggcctgctaatggcaaaaattccaacccacgcccacccatacccaaatctaataacttgatattcatcccactcccacccaaaaatataagaagaaaattaaacctaacccatccaatgatattattgatccctaaaccaacccgtaattgggtggaaacccgt

SEQ ID NO: 13211 - protein, 281 aa, Zea mays subsp. mays
  peptide (1)..(281): Ceres Seq. ID no. 12345184
  misc_feature (1)..(99): Pfam Name: Rhodanese-like domain Pfam Description: Rhodanese-like domain
  misc_feature (1)..(280): Homolog of NCBI NO: 14571545 NR Description: thiosulfate transferase [Triticum aestivum]
  misc_feature (1)..(270): Homolog of NCBI NO: 4406372 NR Description: thiosulfate sulfurtransferase [Datisca glomerata]
  misc_feature (1)..(269): Homolog of NCBI NO: 18412307 NR Description: mercaptopyruvate sulfurtransferase (Mst1/Rdh1); id: At1g79230.1, supported by cDNA: 32130., supported by cDNA:
  misc_feature (1)..(269): Homolog of NCBI NO: 25288794 NR Description: thiosulfate sulfurtransferase (EC 2.8.1.1) Mst1
  misc_feature (1)..(264): Homolog of NCBI NO: 18394364 NR Description: mercaptopyruvate sulfurtransferase (Mst2/Rdh2); id: At1g16460.2, supported by cDNA: gi_6009982 [Arabidopsis >gi|25288790|pir||T52663 thiosulfate sulfurtransferase (EC
  misc_feature (1)..(264): Homolog of NCBI NO: 30684873 NR Description: mercaptopyruvate sulfurtransferase (Mst2/Rdh2)
  misc_feature (1)..(264): Homolog of NCBI NO: 25456716 NR Description: thiosulfate sulfurtransferase (EC 2.8.1.1)
  misc_feature (1)..(264): Homolog of NCBI NO: 25288797 NR Description: hypothetical protein F3O9.26 [imported] - thaliana >gi|4966366|gb|AAD34697.1|AC006341_25 Similar to thiosulfate sulfurtransferase (TST) from Datisca glomerata and
  misc_feature (137)..(278): Homolog of NCBI NO: 16125674 NR Description: rhodanese family protein [Caulobacter crescentus
  misc_feature (1)..(104): Homolog of NCBI NO: 16125674 NR Description: rhodanese family protein [Caulobacter crescentus
MPVENRDPWKEYQVAHIPGALFFDLDGIVDRTTDLPHMLPSEEAFAAAISELDIKNQDKVIVYDGKGFFSAPRVWWMFRVFGHKKVWVLDGGLPQWQASGFNVEKASPDDDAVLKSIAANRAVKRVYNGEQTNTISFQTEFQPNLFWALEKVAQNVTAKTYQQIDARAKGRFDGVAPEPREGVRSGHIPGSVCVPFPEMFDGAPPSLLLPADELRRKFQHAGISLDRPIVVTCGSGVTACILALGLYRIGKRDVPVYDGSSTEWEGQSDSDYPKVTAPGTA

SEQ ID NO: 13212 - protein, 244 aa, Zea mays subsp. mays
  peptide (1)..(244): Ceres Seq. ID no. 12345185
  misc_feature (1)..(62): Pfam Name: Rhodanese-like domain Pfam Description: Rhodanese-like domain
  misc_feature (1)..(243): Homolog of NCBI NO: 14571545 NR Description: thiosulfate transferase [Triticum aestivum]
  misc_feature (1)..(233): Homolog of NCBI NO: 4406372 NR Description: thiosulfate sulfurtransferase [Datisca glomerata]
  misc_feature (1)..(232): Homolog of NCBI NO: 18412307 NR Description: mercaptopyruvate sulfurtransferase (Mst1/Rdh1); id: At1g79230.1, supported by cDNA: 32130., supported by cDNA:
  misc_feature (1)..(232): Homolog of NCBI NO: 25288794 NR Description: thiosulfate sulfurtransferase (EC 2.8.1.1) Mst1
  misc_feature (1)..(227): Homolog of NCBI NO: 18394364 NR Description: mercaptopyruvate sulfurtransferase (Mst2/Rdh2); id: At1g16460.2, supported by cDNA: gi_6009982 [Arabidopsis >gi|25288790|pir||T52663 thiosulfate sulfurtransferase (EC
  misc_feature (1)..(227): Homolog of NCBI NO: 30684873 NR Description: mercaptopyruvate sulfurtransferase (Mst2/Rdh2)
  misc_feature (1)..(227): Homolog of NCBI NO: 25456716 NR Description: thiosulfate sulfurtransferase (EC 2.8.1.1)
  misc_feature (1)..(227): Homolog of NCBI NO: 25288797 NR Description: hypothetical protein F3O9.26 [imported] - thaliana >gi|4966366|gb|AAD34697.1|AC006341_25 Similar to thiosulfate sulfurtransferase (TST) from Datisca glomerata and
  misc_feature (100)..(241): Homolog of NCBI NO: 16125674 NR Description: rhodanese family protein [Caulobacter crescentus
  misc_feature (1)..(67): Homolog of NCBI NO: 16125674 NR Description: rhodanese family protein [Caulobacter crescentus
MLPSEEAFAAAISELDIKNQDKVIVYDGKGFFSAPRVWWMFRVFGHKKVWVLDGGLPQWQASGFNVEKASPDDDAVLKSIAANRAVKRVYNGEQTNTISFQTEFQPNLFWALEKVAQNVTAKTYQQIDARAKGRFDGVAPEPREGVRSGHIPGSVCVPFPEMFDGAPPSLLLPADELRRKFQHAGISLDRPIVVTCGSGVTACILALGLYRIGKRDVPVYDGSSTEWEGQSDSDYPKVTAPGTA

SEQ ID NO: 13213 - protein, 205 aa, Zea mays subsp. mays
  peptide (1)..(205): Ceres Seq. ID no. 12345186
  misc_feature (1)..(204): Homolog of NCBI NO: 14571545 NR Description: thiosulfate transferase [Triticum aestivum]
  misc_feature (1)..(194): Homolog of NCBI NO: 4406372 NR Description: thiosulfate sulfurtransferase [Datisca glomerata]
  misc_feature (1)..(193): Homolog of NCBI NO: 18412307 NR Description: mercaptopyruvate sulfurtransferase (Mst1/Rdh1); id: At1g79230.1, supported by cDNA: 32130., supported by cDNA:
  misc_feature (1)..(193): Homolog of NCBI NO: 25288794 NR Description: thiosulfate sulfurtransferase (EC 2.8.1.1) Mst1
  misc_feature (1)..(188): Homolog of NCBI NO: 18394364 NR Description: mercaptopyruvate sulfurtransferase (Mst2/Rdh2); id: At1g16460.2, supported by cDNA: gi_6009982 [Arabidopsis >gi|25288790|pir||T52663 thiosulfate sulfurtransferase (EC
  misc_feature (1)..(188): Homolog of NCBI NO: 30684873 NR Description: mercaptopyruvate sulfurtransferase (Mst2/Rdh2)
  misc_feature (1)..(188): Homolog of NCBI NO: 25456716 NR Description: thiosulfate sulfurtransferase (EC 2.8.1.1)
  misc_feature (1)..(188): Homolog of NCBI NO: 25288797 NR Description: hypothetical protein F3O9.26 [imported] - thaliana >gi|4966366|gb|AAD34697.1|AC006341_25 Similar to thiosulfate sulfurtransferase (TST) from Datisca glomerata and
  misc_feature (61)..(202): Homolog of NCBI NO: 16125674 NR Description: rhodanese family protein [Caulobacter crescentus
  misc_feature (1)..(28): Homolog of NCBI NO: 16125674 NR Description: rhodanese family protein [Caulobacter crescentus
MFRVFGHKKVWVLDGGLPQWQASGFNVEKASPDDDAVLKSIAANRAVKRVYNGEQTNTISFQTEFQPNLFWALEKVAQNVTAKTYQQIDARAKGRFDGVAPEPREGVRSGHIPGSVCVPFPEMFDGAPPSLLLPADELRRKFQHAGISLDRPIVVTCGSGVTACILALGLYRIGKRDVPVYDGSSTEWEGQSDSDYPKVTAPGTA

SEQ ID NO: 13214 - DNA, 1883 bp, Zea mays subsp. mays
  misc_feature (1)..(1883): Ceres Seq. ID no. 13494565
  misc_feature: MA Experiment ID: 108543 Result: Up-regulated in Transcription
ctaatcactagtataaagcaggcggagacagccggcccctctggcctcgctgctcccccttcctccccgtccccacccacatgccctgcctccgccccgccccgccctgcccaaggtgattgattgattggttgcttggttgcttgcttcgtttcacgctttccccttcctttgctgagatccaaaagctgagactcagcttgtcgatccatctgttctgtgcgcctactcgtatcttaggatccatctgtatgttgtttacttgttttcctgattgaatcgcgcattggatgcctggtggttggccttgctcctagtcttttcatttacacgagctttcgacgaagccgcgtctggtctgtctgctccatcacaagagcacgcaaatggttcgatctgccgtgccagatgattgctgcattcagtgggacgtcatgcacatccacgatggattgtagcgtcagcactctgatctttccttgtcgatttgtttgtcgcagctgagttcccccaccccccaacaaacaattactagagtagctgcattggcggggaaattaaagcgctagaagctcagcagcaatggcggagcaggcgggcgccggaaggtactggtgccacatgtgcgccgcggccgttagccccgcggagggcgaggtggagatgaagtgcccgttctgccacagcggcttcctcgaggagatggagaccgcccgcggggccgcgaccgacgacggtgacggcgacggcgcggtggctcaggtgcaccccggcgccgaccgcccgagctccatctgggcgcacgctatcctcagcacggtcgacagctccgcccgtcgccgccgcaaccggcggcagcaggaggccgccagcgacgtctacgactggaacgaccccgagttctcgctgcgccggcggcgcgtcaccgcgttcctgcggctcctgcacgagctccgggaccgccagctgcagcggctggagtccgctgccggcgtcgccctcgaaggcgaccagctgaccccgttcggccggagcctcttcatcggcgcagctggcggcgagcatggcgtggcgctgggcgactacttcctcggccccagcctcgacgccttggtacagcagctcgccgagaacgatgcggcgcggcacggaacgccgccggccaagaaggaggccgtggaggcaatgccgaccgtggaaatcgccggcggcaacgatggcgacgacgcggccagctgcccggtctgcctggaggactacgcggccggcgagcgcgcccgcgagatgccctgcaggcacaggttccacgccaattgcatcgtgccgtggctcgagatgcacagctcctgccctgtctgccggttccagctgccggccaccgacgacaagagctcatgcaacggcggcgacggtggtttcgtcagtgtcgatgcggatcgtgaaggcagtgacaacggcgggggtgatggtagggcaagctctcggggcaatgccgagctagctgaagctgaagagagtggcaggcggttgccgccatccttgcagtggctcaacagcctgttctcgccgtcggcgcagtcctccggtagcggcggcagcagttcgcatcattgggagaactaagcaatattgccatggttgctgccgcttgaaagcttggcccgttggttggtcccaatgtacataggaaggagcaggagcgcatgccgggttggtgccatggaaaaatctggacccttttttctctgatatgtatcatggctgtaaaaaagaacagaaatgggcaaatgtatgaacttgccgcgctcttgcgtgaactgggtgctaatcatcgtcttactactcaattttggtttttattaacaaaactatagtatttatgc

SEQ ID NO: 13215 - protein, 346 aa, Zea mays subsp. mays
  peptide (1)..(346): Ceres Seq. ID no. 13494566
  misc_feature (219)..(259): Pfam Name: Zinc finger, C3HC4 type (RING finger) Pfam Description: Zinc finger, C3HC4 type (RING finger)
  misc_feature (1)..(342): Homolog of NCBI NO: 34903272 NR Description: unnamed protein product [Oryza sativa (japonica group)] >gi|6539567|dbj|BAA88184.1| unnamed protein product
  misc_feature (104)..(346): Homolog of NCBI NO: 15241188 NR Description: expressed protein [Arabidopsis thaliana] gene_id:MCD7.7~pir||T05064~similar to unknown protein thaliana] >gi|17380898|gb|AAL36261.1| unknown protein
  misc_feature (3)..(93): Homolog of NCBI NO: 15241188 NR Description: expressed protein [Arabidopsis thaliana] gene_id:MCD7.7~pir||T05064~similar to unknown protein thaliana] >gi|17380898|gb|AAL36261.1| unknown protein
  misc_feature (80)..(346): Homolog of NCBI NO: 22328949 NR Description: expressed protein [Arabidopsis thaliana] expressed protein [Arabidopsis thaliana] putative protein [Arabidopsis thaliana]
  misc_feature (7)..(93): Homolog of NCBI NO: 22328949 NR Description: expressed protein [Arabidopsis thaliana] expressed protein [Arabidopsis thaliana] putative protein [Arabidopsis thaliana]
  misc_feature (3)..(340): Homolog of NCBI NO: 18405411 NR Description: expressed protein [Arabidopsis thaliana]
  misc_feature (80)..(346): Homolog of NCBI NO: 7486783 NR Description: hypothetical protein M3E9.170 - Arabidopsis >gi|2982466|emb|CAA18230.1| putative protein [Arabidopsis >gi|7269492|emb|CAB79495.1| putative protein [Arabidopsis
  misc_feature (19)..(93): Homolog of NCBI NO: 7486783 NR Description: hypothetical protein M3E9.170 - Arabidopsis >gi|2982466|emb|CAA18230.1| putative protein [Arabidopsis >gi|7269492|emb|CAB79495.1| putative protein [Arabidopsis
  misc_feature (9)..(340): Homolog of NCBI NO: 37535546 NR Description: putative zinc finger protein [Oryza sativa
  misc_feature (166)..(292): Homolog of NCBI NO: 11994207 NR Description: gene_id:MPN9.20~unknown protein [Arabidopsis
MAEQAGAGRYWCHMCAAAVSPAEGEVEMKCPFCHSGFLEEMETARGAATDDGDGDGAVAQVHPGADRPSSIWAHAILSTVDSSARRRRNRRQQEAASDVYDWNDPEFSLRRRRVTAFLRLLHELRDRQLQRLESAAGVALEGDQLTPFGRSLFIGAAGGEHGVALGDYFLGPSLDALVQQLAENDAARHGTPPAKKEAVEAMPTVEIAGGNDGDDAASCPVCLEDYAAGERAREMPCRHRFHANCIVPWLEMHSSCPVCRFQLPATDDKSSCNGGDGGFVSVDADREGSDNGGGDGRASSRGNAELAEAEESGRRLPPSLQWLNSLFSPSAQSSGSGGSSSHHWEN

SEQ ID NO: 13216 - protein, 333 aa, Zea mays subsp. mays
  peptide (1)..(333): Ceres Seq. ID no. 13494567
  misc_feature (206)..(246): Pfam Name: Zinc finger, C3HC4 type (RING finger) Pfam Description: Zinc finger, C3HC4 type (RING finger)
  misc_feature (6)..(80): Homolog of NCBI NO: 7486783 NR Description: hypothetical protein M3E9.170 - Arabidopsis >gi|2982466|emb|CAA18230.1| putative protein [Arabidopsis >gi|7269492|emb|CAB79495.1| putative protein [Arabidopsis
  misc_feature (1)..(327): Homolog of NCBI NO: 37535546 NR Description: putative zinc finger protein [Oryza sativa
  misc_feature (91)..(333): Homolog of NCBI NO: 15241188 NR Description: expressed protein [Arabidopsis thaliana] gene_id:MCD7.7~pir||T05064~similar to unknown protein thaliana] >gi|17380898|gb|AAL36261.1| unknown protein
  misc_feature (67)..(333): Homolog of NCBI NO: 22328949 NR Description: expressed protein [Arabidopsis thaliana] expressed protein [Arabidopsis thaliana] putative protein [Arabidopsis thaliana]
  misc_feature (1)..(327): Homolog of NCBI NO: 18405411 NR Description: expressed protein [Arabidopsis thaliana]
  misc_feature (67)..(333): Homolog of NCBI NO: 7486783 NR Description: hypothetical protein M3E9.170 - Arabidopsis >gi|2982466|emb|CAA18230.1| putative protein [Arabidopsis >gi|7269492|emb|CAB79495.1| putative protein [Arabidopsis
  misc_feature (1)..(80): Homolog of NCBI NO: 22328949 NR Description: expressed protein [Arabidopsis thaliana] expressed protein [Arabidopsis thaliana] putative protein [Arabidopsis thaliana]
  misc_feature (1)..(80): Homolog of NCBI NO: 15241188 NR Description: expressed protein [Arabidopsis thaliana] gene_id:MCD7.7~pir||T05064~similar to unknown protein thaliana] >gi|17380898|gb|AAL36261.1| unknown protein
  misc_feature (1)..(329): Homolog of NCBI NO: 34903272 NR Description: unnamed protein product [Oryza sativa (japonica group)] >gi|6539567|dbj|BAA88184.1| unnamed protein product
  misc_feature (153)..(279): Homolog of NCBI NO: 11994207 NR Description: gene_id:MPN9.20~unknown protein [Arabidopsis
MCAAAVSPAEGEVEMKCPFCHSGFLEEMETARGAATDDGDGDGAVAQVHPGADRPSSIWAHAILSTVDSSARRRRNRRQQEAASDVYDWNDPEFSLRRRRVTAFLRLLHELRDRQLQRLESAAGVALEGDQLTPFGRSLFIGAAGGEHGVALGDYFLGPSLDALVQQLAENDAARHGTPPAKKEAVEAMPTVEIAGGNDGDDAASCPVCLEDYAAGERAREMPCRHRFHANCIVPWLEMHSSCPVCRFQLPATDDKSSCNGGDGGFVSVDADREGSDNGGGDGRASSRGNAELAEAEESGRRLPPSLQWLNSLFSPSAQSSGSGGSSSHHWEN

SEQ ID NO: 13217 - protein, 319 aa, Zea mays subsp. mays
  peptide (1)..(319): Ceres Seq. ID no. 13494568
  misc_feature (192)..(232): Pfam Name: Zinc finger, C3HC4 type (RING finger) Pfam Description: Zinc finger, C3HC4 type (RING finger)
  misc_feature (1)..(315): Homolog of NCBI NO: 34903272 NR Description: unnamed protein product [Oryza sativa (japonica group)] >gi|6539567|dbj|BAA88184.1| unnamed protein product
  misc_feature (77)..(319): Homolog of NCBI NO: 15241188 NR Description: expressed protein [Arabidopsis thaliana] gene_id:MCD7.7~pir||T05064~similar to unknown protein thaliana] >gi|17380898|gb|AAL36261.1| unknown protein
  misc_feature (1)..(66): Homolog of NCBI NO: 15241188 NR Description: expressed protein [Arabidopsis thaliana] gene_id:MCD7.7~pir||T05064~similar to unknown protein thaliana] >gi|17380898|gb|AAL36261.1| unknown protein
  misc_feature (53)..(319): Homolog of NCBI NO: 22328949 NR Description: expressed protein [Arabidopsis thaliana] expressed protein [Arabidopsis thaliana] putative protein [Arabidopsis thaliana]
  misc_feature (1)..(66): Homolog of NCBI NO: 22328949 NR Description: expressed protein [Arabidopsis thaliana] expressed protein [Arabidopsis thaliana] putative protein [Arabidopsis thaliana]
  misc_feature (1)..(313): Homolog of NCBI NO: 18405411 NR Description: expressed protein [Arabidopsis thaliana]
  misc_feature (53)..(319): Homolog of NCBI NO: 7486783 NR Description: hypothetical protein M3E9.170 - Arabidopsis >gi|2982466|emb|CAA18230.1| putative protein [Arabidopsis >gi|7269492|emb|CAB79495.1| putative protein [Arabidopsis
  misc_feature (1)..(66): Homolog of NCBI NO: 7486783 NR Description: hypothetical protein M3E9.170 - Arabidopsis >gi|2982466|emb|CAA18230.1| putative protein [Arabidopsis >gi|7269492|emb|CAB79495.1| putative protein [Arabidopsis
  misc_feature (1)..(313): Homolog of NCBI NO: 37535546 NR Description: putative zinc finger protein [Oryza sativa
  misc_feature (139)..(265): Homolog of NCBI NO: 11994207 NR Description: gene_id:MPN9.20~unknown protein [Arabidopsis
MKCPFCHSGFLEEMETARGAATDDGDGDGAVAQVHPGADRPSSIWAHAILSTVDSSARRRRNRRQQEAASDVYDWNDPEFSLRRRRVTAFLRLLHELRDRQLQRLESAAGVALEGDQLTPFGRSLFIGAAGGEHGVALGDYFLGPSLDALVQQLAENDAARHGTPPAKKEAVEAMPTVEIAGGNDGDDAASCPVCLEDYAAGERAREMPCRHRFHANCIVPWLEMHSSCPVCRFQLPATDDKSSCNGGDGGFVSVDADREGSDNGGGDGRASSRGNAELAEAEESGRRLPPSLQWLNSLFSPSAQSSGSGGSSSHHWEN

SEQ ID NO: 13218 - DNA, 1376 bp, Zea mays subsp. mays; identical to SEQ ID NO: 12530
  misc_feature (1)..(1376): Ceres Seq. ID no. 12404602
  misc_feature: MA Experiment ID: 108535 Result: Down-regulated in Transcription
  misc_feature: MA Experiment 108535 PARAMETER Experiment Name: Zm_Meristem_P Parameter: Age (day) Value: 8
  misc_feature: MA Experiment 108535 PARAMETER Experiment Name: Zm_Meristem_P Parameter: Organism Value: Zea mays
  misc_feature: MA Experiment 108535 PARAMETER Experiment Name: Zm_Meristem_P Parameter: Plant Line Value: 35A19
  misc_feature: MA Experiment 108535 PARAMETER Experiment Name: Zm_Meristem_P Parameter: Tissue Value: Root Meristem vs. Above Root Meristem

SEQ ID NO: 13219 - protein, 264 aa, Zea mays subsp. mays; identical to SEQ ID NO: 12531
  peptide (1)..(264): Ceres Seq. ID no. 12404603
  misc_feature (12)..(87): Homolog of NCBI NO: 34913714 NR Description: putative peroxidase [Oryza sativa (japonica >gi|20146478|dbj|BAB89258.1| putative peroxidase [Oryza sativa
  misc_feature (15)..(87): Homolog of NCBI NO: 7453853 NR Description: peroxidase prx14 precursor [Spinacia oleracea]
  misc_feature (11)..(87): Homolog of NCBI NO: 7453855 NR Description: peroxidase prx15 precursor [Spinacia oleracea]
  misc_feature (41)..(87): Homolog of NCBI NO: 7658147 NR Description: peroxidase [Asparagus officinalis]
  misc_feature (15)..(87): Homolog of NCBI NO: 34903044 NR Description: unnamed protein product [Oryza sativa (japonica group)] >gi|7242902|dbj|BAA92500.1| unnamed protein product
  misc_feature (11)..(87): Homolog of NCBI NO: 25044849 NR Description: peroxidase [Ananas comosus]
  misc_feature (11)..(87): Homolog of NCBI NO: 15239370 NR Description: peroxidase, putative; protein id: At5g66390.1 thaliana] >gi|26397792|sp|Q9FJZ9|PE72_ARATH Peroxidase 72 (Atperox P72) (PRXR8) (ATP6a) >gi|10177520|dbj|BAB10915.1|
  misc_feature (11)..(87): Homolog of NCBI NO: 1402918 NR Description: peroxidase [Arabidopsis thaliana]
  misc_feature (37)..(87): Homolog of NCBI NO: 7453851 NR Description: peroxidase prx13 precursor [Spinacia oleracea]
  misc_feature (37)..(87): Homolog of NCBI NO: 15234394 NR Description: peroxidase, putative; protein id: At4g36430.1, by cDNA: gi_17530561, supported by cDNA: gi_18377685 [Arabidopsis
  misc_feature (12)..(87): Homolog of NCBI NO: 34913714 NR Description: putative peroxidase [Oryza sativa (japonica >gi|20146478|dbj|BAB89258.1| putative peroxidase [Oryza sativa
  misc_feature (15)..(87): Homolog of NCBI NO: 7453853 NR Description: peroxidase prx14 precursor [Spinacia oleracea]
  misc_feature (11)..(87): Homolog of NCBI NO: 7453855 NR Description: peroxidase prx15 precursor [Spinacia oleracea]
  misc_feature (41)..(87): Homolog of NCBI NO: 7658147 NR Description: peroxidase [Asparagus officinalis]
  misc_feature (15)..(87): Homolog of NCBI NO: 34903044 NR Description: unnamed protein product [Oryza sativa (japonica group)] >gi|7242902|dbj|BAA92500.1| unnamed protein product
  misc_feature (11)..(87): Homolog of NCBI NO: 25044849 NR Description: peroxidase [Ananas comosus]
  misc_feature (11)..(87): Homolog of NCBI NO: 15239370 NR Description: peroxidase, putative; protein id: At5g66390.1 thaliana] >gi|26397792|sp|Q9FJZ9|PE72_ARATH Peroxidase 72 (Atperox P72) (PRXR8) (ATP6a) >gi|10177520|dbj|BAB10915.1|
  misc_feature (11)..(87): Homolog of NCBI NO: 1402918 NR Description: peroxidase [Arabidopsis thaliana]
  misc_feature (37)..(87): Homolog of NCBI NO: 7453851 NR Description: peroxidase prx13 precursor [Spinacia oleracea]
  misc_feature (37)..(87): Homolog of NCBI NO: 15234394 NR Description: peroxidase, putative; protein id: At4g36430.1, by cDNA: gi_17530561, supported by cDNA: gi_18377685 [Arabidopsis

SEQ ID NO: 13220 - protein, 212 aa, Zea mays subsp. mays; identical to SEQ ID NO: 12532
  peptide (1)..(212): Ceres Seq. ID no. 12404604
  misc_feature (1)..(35): Homolog of NCBI NO: 34913714 NR Description: putative peroxidase [Oryza sativa (japonica >gi|20146478|dbj|BAB89258.1| putative peroxidase [Oryza sativa
  misc_feature (1)..(35): Homolog of NCBI NO: 7453853 NR Description: peroxidase prx14 precursor [Spinacia oleracea]
  misc_feature (1)..(35): Homolog of NCBI NO: 7453855 NR Description: peroxidase prx15 precursor [Spinacia oleracea]
  misc_feature (1)..(35): Homolog of NCBI NO: 7658147 NR Description: peroxidase [Asparagus officinalis]
  misc_feature (1)..(35): Homolog of NCBI NO: 34903044 NR Description: unnamed protein product [Oryza sativa (japonica group)] >gi|7242902|dbj|BAA92500.1| unnamed protein product
  misc_feature (1)..(35): Homolog of NCBI NO: 25044849 NR Description: peroxidase [Ananas comosus]
  misc_feature (1)..(35): Homolog of NCBI NO: 15239370 NR Description: peroxidase, putative; protein id: At5g66390.1 thaliana] >gi|26397792|sp|Q9FJZ9|PE72_ARATH Peroxidase 72 (Atperox P72) (PRXR8) (ATP6a) >gi|10177520|dbj|BAB10915.1|
  misc_feature (1)..(35): Homolog of NCBI NO: 1402918 NR Description: peroxidase [Arabidopsis thaliana]
  misc_feature (1)..(35): Homolog of NCBI NO: 7453851 NR Description: peroxidase prx13 precursor [Spinacia oleracea]
  misc_feature (1)..(35): Homolog of NCBI NO: 15234394 NR Description: peroxidase, putative; protein id: At4g36430.1, by cDNA: gi_17530561, supported by cDNA: gi_18377685 [Arabidopsis
  misc_feature (1)..(35): Homolog of NCBI NO: 34913714 NR Description: putative peroxidase [Oryza sativa (japonica >gi|20146478|dbj|BAB89258.1| putative peroxidase [Oryza sativa
  misc_feature (1)..(35): Homolog of NCBI NO: 7453853 NR Description: peroxidase prx14 precursor [Spinacia oleracea]
  misc_feature (1)..(35): Homolog of NCBI NO: 7453855 NR Description: peroxidase prx15 precursor [Spinacia oleracea]
  misc_feature (1)..(35): Homolog of NCBI NO: 7658147 NR Description: peroxidase [Asparagus officinalis]
  misc_feature (1)..(35): Homolog of NCBI NO: 34903044 NR Description: unnamed protein product [Oryza sativa (japonica group)] >gi|7242902|dbj|BAA92500.1| unnamed protein product
  misc_feature (1)..(35): Homolog of NCBI NO: 25044849 NR Description: peroxidase [Ananas comosus]
  misc_feature (1)..(35): Homolog of NCBI NO: 15239370 NR Description: peroxidase, putative; protein id: At5g66390.1 thaliana] >gi|26397792|sp|Q9FJZ9|PE72_ARATH Peroxidase 72 (Atperox P72) (PRXR8) (ATP6a) >gi|10177520|dbj|BAB10915.1|
  misc_feature (1)..(35): Homolog of NCBI NO: 1402918 NR Description: peroxidase [Arabidopsis thaliana]
  misc_feature (1)..(35): Homolog of NCBI NO: 7453851 NR Description: peroxidase prx13 precursor [Spinacia oleracea]
  misc_feature (1)..(35): Homolog of NCBI NO: 15234394 NR Description: peroxidase, putative; protein id: At4g36430.1, by cDNA: gi_17530561, supported by cDNA: gi_18377685 [Arabidopsis

SEQ ID NO: 13221 - protein, 194 aa, Zea mays subsp. mays; identical to SEQ ID NO: 12533
  peptide (1)..(194): Ceres Seq. ID no. 12404605
  misc_feature (1)..(17): Homolog of NCBI NO: 34913714 NR Description: putative peroxidase [Oryza sativa (japonica >gi|20146478|dbj|BAB89258.1| putative peroxidase [Oryza sativa
  misc_feature (1)..(17): Homolog of NCBI NO: 7453853 NR Description: peroxidase prx14 precursor [Spinacia oleracea]
  misc_feature (1)..(17): Homolog of NCBI NO: 7453855 NR Description: peroxidase prx15 precursor [Spinacia oleracea]
  misc_feature (1)..(17): Homolog of NCBI NO: 7658147 NR Description: peroxidase [Asparagus officinalis]
  misc_feature (1)..(17): Homolog of NCBI NO: 34903044 NR Description: unnamed protein product [Oryza sativa (japonica group)] >gi|7242902|dbj|BAA92500.1| unnamed protein product
  misc_feature (1)..(17): Homolog of NCBI NO: 25044849 NR Description: peroxidase [Ananas comosus]
  misc_feature (1)..(17): Homolog of NCBI NO: 15239370 NR Description: peroxidase, putative; protein id: At5g66390.1 thaliana] >gi|26397792|sp|Q9FJZ9|PE72_ARATH Peroxidase 72 (Atperox P72) (PRXR8) (ATP6a) >gi|10177520|dbj|BAB10915.1|
  misc_feature (1)..(17): Homolog of NCBI NO: 1402918 NR Description: peroxidase [Arabidopsis thaliana]
  misc_feature (1)..(17): Homolog of NCBI NO: 7453851 NR Description: peroxidase prx13 precursor [Spinacia oleracea]
  misc_feature (1)..(17): Homolog of NCBI NO: 15234394 NR Description: peroxidase, putative; protein id: At4g36430.1, by cDNA: gi_17530561, supported by cDNA: gi_18377685 [Arabidopsis
  misc_feature (1)..(17): Homolog of NCBI NO: 34913714 NR Description: putative peroxidase [Oryza sativa (japonica >gi|20146478|dbj|BAB89258.1| putative peroxidase [Oryza sativa
  misc_feature (1)..(17): Homolog of NCBI NO: 7453853 NR Description: peroxidase prx14 precursor [Spinacia oleracea]
  misc_feature (1)..(17): Homolog of NCBI NO: 7453855 NR Description: peroxidase prx15 precursor [Spinacia oleracea]
  misc_feature (1)..(17): Homolog of NCBI NO: 7658147 NR Description: peroxidase [Asparagus officinalis]
  misc_feature (1)..(17): Homolog of NCBI NO: 34903044 NR Description: unnamed protein product [Oryza sativa (japonica group)] >gi|7242902|dbj|BAA92500.1| unnamed protein product
  misc_feature (1)..(17): Homolog of NCBI NO: 25044849 NR Description: peroxidase [Ananas comosus]
  misc_feature (1)..(17): Homolog of NCBI NO: 15239370 NR Description: peroxidase, putative; protein id: At5g66390.1 thaliana] >gi|26397792|sp|Q9FJZ9|PE72_ARATH Peroxidase 72 (Atperox P72) (PRXR8) (ATP6a) >gi|10177520|dbj|BAB10915.1|
  misc_feature (1)..(17): Homolog of NCBI NO: 1402918 NR Description: peroxidase [Arabidopsis thaliana]
  misc_feature (1)..(17): Homolog of NCBI NO: 7453851 NR Description: peroxidase prx13 precursor [Spinacia oleracea]
  misc_feature (1)..(17): Homolog of NCBI NO: 15234394 NR Description: peroxidase, putative; protein id: At4g36430.1, by cDNA: gi_17530561, supported by cDNA: gi_18377685 [Arabidopsis

SEQ ID NO: 13222 - DNA, 1393 bp, Zea mays subsp. mays
  misc_feature (1)..(1393): Ceres Seq. ID no. 12351858
  misc_feature: MA Experiment ID: 108527 Result: Up-regulated in Transcription
  misc_feature: MA Experiment 108527 PARAMETER Experiment Name: Zm_5mM_NO_P Parameter: Age (day) Value: 8
  misc_feature: MA Experiment 108527 PARAMETER Experiment Name: Zm_5mM_NO_P Parameter: Organism Value: Zea mays
  misc_feature: MA Experiment 108527 PARAMETER Experiment Name: Zm_5mM_NO_P Parameter: Plant Line Value: 35A19
  misc_feature: MA Experiment 108527 PARAMETER Experiment Name: Zm_5mM_NO_P Parameter: Timepoint (hr) Value: 6
  misc_feature: MA Experiment 108527 PARAMETER Experiment Name: Zm_5mM_NO_P Parameter: Tissue Value: Aerial
  misc_feature: MA Experiment 108527 PARAMETER Experiment Name: Zm_5mM_NO_P Parameter: Treatment Value: 5mM NO vs. No Treatment
  misc_feature: MA Experiment ID: 20000492 Result: Up-regulated in Transcription
  misc_feature: MA Experiment 20000492 PARAMETER Experiment Name: Zm_Hybrid_Seed_Dev_P Parameter: DAP Value: 12
  misc_feature: MA Experiment 20000492 PARAMETER Experiment Name: Zm_Hybrid_Seed_Dev_P Parameter: Organism Value: Zea mays
  misc_feature: MA Experiment 20000492 PARAMETER Experiment Name: Zm_Hybrid_Seed_Dev_P Parameter: Plant Line Value: 35A19
  misc_feature: MA Experiment 20000492 PARAMETER Experiment Name: Zm_Hybrid_Seed_Dev_P Parameter: Tissue Value: Fert Kernel vs. Unfert Floret
aagggtggccagctagccgaagaaacacccagacgaagcggccgtttttggcatctcgtatgtgcaacttcgctggaaccctcctcgactgattttaccgcacagcagaaaaggagataaaacacgacaaaaattgaaggaaaacgcattcacatcttctcttcgtccgccgccgccgcctctcttcattggtagcaccttaatccgaccccagtccagcccgccgccatggaggcgctgacggccacggacaaatgcttctccccggccagggcgatgttcccgatgccgattgtgaggccacctgcatcaccagaccatgccagtcagtatctggaggacttgttgcaggagcaacagaagctcgggccattcgtgcaggtgctcccaatctgcggcaggctgttgaatcaagagataatgagaacatcaaacctgctttctaactttggagttagaggaaatgagaggttgccaccaattgcaagtccgaaccacatgcatccattgccccggggacctgatttctgtggaaacggtttcggtccatggaatgagatgcatcctgagagaagtggttttcctaggggagccatgggttggcaaggtgctgtacagaaccattcctcctacattgtcaagaagatcgtgcgattggaagttccaacagatgcttaccccaattttaacttcattggccgtttgcttgggccgaggggacactcactaaagagaatcgaagctactacaggttgccgtgttttcatcagagggaaaggctccataaaagatcctgtgaaagaggaacagctcaagggaagacctggctatgaacacttggatgatccaacacatatcttgattgaggccgaattacctgctgatgttattgatgctagactggcacaagcacaggagatactagaggagtcgctgaaaccagtggatgagtcacaagacaacatcaagagacaacaacttcgagaacttgccatgttgaactctgtatatcgagagggtagcctgcatcagaacggcagcgcctctccgttcagcaatggggcacaaaacagtgacagggaggagattcagctctgatccttcccggaaactctcgcgttagtcctgctctcatgacagacatagcttctctgatgctcaagctcccgtgatggtattggaattcatgccattgctaactggtgaattttgatatcccttgtgacattgacctgcggatgagaagactagcgagaaaaaactcccccatggctgtgtacttaggatatttcgtttattgcttgcgcccactattagtgcagagatgtctaagttctagtattttgagctctttgattatctataaagttatgactccgcaaaatatttgatt

SEQ ID NO: 13223 - protein, 289 aa, Zea mays subsp. mays
  peptide (1)..(289): Ceres Seq. ID no. 12351859
  misc_feature (142)..(197): Pfam Name: KH domain Pfam Description: KH domain
  misc_feature (1)..(279): Homolog of NCBI NO: 34909270 NR Description: P0454H12.18 [Oryza sativa (japonica
  misc_feature (11)..(278): Homolog of NCBI NO: 34900448 NR Description: contains EST C27129(C51039)~similar to
  misc_feature (11)..(279): Homolog of NCBI NO: 12322716 NR Description: unknown protein; 28504-31237 [Arabidopsis
  misc_feature (11)..(279): Homolog of NCBI NO: 30680583 NR Description: KH domain protein [Arabidopsis thaliana]
  misc_feature (1)..(280): Homolog of NCBI NO: 15224909 NR Description: KH domain protein; protein id: At2g38610.1, by cDNA: gi_14596032, supported by cDNA: gi_17473661, supported
  misc_feature (1)..(278): Homolog of NCBI NO: 40645104 NR Description: hypothetical protein [Nicotiana tabacum]
  misc_feature (34)..(286): Homolog of NCBI NO: 15241136 NR Description: KH domain protein; protein id: At5g56140.1
  misc_feature (34)..(286): Homolog of NCBI NO: 19424087 NR Description: putative RNA-binding protein [Arabidopsis
  misc_feature (34)..(277): Homolog of NCBI NO: 15236738 NR Description: KH domain protein; protein id: At4g26480.1
  misc_feature (34)..(277): Homolog of NCBI NO: 20268733 NR Description: unknown protein [Arabidopsis thaliana]
MEALTATDKCFSPARAMFPMPIVRPPASPDHASQYLEDLLQEQQKLGPFVQVLPICGRLLNQEIMRTSNLLSNFGVRGNERLPPIASPNHMHPLPRGPDFCGNGFGPWNEMHPERSGFPRGAMGWQGAVQNHSSYIVKKIVRLEVPTDAYPNFNFIGRLLGPRGHSLKRIEATTGCRVFIRGKGSIKDPVKEEQLKGRPGYEHLDDPTHILIEAELPADVIDARLAQAQEILEESLKPVDESQDNIKRQQLRELAMLNSVYREGSLHQNGSASPFSNGAQNSDREEIQL

SEQ ID NO: 13224 - protein, 273 aa, Zea mays subsp. mays
  peptide (1)..(273): Ceres Seq. ID no. 12351860
  misc_feature (126)..(181): Pfam Name: KH domain Pfam Description: KH domain
  misc_feature (1)..(263): Homolog of NCBI NO: 34909270 NR Description: P0454H12.18 [Oryza sativa (japonica
  misc_feature (1)..(262): Homolog of NCBI NO: 34900448 NR Description: contains EST C27129(C51039)~similar to
  misc_feature (1)..(263): Homolog of NCBI NO: 12322716 NR Description: unknown protein; 28504-31237 [Arabidopsis
  misc_feature (1)..(263): Homolog of NCBI NO: 30680583 NR Description: KH domain protein [Arabidopsis thaliana]
  misc_feature (1)..(264): Homolog of NCBI NO: 15224909 NR Description: KH domain protein; protein id: At2g38610.1, by cDNA: gi_14596032, supported by cDNA: gi_17473661, supported
  misc_feature (1)..(262): Homolog of NCBI NO: 40645104 NR Description: hypothetical protein [Nicotiana tabacum]
  misc_feature (18)..(270): Homolog of NCBI NO: 15241136 NR Description: KH domain protein; protein id: At5g56140.1
  misc_feature (18)..(270): Homolog of NCBI NO: 19424087 NR Description: putative RNA-binding protein [Arabidopsis
  misc_feature (18)..(261): Homolog of NCBI NO: 15236738 NR Description: KH domain protein; protein id: At4g26480.1
  misc_feature (18)..(261): Homolog of NCBI NO: 20268733 NR Description: unknown protein [Arabidopsis thaliana]
MFPMPIVRPPASPDHASQYLEDLLQEQQKLGPFVQVLPICGRLLNQEIMRTSNLLSNFGVRGNERLPPIASPNHMHPLPRGPDFCGNGFGPWNEMHPERSGFPRGAMGWQGAVQNHSSYIVKKIVRLEVPTDAYPNFNFIGRLLGPRGHSLKRIEATTGCRVFIRGKGSIKDPVKEEQLKGRPGYEHLDDPTHILIEAELPADVIDARLAQAQEILEESLKPVDESQDNIKRQQLRELAMLNSVYREGSLHQNGSASPFSNGAQNSDREEIQL

SEQ ID NO: 13225 - protein, 270 aa, Zea mays subsp. mays
  peptide (1)..(270): Ceres Seq. ID no. 12351861
  misc_feature (123)..(178): Pfam Name: KH domain Pfam Description: KH domain
  misc_feature (1)..(260): Homolog of NCBI NO: 34909270 NR Description: P0454H12.18 [Oryza sativa (japonica
  misc_feature (1)..(259): Homolog of NCBI NO: 34900448 NR Description: contains EST C27129(C51039)~similar to
  misc_feature (1)..(260): Homolog of NCBI NO: 12322716 NR Description: unknown protein; 28504-31237 [Arabidopsis
  misc_feature (1)..(260): Homolog of NCBI NO: 30680583 NR Description: KH domain protein [Arabidopsis thaliana]
  misc_feature (1)..(261): Homolog of NCBI NO: 15224909 NR Description: KH domain protein; protein id: At2g38610.1, by cDNA: gi_14596032, supported by cDNA: gi_17473661, supported
  misc_feature (1)..(259): Homolog of NCBI NO: 40645104 NR Description: hypothetical protein [Nicotiana tabacum]
  misc_feature (15)..(267): Homolog of NCBI NO: 15241136 NR Description: KH domain protein; protein id: At5g56140.1
  misc_feature (15)..(267): Homolog of NCBI NO: 19424087 NR Description: putative RNA-binding protein [Arabidopsis
  misc_feature (15)..(258): Homolog of NCBI NO: 15236738 NR Description: KH domain protein; protein id: At4g26480.1
  misc_feature (15)..(258): Homolog of NCBI NO: 20268733 NR Description: unknown protein [Arabidopsis thaliana]
MPIVRPPASPDHASQYLEDLLQEQQKLGPFVQVLPICGRLLNQEIMRTSNLLSNFGVRGNERLPPIASPNHMHPLPRGPDFCGNGFGPWNEMHPERSGFPRGAMGWQGAVQNHSSYIVKKIVRLEVPTDAYPNFNFIGRLLGPRGHSLKRIEATTGCRVFIRGKGSIKDPVKEEQLKGRPGYEHLDDPTHILIEAELPADVIDARLAQAQEILEESLKPVDESQDNIKRQQLRELAMLNSVYREGSLHQNGSASPFSNGAQNSDREEIQL

SEQ ID NO: 13226 - DNA, 1475 bp, Zea mays subsp. mays
  misc_feature (1)..(1475): Ceres Seq. ID no. 12352669
  misc_feature: MA Experiment ID: 108503 Result: Up-regulated in Transcription
  misc_feature: MA Experiment 108503 PARAMETER Experiment Name: Zm_Drought_P Parameter: Age (day) Value: 8
  misc_feature: MA Experiment 108503 PARAMETER Experiment Name: Zm_Drought_P Parameter: Organism Value: Zea mays
  misc_feature: MA Experiment 108503 PARAMETER Experiment Name: Zm_Drought_P Parameter: Plant Line Value: 35A19
  misc_feature: MA Experiment 108503 PARAMETER Experiment Name: Zm_Drought_P Parameter: Timepoint (hr) Value: 6
  misc_feature: MA Experiment 108503 PARAMETER Experiment Name: Zm_Drought_P Parameter: Tissue Value: Aerial
  misc_feature: MA Experiment 108503 PARAMETER Experiment Name: Zm_Drought_P Parameter: Treatment Value: Drought vs. No Drought
  misc_feature: MA Experiment ID: 108504 Result: Up-regulated in Transcription
  misc_feature: MA Experiment 108504 PARAMETER Experiment Name: Zm_Drought_P Parameter: Age (day) Value: 8
  misc_feature: MA Experiment 108504 PARAMETER Experiment Name: Zm_Drought_P Parameter: Organism Value: Zea mays
  misc_feature: MA Experiment 108504 PARAMETER Experiment Name: Zm_Drought_P Parameter: Plant Line Value: 35A19
  misc_feature: MA Experiment 108504 PARAMETER Experiment Name: Zm_Drought_P Parameter: Timepoint (hr) Value: 12
  misc_feature: MA Experiment 108504 PARAMETER Experiment Name: Zm_Drought_P Parameter: Tissue Value: Aerial
  misc_feature: MA Experiment 108504 PARAMETER Experiment Name: Zm_Drought_P Parameter: Treatment Value: Drought vs. No Drought
  misc_feature: MA Experiment ID: 108522 Result: Up-regulated in Transcription
  misc_feature: MA Experiment 108522 PARAMETER Experiment Name: Zm_42deg_Heat_P Parameter: Age (day) Value: 8
  misc_feature: MA Experiment 108522 PARAMETER Experiment Name: Zm_42deg_Heat_P Parameter: Organism Value: Zea mays
  misc_feature: MA Experiment 108522 PARAMETER Experiment Name: Zm_42deg_Heat_P Parameter: Plant Line Value: 35A19
  misc_feature: MA Experiment 108522 PARAMETER Experiment Name: Zm_42deg_Heat_P Parameter: Temperature (deg C) Value: 42 vs. 22
  misc_feature: MA Experiment 108522 PARAMETER Experiment Name: Zm_42deg_Heat_P Parameter: Timepoint (hr) Value: 1
  misc_feature: MA Experiment 108522 PARAMETER Experiment Name: Zm_42deg_Heat_P Parameter: Tissue Value: Aerial
  misc_feature: MA Experiment ID: 108527 Result: Up-regulated in Transcription
  misc_feature: MA Experiment 108527 PARAMETER Experiment Name: Zm_5mM_NO_P Parameter: Age (day) Value: 8
  misc_feature: MA Experiment 108527 PARAMETER Experiment Name: Zm_5mM_NO_P Parameter: Organism Value: Zea mays
  misc_feature: MA Experiment 108527 PARAMETER Experiment Name: Zm_5mM_NO_P Parameter: Plant Line Value: 35A19
  misc_feature: MA Experiment 108527 PARAMETER Experiment Name: Zm_5mM_NO_P Parameter: Timepoint (hr) Value: 6
  misc_feature: MA Experiment 108527 PARAMETER Experiment Name: Zm_5mM_NO_P Parameter: Tissue Value: Aerial
  misc_feature: MA Experiment 108527 PARAMETER Experiment Name: Zm_5mM_NO_P Parameter: Treatment Value: 5mM NO vs. No Treatment
  misc_feature: MA Experiment ID: 108540 Result: Up-regulated in Transcription
  misc_feature: MA Experiment 108540 PARAMETER Experiment Name: Zm_20percent_PEG_P Parameter: Age (day) Value: 8
  misc_feature: MA Experiment 108540 PARAMETER Experiment Name: Zm_20percent_PEG_P Parameter: Organism Value: Zea mays
  misc_feature: MA Experiment 108540 PARAMETER Experiment Name: Zm_20percent_PEG_P Parameter: Plant Line Value: 35A19
  misc_feature: MA Experiment 108540 PARAMETER Experiment Name: Zm_20percent_PEG_P Parameter: Timepoint (hr) Value: 6
  misc_feature: MA Experiment 108540 PARAMETER Experiment Name: Zm_20percent_PEG_P Parameter: Tissue Value: Aerial
  misc_feature: MA Experiment 108540 PARAMETER Experiment Name: Zm_20percent_PEG_P Parameter: Treatment Value: 20percent PEG vs. No Treatment
  misc_feature: MA Experiment ID: 108543 Result: Down-regulated in Transcription
  misc_feature: MA Experiment ID: 108546 Result: Up-regulated in Transcription
  misc_feature: MA Experiment 108546 PARAMETER Experiment Name: Zm_Imbibed_Seeds_P Parameter: Age (day) Value: 3 vs. 2
  misc_feature: MA Experiment 108546 PARAMETER Experiment Name: Zm_Imbibed_Seeds_P Parameter: Organism Value: Zea mays
  misc_feature: MA Experiment 108546 PARAMETER Experiment Name: Zm_Imbibed_Seeds_P Parameter: Plant Line Value: 35A19
  misc_feature: MA Experiment 108546 PARAMETER Experiment Name: Zm_Imbibed_Seeds_P Parameter: Tissue Value: Roots vs. Embryo
  misc_feature: MA Experiment ID: 108556 Result: Up-regulated in Transcription
  misc_feature: MA Experiment 108556 PARAMETER Experiment Name: Zm_Drought_P Parameter: Age (day) Value: 9
  misc_feature: MA Experiment 108556 PARAMETER Experiment Name: Zm_Drought_P Parameter: Organism Value: Zea mays
  misc_feature: MA Experiment 108556 PARAMETER Experiment Name: Zm_Drought_P Parameter: Plant Line Value: 35A19
  misc_feature: MA Experiment 108556 PARAMETER Experiment Name: Zm_Drought_P Parameter: Timepoint (hr) Value: 24
  misc_feature: MA Experiment 108556 PARAMETER Experiment Name: Zm_Drought_P Parameter: Tissue Value: Aerial
  misc_feature: MA Experiment 108556 PARAMETER Experiment Name: Zm_Drought_P Parameter: Treatment Value: Drought vs. No Drought
  misc_feature: MA Experiment ID: 108688 Result: Down-regulated in Transcription
  misc_feature: MA Experiment 108688 PARAMETER Experiment Name: Zm_Embryos-Flowers__P Parameter: Tissue Value: Immature Flowers vs. Aerial+
  misc_feature: MA Experiment ID: 108689 Result: Up-regulated in Transcription
  misc_feature: MA Experiment 108689 PARAMETER Experiment Name: Zm_Drought_Roots_P Parameter: Age (day) Value: 9
  misc_feature: MA Experiment 108689 PARAMETER Experiment Name: Zm_Drought_Roots_P Parameter: Organism Value: Zea mays
  misc_feature: MA Experiment 108689 PARAMETER Experiment Name: Zm_Drought_Roots_P Parameter: Plant Line Value: 35A19
  misc_feature: MA Experiment 108689 PARAMETER Experiment Name: Zm_Drought_Roots_P Parameter: Timepoint (hr) Value: 24
  misc_feature: MA Experiment 108689 PARAMETER Experiment Name: Zm_Drought_Roots_P Parameter: Tissue Value: Roots
  misc_feature: MA Experiment 108689 PARAMETER Experiment Name: Zm_Drought_Roots_P Parameter: Treatment Value: Drought vs. No Drought
  misc_feature: MA Experiment ID: 20000477 Result: Up-regulated in Transcription
  misc_feature: MA Experiment 20000477 PARAMETER Experiment Name: Zm_5mM_SA_P Parameter: Age (day) Value: 10
  misc_feature: MA Experiment 20000477 PARAMETER Experiment Name: Zm_5mM_SA_P Parameter: Organism Value: Zea mays
  misc_feature: MA Experiment 20000477 PARAMETER Experiment Name: Zm_5mM_SA_P Parameter: Plant Line Value: 35A19
  misc_feature: MA Experiment 20000477 PARAMETER Experiment Name: Zm_5mM_SA_P Parameter: Timepoint (hr) Value: 48
  misc_feature: MA Experiment 20000477 PARAMETER Experiment Name: Zm_5mM_SA_P Parameter: Tissue Value: Aerial
  misc_feature: MA Experiment 20000477 PARAMETER Experiment Name: Zm_5mM_SA_P Parameter: Treatment Value: 5mM SA vs. No Treatment
  misc_feature: MA Experiment ID: 20000478 Result: Up-regulated in Transcription
  misc_feature: MA Experiment 20000478 PARAMETER Experiment Name: Zm_5mM_SA_P Parameter: Age (day) Value: 11
  misc_feature: MA Experiment 20000478 PARAMETER Experiment Name: Zm_5mM_SA_P Parameter: Organism Value: Zea mays
  misc_feature: MA Experiment 20000478 PARAMETER Experiment Name: Zm_5mM_SA_P Parameter: Plant Line Value: 35A19
  misc_feature: MA Experiment 20000478 PARAMETER Experiment Name: Zm_5mM_SA_P Parameter: Timepoint (hr) Value: 72
  misc_feature: MA Experiment 20000478 PARAMETER Experiment Name: Zm_5mM_SA_P Parameter: Tissue Value: Aerial
  misc_feature: MA Experiment 20000478 PARAMETER Experiment Name: Zm_5mM_SA_P Parameter: Treatment Value: 5mM SA vs. No Treatment
  misc_feature: MA Experiment ID: 20000480 Result: Up-regulated in Transcription
  misc_feature: MA Experiment 20000480 PARAMETER Experiment Name: Zm_Drought_P Parameter: Age (day) Value: 11
  misc_feature: MA Experiment 20000480 PARAMETER Experiment Name: Zm_Drought_P Parameter: Organism Value: Zea mays
  misc_feature: MA Experiment 20000480 PARAMETER Experiment Name: Zm_Drought_P Parameter: Plant Line Value: 35A19
  misc_feature: MA Experiment 20000480 PARAMETER Experiment Name: Zm_Drought_P Parameter: Timepoint (hr) Value: 72
  misc_feature: MA Experiment 20000480 PARAMETER Experiment Name: Zm_Drought_P Parameter: Tissue Value: Aerial
  misc_feature: MA Experiment 20000480 PARAMETER Experiment Name: Zm_Drought_P Parameter: Treatment Value: Drought vs. No Drought
  misc_feature: MA Experiment ID: 20000487 Result: Down-regulated in Transcription
  misc_feature: MA Experiment 20000487 PARAMETER Experiment Name: Zm_50mM_NH4NO3_L_to_H_P Parameter: Organism Value: Zea mays
  misc_feature: MA Experiment 20000487 PARAMETER Experiment Name: Zm_50mM_NH4NO3_L_to_H_P Parameter: Timepoint (hr) Value: 4
  misc_feature: MA Experiment 20000487 PARAMETER Experiment Name: Zm_50mM_NH4NO3_L_to_H_P Parameter: Tissue Value: Leaves
  misc_feature: MA Experiment 20000487 PARAMETER Experiment Name: Zm_50mM_NH4NO3_L_to_H_P Parameter: Treatment Value: 50mM NH4NO3 vs. 100mM Mannitol
  misc_feature: MA Experiment ID: 20000492 Result: Up-regulated in Transcription
  misc_feature: MA Experiment 20000492 PARAMETER Experiment Name: Zm_Hybrid_Seed_Dev_P Parameter: DAP Value: 12
  misc_feature: MA Experiment 20000492 PARAMETER Experiment Name: Zm_Hybrid_Seed_Dev_P Parameter: Organism Value: Zea mays
  misc_feature: MA Experiment 20000492 PARAMETER Experiment Name: Zm_Hybrid_Seed_Dev_P Parameter: Plant Line Value: 35A19
  misc_feature: MA Experiment 20000492 PARAMETER Experiment Name: Zm_Hybrid_Seed_Dev_P Parameter: Tissue Value: Fert Kernel vs. Unfert Floret
  misc_feature: MA Experiment ID: 20000533 Result: Down-regulated in Transcription
  misc_feature: MA Experiment 20000533 PARAMETER Experiment Name: Zm_0.001percent_MeJA_P Parameter: Age (day) Value: 11
  misc_feature: MA Experiment 20000533 PARAMETER Experiment Name: Zm_0.001percent_MeJA_P Parameter: Organism Value: Zea mays
  misc_feature: MA Experiment 20000533 PARAMETER Experiment Name: Zm_0.001percent_MeJA_P Parameter: Plant Line Value: 35A19
  misc_feature: MA Experiment 20000533 PARAMETER Experiment Name: Zm_0.001percent_MeJA_P Parameter: Timepoint (hr) Value: 72
  misc_feature: MA Experiment 20000533 PARAMETER Experiment Name: Zm_0.001percent_MeJA_P Parameter: Tissue Value: Aerial
  misc_feature: MA Experiment 20000533 PARAMETER Experiment Name: Zm_0.001percent_MeJA_P Parameter: Treatment Value: 0.001percent MeJA vs. No Treatment
  misc_feature: MA Experiment ID: 20001608 Result: Up-regulated in Transcription
  misc_feature: MA Experiment 20001608 PARAMETER Experiment Name: Zm_50ppm_KNO3_L-to-H_P Parameter: Age (day) Value: 21
  misc_feature: MA Experiment 20001608 PARAMETER Experiment Name: Zm_50ppm_KNO3_L-to-H_P Parameter: Organism Value: Zea mays
  misc_feature: MA Experiment 20001608 PARAMETER Experiment Name: Zm_50ppm_KNO3_L-to-H_P Parameter: Plant Line Value: 35A19
  misc_feature: MA Experiment 20001608 PARAMETER Experiment Name: Zm_50ppm_KNO3_L-to-H_P Parameter: Timepoint (hr) Value: 48
  misc_feature: MA Experiment 20001608 PARAMETER Experiment Name: Zm_50ppm_KNO3_L-to-H_P Parameter: Tissue Value: Shoots
  misc_feature: MA Experiment 20001608 PARAMETER Experiment Name: Zm_50ppm_KNO3_L-to-H_P Parameter: Treatment Value: 50ppm KNO3 vs. 50ppm KCl
cccaagaaggcagctgctagctgagagcctccagctcaggtagtgagcaagctcctctctgccctggcctcttcttcgttcattcttgtccactcgaggactgcccgtttgacgactgctcgatcagtgtgctagctagctagagcaagagaagggctgtaagcgaggagatcgatcgagatggctttcctcaacatggagcagcagacctgggccttcacctttggtatcctaggtaacatagtctcactgatggtgtttctttcgccgctgccgacgttctaccgcgtgtaccgcaacaagtcgacggaggggttccagtcgacgccgtacgtggtgaccctcttcagctgcatgctgtggatcttgtacgccctgctcaagcccggcgccgagctgctggtcaccatcaacggcgtgggctgcgtcgtcgagaccgtgtacctggccatgtacctggtgtacgcgcccaaggccgcccgggtgctggcggccaagatgctgctggggctcaacgtcgccgtcttcggcctcgtcgcgctcgtcaccatgcttctctccgacgccggcctccgcgtgcacgtgctcggctggatctgcgtcagcgtctcgctcagcgtcttcgccgcgccgctcagcataatgcggcaggtgatccggaccaagagcgtggagttcatgcccatctcgctctccttcttcctggtgctcagcgcggtggtctggttcgcgtacggcgcgctgaagaaggacgtgttcgtggcgttccccaacgtgctgggcttcgtcttcggcctcgcacagatggcgctgtacatggcgtacagcaggaacaggaagcccgcggcggcgctggtgatactaccggagcagtccaaggaggaggcggccgagggcaaggccagctgcggcggcgccgaggtgcaccccatcgacatcgcggaggtccacgacctgcaggccgtggtcgtcgacgtagacgtggagcctgtcacctacgccgctgcgtccggtatggtcgacggcagtgtcggcaggcctagggcgccggagcagctggtgatcaagcccgacatggtcaccgtcattgcggcggaggcgtaggttggttaagtagtagcagagtgagtcgatatcgatctgcctacctacagtacagccgcggcggccagatgtactggcagcgttcatgcaggctcgttgacttgaccggtcgagatggttggagtagccgggccgagtagcccagacgtactggcctgtgtcatgaaccggcaagctgataacgcgagcgagagggacgttggttcatcacattcagaagacggcaagctgatagtttctgtctctaggtctgtgtgtgtgtgtctgtaatcgactccatcagcttgccgcctttcctgtcctattctgattgttttcatccattgatgccgtcgtcgcagtaataaacttggaacgaacgattccacact

SEQ ID NO: 13227 - protein, 307 aa, Zea mays subsp. mays
  peptide (1)..(307): Ceres Seq. ID no. 12352670
  misc_feature (13)..(100): Pfam Name: MtN3/saliva family Pfam Description: MtN3/saliva family
  misc_feature (12)..(282): Homolog of NCBI NO: 21593422 NR Description: senescence-associated protein (SAG29)
  misc_feature (12)..(282): Homolog of NCBI NO: 15240040 NR Description: senescence-associated protein (SAG29); protein At5g13170.1, supported by cDNA: 38843., supported by cDNA:
  misc_feature (6)..(218): Homolog of NCBI NO: 1619602 NR Description: MtN3 [Medicago truncatula]
  misc_feature (6)..(221): Homolog of NCBI NO: 14715258 NR Description: N3 like protein [Medicago truncatula]
  misc_feature (1)..(215): Homolog of NCBI NO: 15229019 NR Description: MTN3-like protein; protein id: At3g48740.1, by cDNA: gi_13605687, supported by cDNA: gi_16930410, supported
  misc_feature (10)..(222): Homolog of NCBI NO: 15237803 NR Description: MtN3-like protein; protein id: At5g23660.1, by cDNA: gi_15982722, supported by cDNA: gi_16323439, supported
  misc_feature (12)..(220): Homolog of NCBI NO: 11345413 NR Description: NEC1 [Petunia x hybrida]
  misc_feature (11)..(223): Homolog of NCBI NO: 21593109 NR Description: MtN3-like protein [Arabidopsis thaliana]
  misc_feature (11)..(223): Homolog of NCBI NO: 15241278 NR Description: MtN3-like protein; protein id: At5g50800.1,
  misc_feature (6)..(238): Homolog of NCBI NO: 15241265 NR Description: MtN3-like protein; protein id: At5g50790.1, by cDNA: 114681., supported by cDNA: gi_15450935, supported by
MAFLNMEQQTWAFTFGILGNIVSLMVFLSPLPTFYRVYRNKSTEGFQSTPYVVTLFSCMLWILYALLKPGAELLVTINGVGCVVETVYLAMYLVYAPKAARVLAAKMLLGLNVAVFGLVALVTMLLSDAGLRVHVLGWICVSVSLSVFAAPLSIMRQVIRTKSVEFMPISLSFFLVLSAVVWFAYGALKKDVFVAFPNVLGFVFGLAQMALYMAYSRNRKPAAALVILPEQSKEEAAEGKASCGGAEVHPIDIAEVHDLQAVVVDVDVEPVTYAAASGMVDGSVGRPRAPEQLVIKPDMVTVIAAEA

SEQ ID NO: 13228 - protein, 302 aa, Zea mays subsp. mays
  peptide (1)..(302): Ceres Seq. ID no. 12352671
  misc_feature (8)..(95): Pfam Name: MtN3/saliva family Pfam Description: MtN3/saliva family
  misc_feature (7)..(277): Homolog of NCBI NO: 21593422 NR Description: senescence-associated protein (SAG29)
  misc_feature (7)..(277): Homolog of NCBI NO: 15240040 NR Description: senescence-associated protein (SAG29); protein At5g13170.1, supported by cDNA: 38843., supported by cDNA:
  misc_feature (1)..(213): Homolog of NCBI NO: 1619602 NR Description: MtN3 [Medicago truncatula]
  misc_feature (1)..(216): Homolog of NCBI NO: 14715258 NR Description: N3 like protein [Medicago truncatula]
  misc_feature (1)..(210): Homolog of NCBI NO: 15229019 NR Description: MTN3-like protein; protein id: At3g48740.1, by cDNA: gi_13605687, supported by cDNA: gi_16930410, supported
  misc_feature (5)..(217): Homolog of NCBI NO: 15237803 NR Description: MtN3-like protein; protein id: At5g23660.1, by cDNA: gi_15982722, supported by cDNA: gi_16323439, supported
  misc_feature (7)..(215): Homolog of NCBI NO: 11345413 NR Description: NEC1 [Petunia x hybrida]
  misc_feature (6)..(218): Homolog of NCBI NO: 21593109 NR Description: MtN3-like protein [Arabidopsis thaliana]
  misc_feature (6)..(218): Homolog of NCBI NO: 15241278 NR Description: MtN3-like protein; protein id: At5g50800.1,
  misc_feature (1)..(233): Homolog of NCBI NO: 15241265 NR Description: MtN3-like protein; protein id: At5g50790.1, by cDNA: 114681., supported by cDNA: gi_15450935, supported by
MEQQTWAFTFGILGNIVSLMVFLSPLPTFYRVYRNKSTEGFQSTPYVVTLFSCMLWILYALLKPGAELLVTINGVGCVVETVYLAMYLVYAPKAARVLAAKMLLGLNVAVFGLVALVTMLLSDAGLRVHVLGWICVSVSLSVFAAPLSIMRQVIRTKSVEFMPISLSFFLVLSAVVWFAYGALKKDVFVAFPNVLGFVFGLAQMALYMAYSRNRKPAAALVILPEQSKEEAAEGKASCGGAEVHPIDIAEVHDLQAVVVDVDVEPVTYAAASGMVDGSVGRPRAPEQLVIKPDMVTVIAAEA

SEQ ID NO: 13229 - protein, 283 aa, Zea mays subsp. mays
  peptide (1)..(283): Ceres Seq. ID no. 12352672
  misc_feature (1)..(76): Pfam Name: MtN3/saliva family Pfam Description: MtN3/saliva family
  misc_feature (1)..(258): Homolog of NCBI NO: 21593422 NR Description: senescence-associated protein (SAG29)
  misc_feature (1)..(258): Homolog of NCBI NO: 15240040 NR Description: senescence-associated protein (SAG29); protein At5g13170.1, supported by cDNA: 38843., supported by cDNA:
  misc_feature (1)..(194): Homolog of NCBI NO: 1619602 NR Description: MtN3 [Medicago truncatula]
  misc_feature (1)..(197): Homolog of NCBI NO: 14715258 NR Description: N3 like protein [Medicago truncatula]
  misc_feature (1)..(191): Homolog of NCBI NO: 15229019 NR Description: MTN3-like protein; protein id: At3g48740.1, by cDNA: gi_13605687, supported by cDNA: gi_16930410, supported
  misc_feature (1)..(198): Homolog of NCBI NO: 15237803 NR Description: MtN3-like protein; protein id: At5g23660.1, by cDNA: gi_15982722, supported by cDNA: gi_16323439, supported
  misc_feature (1)..(196): Homolog of NCBI NO: 11345413 NR Description: NEC1 [Petunia x hybrida]
  misc_feature (1)..(199): Homolog of NCBI NO: 21593109 NR Description: MtN3-like protein [Arabidopsis thaliana]
  misc_feature (1)..(199): Homolog of NCBI NO: 15241278 NR Description: MtN3-like protein; protein id: At5g50800.1,
  misc_feature (1)..(214): Homolog of NCBI NO: 15241265 NR Description: MtN3-like protein; protein id: At5g50790.1, by cDNA: 114681., supported by cDNA: gi_15450935, supported by
MVFLSPLPTFYRVYRNKSTEGFQSTPYVVTLFSCMLWILYALLKPGAELLVTINGVGCVVETVYLAMYLVYAPKAARVLAAKMLLGLNVAVFGLVALVTMLLSDAGLRVHVLGWICVSVSLSVFAAPLSIMRQVIRTKSVEFMPISLSFFLVLSAVVWFAYGALKKDVFVAFPNVLGFVFGLAQMALYMAYSRNRKPAAALVILPEQSKEEAAEGKASCGGAEVHPIDIAEVHDLQAVVVDVDVEPVTYAAASGMVDGSVGRPRAPEQLVIKPDMVTVIAAEA

SEQ ID NO: 13230 - DNA, 1415 bp, Zea mays subsp. mays
  misc_feature (1)..(1415): Ceres Seq. ID no. 12358173
  misc_feature: MA Experiment ID: 20000534 Result: Down-regulated in Transcription
  misc_feature: MA Experiment 20000534 PARAMETER Experiment Name: Zm_Hybrid_Pollen_P Parameter: Age (day) Value: 8
  misc_feature: MA Experiment 20000534 PARAMETER Experiment Name: Zm_Hybrid_Pollen_P Parameter: Organism Value: Zea mays
  misc_feature: MA Experiment 20000534 PARAMETER Experiment Name: Zm_Hybrid_Pollen_P Parameter: Plant Line Value: 35A19
  misc_feature: MA Experiment 20000534 PARAMETER Experiment Name: Zm_Hybrid_Pollen_P Parameter: Tissue Value: Pollen vs. Aerial
  misc_feature: MA Experiment ID: 20000535 Result: Down-regulated in Transcription
  misc_feature: MA Experiment 20000535 PARAMETER Experiment Name: Zm_Hybrid_Seed_Dev_P Parameter: DAP Value: 30 vs. 12
  misc_feature: MA Experiment 20000535 PARAMETER Experiment Name: Zm_Hybrid_Seed_Dev_P Parameter: Organism Value: Zea mays
  misc_feature: MA Experiment 20000535 PARAMETER Experiment Name: Zm_Hybrid_Seed_Dev_P Parameter: Plant Line Value: 35A19
  misc_feature: MA Experiment 20000535 PARAMETER Experiment Name: Zm_Hybrid_Seed_Dev_P Parameter: Tissue Value: Embryo vs. Unfert Floret
acggccgaccttatgtgacagttcgggcaccgacgtccgtctccgtacttccggctgtgtgcgaaactgcgaacgcgtgatatctccgcgtacgcaaacgcgacgcgaaggtcagcacggacaactctacccctccgcctcgaccctgaccccccacctcgtcggcgatgagttcctcttccaacggcgggaagaagccggctcccggcggcggccgcagggggtcccgccatccgcacgctcgctgacataagccgtgggcccaccggcttcccaggtgccggaggcggcgacagcggcagcgacgacgacgagccacaggaatactacaccggtggcgagaagagtggaatgcttgttcaagatccaacaagaagaaatgatgtggatgcgatatttgaacaagccagacaagcgggtatcaaaggaatgcctcctcctcttgatggcgagtcttccagctctaggagctttacagggactggccgacttcttacaggggagacaatatcatctgctgcacctcaggaaccagtaccaattcgagtacgccacaatatacatttgtggaacaatggctttagtgtggatgatggtccactgagatactacgacgatcctgaaaatgcagagttccttgagagccttaagatgtcaaagtgccccaaggagctggtgcctactgatggagaacatgttgatgcgtctgttattagaaggatggaagattacagggaacctgtaaggcctcgatcagctttccagggtgttggaagaacccttggtggtggaccttccccagatgagagcgcaacagctgctcctgcatcagcggcccctgctgcttcgaggtccgctggcgttgtcgtggatgactcccagccatttacgtccatacagctgaggctggctgacggcactcgcatgggtcgcccggttcaacatgcaccacaccgtgggagacatcaggtcctttatagacgcagctcggcctggagctgcaaggccttatcagctgcagacgggtttccctcccaagcagctggctgacccaacgcagaccgtggagcaagctgggcttgcaaactctgttatcatgcagaagatgtaaatgcttcggctggcaacctggggagctcggatgcatcgtactgcatcttctgaaaaccgtaatattatggttgatcatgttatcagatactgctctggtgcatcattctcagtcatggttacttacagtagcatctggtgcctcgttgggagcacaggagtttataattcatctaggaactgaagtatgctttcttgcatcactattgcatcacttttttcatttttaatattggtgttatgatatttcgtgtttccatggccgcttccttgcaagttgaagcgcgactcgcaagtcgcagcat

SEQ ID NO: 13231 - protein, 232 aa, Zea mays subsp. mays
  peptide (1)..(232): Ceres Seq. ID no. 12358174
  misc_feature (33)..(111): Pfam Name: Fibronectin type III domain Pfam Description: Fibronectin type III domain
  misc_feature (1)..(192): Homolog of NCBI NO: 15234731 NR Description: putative protein; protein id: At4g22150.1
  misc_feature (1)..(192): Homolog of NCBI NO: 7485149 NR Description: hypothetical protein - Arabidopsis thaliana phosphatase like protein [Arabidopsis thaliana]
  misc_feature (1)..(198): Homolog of NCBI NO: 13123657 NR Description: phosphatase-like protein Mtc923 [Medicago
  misc_feature (1)..(198): Homolog of NCBI NO: 13123659 NR Description: phosphatase-like protein Psc923 [Pisum sativum]
  misc_feature (1)..(192): Homolog of NCBI NO: 18414442 NR Description: phosphatase like protein; protein id:
  misc_feature (1)..(192): Homolog of NCBI NO: 15292665 NR Description: putative phosphatase [Arabidopsis thaliana]
  misc_feature (1)..(198): Homolog of NCBI NO: 7487458 NR Description: hypothetical protein T27D20.10 - Arabidopsis >gi|3377843|gb|AAC28225.1| contains similarity to rat p47 protein
  misc_feature (1)..(198): Homolog of NCBI NO: 18412499 NR Description: putative membrane trafficking factor; protein id: supported by cDNA: 1463., supported by cDNA: gi_20268691 thaliana] >gi|20268692|gb|AAM14050.1| putative membrane
  misc_feature (1)..(202): Homolog of NCBI NO: 20149635 NR Description: p47 [Homo sapiens] >gi|8979825|emb|CAB96827.1| (P47 protein) [Homo sapiens] >gi|12803909|gb|AAH02801.1|AAH02801
  misc_feature (1)..(202): Homolog of NCBI NO: 5531827 NR Description: p47 [Homo sapiens]
MLVQDPTRRNDVDAIFEQARQAGIKGMPPPLDGESSSSRSFTGTGRLLTGETISSAAPQEPVPIRVRHNIHLWNNGFSVDDGPLRYYDDPENAEFLESLKMSKCPKELVPTDGEHVDASVIRRMEDYREPVRPRSAFQGVGRTLGGGPSPDESATAAPASAAPAASRSAGVVVDDSQPFTSIQLRLADGTRMGRPVQHAPHRGRHQVLYRRSSAWSCKALSAADGFPSQAAG

SEQ ID NO: 13232 - protein, 206 aa, Zea mays subsp. mays
  peptide (1)..(206): Ceres Seq. ID no. 12358175
  misc_feature (7)..(85): Pfam Name: Fibronectin type III domain Pfam Description: Fibronectin type III domain
  misc_feature (1)..(172): Homolog of NCBI NO: 13123657 NR Description: phosphatase-like protein Mtc923 [Medicago
  misc_feature (1)..(172): Homolog of NCBI NO: 18412499 NR Description: putative membrane trafficking factor; protein id: supported by cDNA: 1463., supported by cDNA: gi_20268691 thaliana] >gi|20268692|gb|AAM14050.1| putative membrane
  misc_feature (1)..(172): Homolog of NCBI NO: 13123659 NR Description: phosphatase-like protein Psc923 [Pisum sativum]
  misc_feature (1)..(172): Homolog of NCBI NO: 7487458 NR Description: hypothetical protein T27D20.10 - Arabidopsis >gi|3377843|gb|AAC28225.1| contains similarity to rat p47 protein
  misc_feature (1)..(166): Homolog of NCBI NO: 18414442 NR Description: phosphatase like protein; protein id:
  misc_feature (1)..(166): Homolog of NCBI NO: 15292665 NR Description: putative phosphatase [Arabidopsis thaliana]
  misc_feature (1)..(166): Homolog of NCBI NO: 15234731 NR Description: putative protein; protein id: At4g22150.1
  misc_feature (1)..(166): Homolog of NCBI NO: 7485149 NR Description: hypothetical protein - Arabidopsis thaliana phosphatase like protein [Arabidopsis thaliana]
  misc_feature (1)..(176): Homolog of NCBI NO: 20149635 NR Description: p47 [Homo sapiens] >gi|8979825|emb|CAB96827.1| (P47 protein) [Homo sapiens] >gi|12803909|gb|AAH02801.1|AAH02801
  misc_feature (1)..(176): Homolog of NCBI NO: 5531827 NR Description: p47 [Homo sapiens]
MPPPLDGESSSSRSFTGTGRLLTGETISSAAPQEPVPIRVRHNIHLWNNGFSVDDGPLRYYDDPENAEFLESLKMSKCPKELVPTDGEHVDASVIRRMEDYREPVRPRSAFQGVGRTLGGGPSPDESATAAPASAAPAASRSAGVVVDDSQPFTSIQLRLADGTRMGRPVQHAPHRGRHQVLYRRSSAWSCKALSAADGFPSQAAG

SEQ ID NO: 13233 - protein, 132 aa, Zea mays subsp. mays
  peptide (1)..(132): Ceres Seq. ID no. 12358176
  misc_feature (1)..(98): Homolog of NCBI NO: 13123657 NR Description: phosphatase-like protein Mtc923 [Medicago
  misc_feature (1)..(98): Homolog of NCBI NO: 18412499 NR Description: putative membrane trafficking factor; protein id: supported by cDNA: 1463., supported by cDNA: gi_20268691 thaliana] >gi|20268692|gb|AAM14050.1| putative membrane
  misc_feature (1)..(98): Homolog of NCBI NO: 13123659 NR Description: phosphatase-like protein Psc923 [Pisum sativum]
  misc_feature (1)..(98): Homolog of NCBI NO: 7487458 NR Description: hypothetical protein T27D20.10 - Arabidopsis >gi|3377843|gb|AAC28225.1| contains similarity to rat p47 protein
  misc_feature (1)..(92): Homolog of NCBI NO: 18414442 NR Description: phosphatase like protein; protein id:
  misc_feature (1)..(92): Homolog of NCBI NO: 15292665 NR Description: putative phosphatase [Arabidopsis thaliana]
  misc_feature (1)..(92): Homolog of NCBI NO: 15234731 NR Description: putative protein; protein id: At4g22150.1
  misc_feature (1)..(92): Homolog of NCBI NO: 7485149 NR Description: hypothetical protein - Arabidopsis thaliana phosphatase like protein [Arabidopsis thaliana]
  misc_feature (1)..(102): Homolog of NCBI NO: 20149635 NR Description: p47 [Homo sapiens] >gi|8979825|emb|CAB96827.1| (P47 protein) [Homo sapiens] >gi|12803909|gb|AAH02801.1|AAH02801
  misc_feature (1)..(102): Homolog of NCBI NO: 5531827 NR Description: p47 [Homo sapiens]
MSKCPKELVPTDGEHVDASVIRRMEDYREPVRPRSAFQGVGRTLGGGPSPDESATAAPASAAPAASRSAGVVVDDSQPFTSIQLRLADGTRMGRPVQHAPHRGRHQVLYRRSSAWSCKALSAADGFPSQAAG

SEQ ID NO: 13234 - DNA, 760 bp, Zea mays subsp. mays
  misc_feature (1)..(760): Ceres Seq. ID no. 12413713
  misc_feature: MA Experiment ID: 108504 Result: Down-regulated in Transcription
  misc_feature: MA Experiment 108504 PARAMETER Experiment Name: Zm_Drought_P Parameter: Age (day) Value: 8
  misc_feature: MA Experiment 108504 PARAMETER Experiment Name: Zm_Drought_P Parameter: Organism Value: Zea mays
  misc_feature: MA Experiment 108504 PARAMETER Experiment Name: Zm_Drought_P Parameter: Plant Line Value: 35A19
  misc_feature: MA Experiment 108504 PARAMETER Experiment Name: Zm_Drought_P Parameter: Timepoint (hr) Value: 12
  misc_feature: MA Experiment 108504 PARAMETER Experiment Name: Zm_Drought_P Parameter: Tissue Value: Aerial
  misc_feature: MA Experiment 108504 PARAMETER Experiment Name: Zm_Drought_P Parameter: Treatment Value: Drought vs. No Drought
  misc_feature: MA Experiment ID: 108528 Result: Down-regulated in Transcription
  misc_feature: MA Experiment 108528 PARAMETER Experiment Name: Zm_Imbibed_Seeds_P Parameter: Age (day) Value: 5 vs. 2
  misc_feature: MA Experiment 108528 PARAMETER Experiment Name: Zm_Imbibed_Seeds_P Parameter: Organism Value: Zea mays
  misc_feature: MA Experiment 108528 PARAMETER Experiment Name: Zm_Imbibed_Seeds_P Parameter: Plant Line Value: 35A19
  misc_feature: MA Experiment 108528 PARAMETER Experiment Name: Zm_Imbibed_Seeds_P Parameter: Tissue Value: Aerial vs. Embryo
  misc_feature: MA Experiment ID: 108529 Result: Down-regulated in Transcription
  misc_feature: MA Experiment 108529 PARAMETER Experiment Name: Zm_Imbibed_Seeds_P Parameter: Age (day) Value: 5 vs. 2
  misc_feature: MA Experiment 108529 PARAMETER Experiment Name: Zm_Imbibed_Seeds_P Parameter: Organism Value: Zea mays
  misc_feature: MA Experiment 108529 PARAMETER Experiment Name: Zm_Imbibed_Seeds_P Parameter: Plant Line Value: 35A19
  misc_feature: MA Experiment 108529 PARAMETER Experiment Name: Zm_Imbibed_Seeds_P Parameter: Tissue Value: Roots vs. Embryo
  misc_feature: MA Experiment ID: 108530 Result: Down-regulated in Transcription
  misc_feature: MA Experiment 108530 PARAMETER Experiment Name: Zm_Imbibed_Seeds_P Parameter: Age (day) Value: 6 vs. 2
  misc_feature: MA Experiment 108530 PARAMETER Experiment Name: Zm_Imbibed_Seeds_P Parameter: Organism Value: Zea mays
  misc_feature: MA Experiment 108530 PARAMETER Experiment Name: Zm_Imbibed_Seeds_P Parameter: Plant Line Value: 35A19
  misc_feature: MA Experiment 108530 PARAMETER Experiment Name: Zm_Imbibed_Seeds_P Parameter: Tissue Value: Aerial vs. Embryo
  misc_feature: MA Experiment ID: 108535 Result: Up-regulated in Transcription
  misc_feature: MA Experiment 108535 PARAMETER Experiment Name: Zm_Meristem_P Parameter: Age (day) Value: 8
  misc_feature: MA Experiment 108535 PARAMETER Experiment Name: Zm_Meristem_P Parameter: Organism Value: Zea mays
  misc_feature: MA Experiment 108535 PARAMETER Experiment Name: Zm_Meristem_P Parameter: Plant Line Value: 35A19
  misc_feature: MA Experiment 108535 PARAMETER Experiment Name: Zm_Meristem_P Parameter: Tissue Value: Root Meristem vs. Above Root Meristem
  misc_feature: MA Experiment ID: 108544 Result: Down-regulated in Transcription
  misc_feature: MA Experiment ID: 108556 Result: Down-regulated in Transcription
  misc_feature: MA Experiment 108556 PARAMETER Experiment Name: Zm_Drought_P Parameter: Age (day) Value: 9
  misc_feature: MA Experiment 108556 PARAMETER Experiment Name: Zm_Drought_P Parameter: Organism Value: Zea mays
  misc_feature: MA Experiment 108556 PARAMETER Experiment Name: Zm_Drought_P Parameter: Plant Line Value: 35A19
  misc_feature: MA Experiment 108556 PARAMETER Experiment Name: Zm_Drought_P Parameter: Timepoint (hr) Value: 24
  misc_feature: MA Experiment 108556 PARAMETER Experiment Name: Zm_Drought_P Parameter: Tissue Value: Aerial
  misc_feature: MA Experiment 108556 PARAMETER Experiment Name: Zm_Drought_P Parameter: Treatment Value: Drought vs. No Drought
  misc_feature: MA Experiment ID: 20000478 Result: Down-regulated in Transcription
  misc_feature: MA Experiment 20000478 PARAMETER Experiment Name: Zm_5mM_SA_P Parameter: Age (day) Value: 11
  misc_feature: MA Experiment 20000478 PARAMETER Experiment Name: Zm_5mM_SA_P Parameter: Organism Value: Zea mays
  misc_feature: MA Experiment 20000478 PARAMETER Experiment Name: Zm_5mM_SA_P Parameter: Plant Line Value: 35A19
  misc_feature: MA Experiment 20000478 PARAMETER Experiment Name: Zm_5mM_SA_P Parameter: Timepoint (hr) Value: 72
  misc_feature: MA Experiment 20000478 PARAMETER Experiment Name: Zm_5mM_SA_P Parameter: Tissue Value: Aerial
  misc_feature: MA Experiment 20000478 PARAMETER Experiment Name: Zm_5mM_SA_P Parameter: Treatment Value: 5mM SA vs. No Treatment
  misc_feature: MA Experiment ID: 20000535 Result: Up-regulated in Transcription
  misc_feature: MA Experiment 20000535 PARAMETER Experiment Name: Zm_Hybrid_Seed_Dev_P Parameter: DAP Value: 30 vs. 12
  misc_feature: MA Experiment 20000535 PARAMETER Experiment Name: Zm_Hybrid_Seed_Dev_P Parameter: Organism Value: Zea mays
  misc_feature: MA Experiment 20000535 PARAMETER Experiment Name: Zm_Hybrid_Seed_Dev_P Parameter: Plant Line Value: 35A19
  misc_feature: MA Experiment 20000535 PARAMETER Experiment Name: Zm_Hybrid_Seed_Dev_P Parameter: Tissue Value: Embryo vs. Unfert Floret
gcacgagaccattacctagaacatcctaatcgaaaagccactgcaaccccggaacagagcgaggcgacgccgaggcacctcatctccgttgatattttcgactatttaggcgaagggaaatggcgaccgttccaggggatctgatctggcagattgtgaggaagaacaactccttcctggtgaagcagtttggcaacggcaatgccaaggtgcagttcaccaaggagcccaacaacctctacaatttacactcctacaagtactctggcttagcaaacaagaaaactgtaacgatccagccagctgctggaaaggactcggctgtggtcctctctactaccaagaccaagaagcagaacacacccgcgaagctcagccacaagtctgtgatgcgcaaggagttccgcaagatggccaaggctgtgaaaaaccaggttggcgacaactattacaggcctgatctgaccaagtcggcccttggtaggctgagctctgtgtaccgcagcctccaggttgccaagtctggtgtcaagaagaagaacaggcagcctacgcactaagcctgtgttctgtcgttggtgcccatagtctcagcttatatttatccaatgtctccaacagttttgagacttgttagaactagagcaaatcgtgttaagatgttgccgtttgtcattctatagcaagaattccatgacaaagattgcttggcacttgattgctgctttgtttgcaagctggctggccgggattacccctg

SEQ ID NO: 13235 - protein, 146 aa, Zea mays subsp. mays
  peptide (1)..(146): Ceres Seq. ID no. 12413714
  misc_feature (5)..(137): Pfam Name: Ribosomal L28e protein family Pfam Description: Ribosomal L28e protein family
  misc_feature (1)..(143): Homolog of NCBI NO: 34910390 NR Description: ribosomal protein L28-like [Oryza sativa
  misc_feature (1)..(143): Homolog of NCBI NO: 15224835 NR Description: putative ribosomal protein L28; protein id: supported by cDNA: gi_15292670, supported by cDNA: gi_19310756
  misc_feature (1)..(143): Homolog of NCBI NO: 15233567 NR Description: putative protein; protein id: At4g29410.1, by cDNA: 5426., supported by cDNA: gi_18252204 [Arabidopsis >gi|25295482|pir||B85343 hypothetical protein AT4g29410
  misc_feature (1)..(139): Homolog of NCBI NO: 20976820 NR Description: GH04183p [Drosophila melanogaster]
  misc_feature (3)..(135): Homolog of NCBI NO: 19114036 NR Description: 60s ribosomal protein L28/L44 pombe] >gi|3219966|sp|O14069|YFF6_SCHPO Probable 60S ribosomal
  misc_feature (8)..(135): Homolog of NCBI NO: 24418650 NR Description: 60S ribosomal protein L28
  misc_feature (1)..(139): Homolog of NCBI NO: 24656625 NR Description: CG12740-PA [Drosophila melanogaster]
  misc_feature (8)..(145): Homolog of NCBI NO: 13904866 NR Description: ribosomal protein L28; 60S ribosomal protein L28 sapiens] >gi|22002069|sp|P46779|RL28_HUMAN 60S ribosomal protein >gi|14603452|gb|AAH10173.1|AAH10173 Unknown (protein for
  misc_feature (1)..(139): Homolog of NCBI NO: 38047791 NR Description: similar to Drosophila melanogaster CG12740
  misc_feature (8)..(145): Homolog of NCBI NO: 38112699 NR Description: 60S ribosomal protein L28 [Hippocampus comes]
MATVPGDLIWQIVRKNNSFLVKQFGNGNAKVQFTKEPNNLYNLHSYKYSGLANKKTVTIQPAAGKDSAVVLSTTKTKKQNTPAKLSHKSVMRKEFRKMAKAVKNQVGDNYYRPDLTKSALGRLSSVYRSLQVAKSGVKKKNRQPTH

SEQ ID NO: 13236 - DNA, 1675 bp, Zea mays subsp. mays; identical to SEQ ID NO: 8539
  misc_feature (1)..(1675): Ceres Seq. ID no. 12545410
  misc_feature: MA Experiment ID: 108528 Result: Up-regulated in Transcription
  misc_feature: MA Experiment 108528 PARAMETER Experiment Name: Zm_Imbibed_Seeds_P Parameter: Age (day) Value: 5 vs. 2
  misc_feature: MA Experiment 108528 PARAMETER Experiment Name: Zm_Imbibed_Seeds_P Parameter: Organism Value: Zea mays
  misc_feature: MA Experiment 108528 PARAMETER Experiment Name: Zm_Imbibed_Seeds_P Parameter: Plant Line Value: 35A19
  misc_feature: MA Experiment 108528 PARAMETER Experiment Name: Zm_Imbibed_Seeds_P Parameter: Tissue Value: Aerial vs. Embryo
  misc_feature: MA Experiment ID: 108529 Result: Down-regulated in Transcription
  misc_feature: MA Experiment 108529 PARAMETER Experiment Name: Zm_Imbibed_Seeds_P Parameter: Age (day) Value: 5 vs. 2
  misc_feature: MA Experiment 108529 PARAMETER Experiment Name: Zm_Imbibed_Seeds_P Parameter: Organism Value: Zea mays
  misc_feature: MA Experiment 108529 PARAMETER Experiment Name: Zm_Imbibed_Seeds_P Parameter: Plant Line Value: 35A19
  misc_feature: MA Experiment 108529 PARAMETER Experiment Name: Zm_Imbibed_Seeds_P Parameter: Tissue Value: Roots vs. Embryo
  misc_feature: MA Experiment ID: 108530 Result: Up-regulated in Transcription
  misc_feature: MA Experiment 108530 PARAMETER Experiment Name: Zm_Imbibed_Seeds_P Parameter: Age (day) Value: 6 vs. 2
  misc_feature: MA Experiment 108530 PARAMETER Experiment Name: Zm_Imbibed_Seeds_P Parameter: Organism Value: Zea mays
  misc_feature: MA Experiment 108530 PARAMETER Experiment Name: Zm_Imbibed_Seeds_P Parameter: Plant Line Value: 35A19
  misc_feature: MA Experiment 108530 PARAMETER Experiment Name: Zm_Imbibed_Seeds_P Parameter: Tissue Value: Aerial vs. Embryo
  misc_feature: MA Experiment ID: 108535 Result: Down-regulated in Transcription
  misc_feature: MA Experiment 108535 PARAMETER Experiment Name: Zm_Meristem_P Parameter: Age (day) Value: 8
  misc_feature: MA Experiment 108535 PARAMETER Experiment Name: Zm_Meristem_P Parameter: Organism Value: Zea mays
  misc_feature: MA Experiment 108535 PARAMETER Experiment Name: Zm_Meristem_P Parameter: Plant Line Value: 35A19
  misc_feature: MA Experiment 108535 PARAMETER Experiment Name: Zm_Meristem_P Parameter: Tissue Value: Root Meristem vs. Above Root Meristem
  misc_feature: MA Experiment ID: 108536 Result: Down-regulated in Transcription
  misc_feature: MA Experiment 108536 PARAMETER Experiment Name: Zm_Meristem_P Parameter: Age (day) Value: 8
  misc_feature: MA Experiment 108536 PARAMETER Experiment Name: Zm_Meristem_P Parameter: Organism Value: Zea mays
  misc_feature: MA Experiment 108536 PARAMETER Experiment Name: Zm_Meristem_P Parameter: Plant Line Value: 35A19
  misc_feature: MA Experiment 108536 PARAMETER Experiment Name: Zm_Meristem_P Parameter: Tissue Value: Shoot Meristem vs. Above Shoot Meristem
  misc_feature: MA Experiment ID: 108545 Result: Up-regulated in Transcription
  misc_feature: MA Experiment 108545 PARAMETER Experiment Name: Zm_Imbibed_Seeds_P Parameter: Age (day) Value: 3 vs. 2
  misc_feature: MA Experiment 108545 PARAMETER Experiment Name: Zm_Imbibed_Seeds_P Parameter: Organism Value: Zea mays
  misc_feature: MA Experiment 108545 PARAMETER Experiment Name: Zm_Imbibed_Seeds_P Parameter: Plant Line Value: 35A19
  misc_feature: MA Experiment 108545 PARAMETER Experiment Name: Zm_Imbibed_Seeds_P Parameter: Tissue Value: Aerial vs. Embryo
  misc_feature: MA Experiment ID: 108546 Result: Down-regulated in Transcription
  misc_feature: MA Experiment 108546 PARAMETER Experiment Name: Zm_Imbibed_Seeds_P Parameter: Age (day) Value: 3 vs. 2
  misc_feature: MA Experiment 108546 PARAMETER Experiment Name: Zm_Imbibed_Seeds_P Parameter: Organism Value: Zea mays
  misc_feature: MA Experiment 108546 PARAMETER Experiment Name: Zm_Imbibed_Seeds_P Parameter: Plant Line Value: 35A19
  misc_feature: MA Experiment 108546 PARAMETER Experiment Name: Zm_Imbibed_Seeds_P Parameter: Tissue Value: Roots vs. Embryo
  misc_feature: MA Experiment ID: 108547 Result: Up-regulated in Transcription
  misc_feature: MA Experiment 108547 PARAMETER Experiment Name: Zm_Imbibed_Seeds_P Parameter: Age (day) Value: 4 vs. 2
  misc_feature: MA Experiment 108547 PARAMETER Experiment Name: Zm_Imbibed_Seeds_P Parameter: Organism Value: Zea mays
  misc_feature: MA Experiment 108547 PARAMETER Experiment Name: Zm_Imbibed_Seeds_P Parameter: Plant Line Value: 35A19
  misc_feature: MA Experiment 108547 PARAMETER Experiment Name: Zm_Imbibed_Seeds_P Parameter: Tissue Value: Aerial vs. Embryo
  misc_feature: MA Experiment ID: 108556 Result: Down-regulated in Transcription
  misc_feature: MA Experiment 108556 PARAMETER Experiment Name: Zm_Drought_P Parameter: Age (day) Value: 9
  misc_feature: MA Experiment 108556 PARAMETER Experiment Name: Zm_Drought_P Parameter: Organism Value: Zea mays
  misc_feature: MA Experiment 108556 PARAMETER Experiment Name: Zm_Drought_P Parameter: Plant Line Value: 35A19
  misc_feature: MA Experiment 108556 PARAMETER Experiment Name: Zm_Drought_P Parameter: Timepoint (hr) Value: 24
  misc_feature: MA Experiment 108556 PARAMETER Experiment Name: Zm_Drought_P Parameter: Tissue Value: Aerial
  misc_feature: MA Experiment 108556 PARAMETER Experiment Name: Zm_Drought_P Parameter: Treatment Value: Drought vs. No Drought
  misc_feature: MA Experiment ID: 108597 Result: Down-regulated in Transcription
  misc_feature: MA Experiment 108597 PARAMETER Experiment Name: Zm_100uM_ABA_P Parameter: Age (day) Value: 9
  misc_feature: MA Experiment 108597 PARAMETER Experiment Name: Zm_100uM_ABA_P Parameter: Organism Value: Zea mays
  misc_feature: MA Experiment 108597 PARAMETER Experiment Name: Zm_100uM_ABA_P Parameter: Plant Line Value: 35A19
  misc_feature: MA Experiment 108597 PARAMETER Experiment Name: Zm_100uM_ABA_P Parameter: Timepoint (hr) Value: 24
  misc_feature: MA Experiment 108597 PARAMETER Experiment Name: Zm_100uM_ABA_P Parameter: Tissue Value: Aerial
  misc_feature: MA Experiment 108597 PARAMETER Experiment Name: Zm_100uM_ABA_P Parameter: Treatment Value: 100uM ABA vs. No Treatment
  misc_feature: MA Experiment ID: 108687 Result: Down-regulated in Transcription
  misc_feature: MA Experiment 108687 PARAMETER Experiment Name: Zm_Embryos-Flowers__P Parameter: Tissue Value: Embryo vs. Aerial+
  misc_feature: MA Experiment ID: 20000477 Result: Down-regulated in Transcription
  misc_feature: MA Experiment 20000477 PARAMETER Experiment Name: Zm_5mM_SA_P Parameter: Age (day) Value: 10
  misc_feature: MA Experiment 20000477 PARAMETER Experiment Name: Zm_5mM_SA_P Parameter: Organism Value: Zea mays
  misc_feature: MA Experiment 20000477 PARAMETER Experiment Name: Zm_5mM_SA_P Parameter: Plant Line Value: 35A19
  misc_feature: MA Experiment 20000477 PARAMETER Experiment Name: Zm_5mM_SA_P Parameter: Timepoint (hr) Value: 48
  misc_feature: MA Experiment 20000477 PARAMETER Experiment Name: Zm_5mM_SA_P Parameter: Tissue Value: Aerial
  misc_feature: MA Experiment 20000477 PARAMETER Experiment Name: Zm_5mM_SA_P Parameter: Treatment Value: 5mM SA vs. No Treatment
  misc_feature: MA Experiment ID: 20000478 Result: Down-regulated in Transcription
  misc_feature: MA Experiment 20000478 PARAMETER Experiment Name: Zm_5mM_SA_P Parameter: Age (day) Value: 11
  misc_feature: MA Experiment 20000478 PARAMETER Experiment Name: Zm_5mM_SA_P Parameter: Organism Value: Zea mays
  misc_feature: MA Experiment 20000478 PARAMETER Experiment Name: Zm_5mM_SA_P Parameter: Plant Line Value: 35A19
  misc_feature: MA Experiment 20000478 PARAMETER Experiment Name: Zm_5mM_SA_P Parameter: Timepoint (hr) Value: 72
  misc_feature: MA Experiment 20000478 PARAMETER Experiment Name: Zm_5mM_SA_P Parameter: Tissue Value: Aerial
  misc_feature: MA Experiment 20000478 PARAMETER Experiment Name: Zm_5mM_SA_P Parameter: Treatment Value: 5mM SA vs. No Treatment
  misc_feature: MA Experiment ID: 20000479 Result: Down-regulated in Transcription
  misc_feature: MA Experiment 20000479 PARAMETER Experiment Name: Zm_Drought_P Parameter: Age (day) Value: 10
  misc_feature: MA Experiment 20000479 PARAMETER Experiment Name: Zm_Drought_P Parameter: Organism Value: Zea mays
  misc_feature: MA Experiment 20000479 PARAMETER Experiment Name: Zm_Drought_P Parameter: Plant Line Value: 35A19
  misc_feature: MA Experiment 20000479 PARAMETER Experiment Name: Zm_Drought_P Parameter: Timepoint (hr) Value: 48
  misc_feature: MA Experiment 20000479 PARAMETER Experiment Name: Zm_Drought_P Parameter: Tissue Value: Aerial
  misc_feature: MA Experiment 20000479 PARAMETER Experiment Name: Zm_Drought_P Parameter: Treatment Value: Drought vs. No Drought
  misc_feature: MA Experiment ID: 20000480 Result: Down-regulated in Transcription
  misc_feature: MA Experiment 20000480 PARAMETER Experiment Name: Zm_Drought_P Parameter: Age (day) Value: 11
  misc_feature: MA Experiment 20000480 PARAMETER Experiment Name: Zm_Drought_P Parameter: Organism Value: Zea mays
  misc_feature: MA Experiment 20000480 PARAMETER Experiment Name: Zm_Drought_P Parameter: Plant Line Value: 35A19
  misc_feature: MA Experiment 20000480 PARAMETER Experiment Name: Zm_Drought_P Parameter: Timepoint (hr) Value: 72
  misc_feature: MA Experiment 20000480 PARAMETER Experiment Name: Zm_Drought_P Parameter: Tissue Value: Aerial
  misc_feature: MA Experiment 20000480 PARAMETER Experiment Name: Zm_Drought_P Parameter: Treatment Value: Drought vs. No Drought
  misc_feature: MA Experiment ID: 20000534 Result: Down-regulated in Transcription
  misc_feature: MA Experiment 20000534 PARAMETER Experiment Name: Zm_Hybrid_Pollen_P Parameter: Age (day) Value: 8
  misc_feature: MA Experiment 20000534 PARAMETER Experiment Name: Zm_Hybrid_Pollen_P Parameter: Organism Value: Zea mays
  misc_feature: MA Experiment 20000534 PARAMETER Experiment Name: Zm_Hybrid_Pollen_P Parameter: Plant Line Value: 35A19
  misc_feature: MA Experiment 20000534 PARAMETER Experiment Name: Zm_Hybrid_Pollen_P Parameter: Tissue Value: Pollen vs. Aerial
  misc_feature: MA Experiment ID: 20000535 Result: Down-regulated in Transcription
  misc_feature: MA Experiment 20000535 PARAMETER Experiment Name: Zm_Hybrid_Seed_Dev_P Parameter: DAP Value: 30 vs. 12
  misc_feature: MA Experiment 20000535 PARAMETER Experiment Name: Zm_Hybrid_Seed_Dev_P Parameter: Organism Value: Zea mays
  misc_feature: MA Experiment 20000535 PARAMETER Experiment Name: Zm_Hybrid_Seed_Dev_P Parameter: Plant Line Value: 35A19
  misc_feature: MA Experiment 20000535 PARAMETER Experiment Name: Zm_Hybrid_Seed_Dev_P Parameter: Tissue Value: Embryo vs. Unfert Floret
  misc_feature: MA Experiment ID: 20000626 Result: Down-regulated in Transcription
  misc_feature: MA Experiment 20000626 PARAMETER Experiment Name: Zm_Herbicide-Treatments_P Parameter: Timepoint (hr) Value: 12
  misc_feature: MA Experiment 20000626 PARAMETER Experiment Name: Zm_Herbicide-Treatments_P Parameter: Tissue Value: Aerial
  misc_feature: MA Experiment 20000626 PARAMETER Experiment Name: Zm_Herbicide-Treatments_P Parameter: Treatment Value: Roundup vs. No Treatment

SEQ ID NO: 13237 - protein, 425 aa, Zea mays subsp. mays; identical to SEQ ID NO: 8540
  peptide (1)..(425): Ceres Seq. ID no. 12545411
  misc_feature (14)..(421): Pfam Name: Transferase family Pfam Description: Transferase family
  misc_feature (14)..(421): Pfam Name: Transferase family Pfam Description: Transferase family
  misc_feature (1)..(425): Homolog of NCBI NO: 2130139 NR Description: hypothetical protein - maize
  misc_feature (1)..(422): Homolog of NCBI NO: 38345799 NR Description: OSJNBa0085I10.16 [Oryza sativa (japonica
  misc_feature (160)..(422): Homolog of NCBI NO: 38568010 NR Description: OSJNBa0070C17.2 [Oryza sativa (japonica
  misc_feature (7)..(415): Homolog of NCBI NO: 21593424 NR Description: fatty acid elongase-like protein (cer2-like)
  misc_feature (7)..(415): Homolog of NCBI NO: 18403923 NR Description: expressed protein; protein id: At3g23840.1, by cDNA: 38849. [Arabidopsis thaliana]
  misc_feature (1)..(422): Homolog of NCBI NO: 38345799 NR Description: OSJNBa0085I10.16 [Oryza sativa (japonica
  misc_feature (7)..(415): Homolog of NCBI NO: 21593424 NR Description: fatty acid elongase-like protein (cer2-like)
  misc_feature (20)..(294): Homolog of NCBI NO: 15239747 NR Description: anthranilate N-benzoyltransferase; protein id: supported by cDNA: 114130. [Arabidopsis thaliana]
  misc_feature (35)..(407): Homolog of NCBI NO: 30017587 NR Description: unknown protein [Oryza sativa (japonica
  misc_feature (1)..(152): Homolog of NCBI NO: 38568009 NR Description: OSJNBa0070C17.1 [Oryza sativa (japonica
  misc_feature (20)..(415): Homolog of NCBI NO: 15233851 NR Description: CER2; protein id: At4g24510.1, supported by cDNA:
  misc_feature (5)..(415): Homolog of NCBI NO: 15236357 NR Description: fatty acid elongase - like protein (cer2-like); id: At4g13840.1, supported by cDNA: gi_17933316 [Arabidopsis
  misc_feature (7)..(415): Homolog of NCBI NO: 18403923 NR Description: expressed protein; protein id: At3g23840.1, by cDNA: 38849. [Arabidopsis thaliana]
  misc_feature (160)..(422): Homolog of NCBI NO: 38568010 NR Description: OSJNBa0070C17.2 [Oryza sativa (japonica
  misc_feature (1)..(425): Homolog of NCBI NO: 2130139 NR Description: hypothetical protein - maize
  misc_feature (5)..(415): Homolog of NCBI NO: 15236357 NR Description: fatty acid elongase - like protein (cer2-like); id: At4g13840.1, supported by cDNA: gi_17933316 [Arabidopsis
  misc_feature (20)..(415): Homolog of NCBI NO: 15233851 NR Description: CER2; protein id: At4g24510.1, supported by cDNA:
  misc_feature (1)..(152): Homolog of NCBI NO: 38568009 NR Description: OSJNBa0070C17.1 [Oryza sativa (japonica
  misc_feature (35)..(407): Homolog of NCBI NO: 30017587 NR Description: unknown protein [Oryza sativa (japonica
  misc_feature (20)..(294): Homolog of NCBI NO: 15239747 NR Description: anthranilate N-benzoyltransferase; protein id: supported by cDNA: 114130. [Arabidopsis thaliana]

SEQ ID NO: 13238 - protein, 356 aa, Zea mays subsp. mays; identical to SEQ ID NO: 8541
  peptide (1)..(356): Ceres Seq. ID no. 12545412
  misc_feature (1)..(352): Pfam Name: Transferase family Pfam Description: Transferase family
  misc_feature (1)..(352): Pfam Name: Transferase family Pfam Description: Transferase family
  misc_feature (1)..(356): Homolog of NCBI NO: 2130139 NR Description: hypothetical protein - maize
  misc_feature (1)..(353): Homolog of NCBI NO: 38345799 NR Description: OSJNBa0085I10.16 [Oryza sativa (japonica
  misc_feature (91)..(353): Homolog of NCBI NO: 38568010 NR Description: OSJNBa0070C17.2 [Oryza sativa (japonica
  misc_feature (1)..(346): Homolog of NCBI NO: 21593424 NR Description: fatty acid elongase-like protein (cer2-like)
  misc_feature (1)..(346): Homolog of NCBI NO: 18403923 NR Description: expressed protein; protein id: At3g23840.1, by cDNA: 38849. [Arabidopsis thaliana]
  misc_feature (1)..(353): Homolog of NCBI NO: 38345799 NR Description: OSJNBa0085I10.16 [Oryza sativa (japonica
  misc_feature (1)..(346): Homolog of NCBI NO: 21593424 NR Description: fatty acid elongase-like protein (cer2-like)
  misc_feature (1)..(225): Homolog of NCBI NO: 15239747 NR Description: anthranilate N-benzoyltransferase; protein id: supported by cDNA: 114130. [Arabidopsis thaliana]
  misc_feature (1)..(338): Homolog of NCBI NO: 30017587 NR Description: unknown protein [Oryza sativa (japonica
  misc_feature (1)..(83): Homolog of NCBI NO: 38568009 NR Description: OSJNBa0070C17.1 [Oryza sativa (japonica
  misc_feature (1)..(346): Homolog of NCBI NO: 15233851 NR Description: CER2; protein id: At4g24510.1, supported by cDNA:
  misc_feature (1)..(346): Homolog of NCBI NO: 15236357 NR Description: fatty acid elongase - like protein (cer2-like); id: At4g13840.1, supported by cDNA: gi_17933316 [Arabidopsis
  misc_feature (1)..(346): Homolog of NCBI NO: 18403923 NR Description: expressed protein; protein id: At3g23840.1, by cDNA: 38849. [Arabidopsis thaliana]
  misc_feature (91)..(353): Homolog of NCBI NO: 38568010 NR Description: OSJNBa0070C17.2 [Oryza sativa (japonica
  misc_feature (1)..(356): Homolog of NCBI NO: 2130139 NR Description: hypothetical protein - maize
  misc_feature (1)..(346): Homolog of NCBI NO: 15236357 NR Description: fatty acid elongase - like protein (cer2-like); id: At4g13840.1, supported by cDNA: gi_17933316 [Arabidopsis
  misc_feature (1)..(346): Homolog of NCBI NO: 15233851 NR Description: CER2; protein id: At4g24510.1, supported by cDNA:
  misc_feature (1)..(83): Homolog of NCBI NO: 38568009 NR Description: OSJNBa0070C17.1 [Oryza sativa (japonica
  misc_feature (1)..(338): Homolog of NCBI NO: 30017587 NR Description: unknown protein [Oryza sativa (japonica
  misc_feature (1)..(225): Homolog of NCBI NO: 15239747 NR Description: anthranilate N-benzoyltransferase; protein id: supported by cDNA: 114130. [Arabidopsis thaliana]

SEQ ID NO: 13239 - protein, 310 aa, Zea mays subsp. mays; identical to SEQ ID NO: 8542
  peptide (1)..(310): Ceres Seq. ID no. 12545413
  misc_feature (1)..(306): Pfam Name: Transferase family Pfam Description: Transferase family
  misc_feature (1)..(306): Pfam Name: Transferase family Pfam Description: Transferase family
  misc_feature (1)..(310): Homolog of NCBI NO: 2130139 NR Description: hypothetical protein - maize
  misc_feature (1)..(307): Homolog of NCBI NO: 38345799 NR Description: OSJNBa0085I10.16 [Oryza sativa (japonica
  misc_feature (45)..(307): Homolog of NCBI NO: 38568010 NR Description: OSJNBa0070C17.2 [Oryza sativa (japonica
  misc_feature (1)..(300): Homolog of NCBI NO: 21593424 NR Description: fatty acid elongase-like protein (cer2-like)
  misc_feature (1)..(300): Homolog of NCBI NO: 18403923 NR Description: expressed protein; protein id: At3g23840.1, by cDNA: 38849. [Arabidopsis thaliana]
  misc_feature (1)..(300): Homolog of NCBI NO: 15236357 NR Description: fatty acid elongase - like protein (cer2-like); id: At4g13840.1, supported by cDNA: gi_17933316 [Arabidopsis
  misc_feature (1)..(307): Homolog of NCBI NO: 38345799 NR Description: OSJNBa0085I10.16 [Oryza sativa (japonica
  misc_feature (1)..(37): Homolog of NCBI NO: 38568009 NR Description: OSJNBa0070C17.1 [Oryza sativa (japonica
  misc_feature (1)..(300): Homolog of NCBI NO: 15233851 NR Description: CER2; protein id: At4g24510.1, supported by cDNA:
  misc_feature (1)..(300): Homolog of NCBI NO: 15236357 NR Description: fatty acid elongase - like protein (cer2-like); id: At4g13840.1, supported by cDNA: gi_17933316 [Arabidopsis
  misc_feature (1)..(300): Homolog of NCBI NO: 18403923 NR Description: expressed protein; protein id: At3g23840.1, by cDNA: 38849. [Arabidopsis thaliana]
  misc_feature (1)..(300): Homolog of NCBI NO: 21593424 NR Description: fatty acid elongase-like protein (cer2-like)
  misc_feature (45)..(307): Homolog of NCBI NO: 38568010 NR Description: OSJNBa0070C17.2 [Oryza sativa (japonica
  misc_feature (1)..(310): Homolog of NCBI NO: 2130139 NR Description: hypothetical protein - maize
  misc_feature (1)..(300): Homolog of NCBI NO: 15233851 NR Description: CER2; protein id: At4g24510.1, supported by cDNA:
  misc_feature (1)..(37): Homolog of NCBI NO: 38568009 NR Description: OSJNBa0070C17.1 [Oryza sativa (japonica
  misc_feature (1)..(292): Homolog of NCBI NO: 30017587 NR Description: unknown protein [Oryza sativa (japonica
  misc_feature (1)..(179): Homolog of NCBI NO: 15239747 NR Description: anthranilate N-benzoyltransferase; protein id: supported by cDNA: 114130. [Arabidopsis thaliana]
  misc_feature (1)..(292): Homolog of NCBI NO: 30017587 NR Description: unknown protein [Oryza sativa (japonica
  misc_feature (1)..(179): Homolog of NCBI NO: 15239747 NR Description: anthranilate N-benzoyltransferase; protein id: supported by cDNA: 114130. [Arabidopsis thaliana]

SEQ ID NO: 13240 - DNA, 1077 bp, Zea mays subsp. mays
  misc_feature (1)..(1077): Ceres Seq. ID no. 13495185
  misc_feature: MA Experiment ID: 20000492 Result: Down-regulated in Transcription
  misc_feature: MA Experiment 20000492 PARAMETER Experiment Name: Zm_Hybrid_Seed_Dev_P Parameter: DAP Value: 12
  misc_feature: MA Experiment 20000492 PARAMETER Experiment Name: Zm_Hybrid_Seed_Dev_P Parameter: Organism Value: Zea mays
  misc_feature: MA Experiment 20000492 PARAMETER Experiment Name: Zm_Hybrid_Seed_Dev_P Parameter: Plant Line Value: 35A19
  misc_feature: MA Experiment 20000492 PARAMETER Experiment Name: Zm_Hybrid_Seed_Dev_P Parameter: Tissue Value: Fert Kernel vs. Unfert Floret
  misc_feature: MA Experiment ID: 20000535 Result: Down-regulated in Transcription
  misc_feature: MA Experiment 20000535 PARAMETER Experiment Name: Zm_Hybrid_Seed_Dev_P Parameter: DAP Value: 30 vs. 12
  misc_feature: MA Experiment 20000535 PARAMETER Experiment Name: Zm_Hybrid_Seed_Dev_P Parameter: Organism Value: Zea mays
  misc_feature: MA Experiment 20000535 PARAMETER Experiment Name: Zm_Hybrid_Seed_Dev_P Parameter: Plant Line Value: 35A19
  misc_feature: MA Experiment 20000535 PARAMETER Experiment Name: Zm_Hybrid_Seed_Dev_P Parameter: Tissue Value: Embryo vs. Unfert Floret
cccccactgtcgccgctcctcgtcttccactctctccactttgctgcttcttctcccttattaatgctcgtgggctcctatgatccgccctccgccgcgggtttcttgatccatccccggcccaaggaagcggaccccggcgaacactcctgacagattcgcccgtccgccgctccctcgattcggtcctccccgtcagcggcaggtgtttaggacctctgcagcatagcatctggtccgtccctggagatgtccggcgtacaggagcagttcgagatcaagttccggctgccggacggcaccgacatcggacccaggcggttcccgccggcgtccaccgtcgccacgctcaaggagaccatcatcgcccagtggcccaaagataaggaaaaaggtcctaggactgtgaatgatcttaagcttattaatgctgggaagatactggagaacaacaaaaccctatcagaatgcaaaagcccgatttgcgacttctctgcgatgacaacaatgcatgtcgtcatccgcgcaccgacttcaagcaaacagtctgataaaagagcagaaaagaaagcgaaaaatttcaggtgcggttgtgccattatgtgacagcattgtgaatagtagcagagagaacgtggccatttcagttttctccctttttttttcctgctctcgctggagtgttgtattatgttcgaggcgctttctcctttcattttgttttgaagtaccgcgtgcaagcttcaacagctgtcaagtgccctttaatcgtgagtgtgcatcaagcacagaattagaaggcggttggctgctaattacccttaatcttgagtttgtcaagcacacaatttgaaggcagtcattagcgtcgaaactacgatgtccaccctatccaatcttccatggtttcacgcttctcttctatatttatgctaccctgggtgacaaatgtttaatgtatgccttccatgctagatgaactttttggaacgccattctaactcatcaatttctattctgtaaaactaaaaccagttgtaatctgccatagatcagtatgcttgctatatgggagtc

SEQ ID NO: 13241 - protein, 118 aa, Zea mays subsp. mays
  peptide (1)..(118): Ceres Seq. ID no. 13495186
  misc_feature (9)..(94): Pfam Name: Ubiquitin family Pfam Description: Ubiquitin family
  misc_feature (1)..(118): Homolog of NCBI NO: 18417680 NR Description: expressed protein [Arabidopsis thaliana] expressed protein [Arabidopsis thaliana] NTGP5 [Arabidopsis thaliana] >gi|28973721|gb|AAO64177.1| unknown
  misc_feature (1)..(118): Homolog of NCBI NO: 15219188 NR Description: ubiquitin family [Arabidopsis thaliana] unknown protein [Arabidopsis thaliana]
  misc_feature (1)..(98): Homolog of NCBI NO: 11358132 NR Description: hypothetical protein T20K14_70 - Arabidopsis >gi|9755801|emb|CAC01745.1| putative protein [Arabidopsis
  misc_feature (1)..(118): Homolog of NCBI NO: 15232032 NR Description: ubiquitin family [Arabidopsis thaliana]
  misc_feature (4)..(118): Homolog of NCBI NO: 4097587 NR Description: NTGP5 [Nicotiana tabacum]
  misc_feature (1)..(100): Homolog of NCBI NO: 25402954 NR Description: protein F2E2.12 [imported] - Arabidopsis thaliana
  misc_feature (3)..(118): Homolog of NCBI NO: 21592966 NR Description: ubiquitin-fusion protein, putative [Arabidopsis
  misc_feature (3)..(118): Homolog of NCBI NO: 15218145 NR Description: expressed protein [Arabidopsis thaliana]
  misc_feature (6)..(118): Homolog of NCBI NO: 38347220 NR Description: OSJNBa0055C08.14 [Oryza sativa (japonica
  misc_feature (5)..(118): Homolog of NCBI NO: 22331362 NR Description: ubiquitin family [Arabidopsis thaliana]
MSGVQEQFEIKFRLPDGTDIGPRRFPPASTVATLKETIIAQWPKDKEKGPRTVNDLKLINAGKILENNKTLSECKSPICDFSAMTTMHVVIRAPTSSKQSDKRAEKKAKNFRCGCAIM

SEQ ID NO: 13242 - protein, 113 aa, Zea mays subsp. mays
  peptide (1)..(113): Ceres Seq. ID no. 13495187
MSSSAHRLQANSLIKEQKRKRKISGAVVPLCDSIVNSSRENVAISVFSLFFSCSRWSVVLCSRRFLLSFCFEVPRASFNSCQVPFNRECASSTELEGGWLLITLNLEFVKHTI

SEQ ID NO: 13243 - DNA, 1406 bp, Zea mays subsp. mays
  misc_feature (1)..(1406): Ceres Seq. ID no. 12352673
  misc_feature: MA Experiment ID: 108523 Result: Up-regulated in Transcription
  misc_feature: MA Experiment 108523 PARAMETER Experiment Name: Zm_42deg_Heat_P Parameter: Age (day) Value: 8
  misc_feature: MA Experiment 108523 PARAMETER Experiment Name: Zm_42deg_Heat_P Parameter: Organism Value: Zea mays
  misc_feature: MA Experiment 108523 PARAMETER Experiment Name: Zm_42deg_Heat_P Parameter: Plant Line Value: 35A19
  misc_feature: MA Experiment 108523 PARAMETER Experiment Name: Zm_42deg_Heat_P Parameter: Temperature (deg C) Value: 42 vs. 22
  misc_feature: MA Experiment 108523 PARAMETER Experiment Name: Zm_42deg_Heat_P Parameter: Timepoint (hr) Value: 6
  misc_feature: MA Experiment 108523 PARAMETER Experiment Name: Zm_42deg_Heat_P Parameter: Tissue Value: Aerial
  misc_feature: MA Experiment ID: 108527 Result: Up-regulated in Transcription
  misc_feature: MA Experiment 108527 PARAMETER Experiment Name: Zm_5mM_NO_P Parameter: Age (day) Value: 8
  misc_feature: MA Experiment 108527 PARAMETER Experiment Name: Zm_5mM_NO_P Parameter: Organism Value: Zea mays
  misc_feature: MA Experiment 108527 PARAMETER Experiment Name: Zm_5mM_NO_P Parameter: Plant Line Value: 35A19
  misc_feature: MA Experiment 108527 PARAMETER Experiment Name: Zm_5mM_NO_P Parameter: Timepoint (hr) Value: 6
  misc_feature: MA Experiment 108527 PARAMETER Experiment Name: Zm_5mM_NO_P Parameter: Tissue Value: Aerial
  misc_feature: MA Experiment 108527 PARAMETER Experiment Name: Zm_5mM_NO_P Parameter: Treatment Value: 5mM NO vs. No Treatment
  misc_feature: MA Experiment ID: 108530 Result: Up-regulated in Transcription
  misc_feature: MA Experiment 108530 PARAMETER Experiment Name: Zm_Imbibed_Seeds_P Parameter: Age (day) Value: 6 vs. 2
  misc_feature: MA Experiment 108530 PARAMETER Experiment Name: Zm_Imbibed_Seeds_P Parameter: Organism Value: Zea mays
  misc_feature: MA Experiment 108530 PARAMETER Experiment Name: Zm_Imbibed_Seeds_P Parameter: Plant Line Value: 35A19
  misc_feature: MA Experiment 108530 PARAMETER Experiment Name: Zm_Imbibed_Seeds_P Parameter: Tissue Value: Aerial vs. Embryo
  misc_feature: MA Experiment ID: 108687 Result: Up-regulated in Transcription
  misc_feature: MA Experiment 108687 PARAMETER Experiment Name: Zm_Embryos-Flowers__P Parameter: Tissue Value: Embryo vs. Aerial+
aaacaccgccgcccccacatctatccacccgcccgcccgtccgtccgttcgttcgtctccacgcgcaaacgagagagagaaggctaggtcgtcgtcgtcgtgaggcggagagatctgggaggaggaggagcgatggacgggaagctacccccgccgaacccgaacctgccgtaccgggaggactgctggagcgagggcgagacggcggcgctcgtcgacgcctggggctcgcgctacctcgacctcaaccgcgggagcctccgccagccgcagtggcgggaggtcgccgacgccgtcaactcccgcccgggggcctccgcgcgcggccgcccgccgcgcaccgacatccagtgcaagaaccgcgtcgacacgctcaagaagaagtacaaggccgagcgcgcgcgcggcgggccgtcgccgtggtccttctacggccagctcgacatcctcgtcgggcccacgctcaacggcaccaagaaaccgtccccgccgcgcgccgcgctgcccgtgttccggaggcgccagacgccgccgcgctccccgtcgccgcaatcgccgccgccgcttcccgtggccctcccgctgcacaattaccgccgtggctccgacctcccttccgcaaacttcatccataagggccgccgcggcggccgccgccgccgccgccgccgcggagtccgactcggaagatggctacaacaacaacgagtacgacgatgacgaaggctctcagcagtcgccgtcacgttctgtatcttctcgctccggtggtgctcctgctgttggcaccaagaggaagatgcgcagcgggagcggtggattcggggagctagcgagggcaatcgagaccttcgcggatatgtacgagcgcatggaagcggccaagcagcgacacgcggaggagatggagaggcagcgaatcaagttcctcaaggatctggagctgaagcggatgcggtcttttgtggacatgcagctgcagctttcgagggcaaagcacgccaggaagggtgatgcttcctcggagatgctcatgtctctcgctgcactgcccttcctcagcagctctgcttatctttaagggcatgttcggttagggatggattcttccatcccctcaatccacccctatccgaacaagcttaaattggaagaatttggtaaatgaatattttgaccttcaattaggaatttaggatacagtgagttggttgctgtgctagacttgttcgtggattgtttgtgtttcctaagatactgtaatttttcatacgaaccatggaggtattgcaggtcttcaaaatttaaatgtaccttgcaatgcattatgcccaagttttttcttagatggaatgaaatttactggtttacaacacttactgtcagtgtaatacgaatctcatctc

SEQ ID NO: 13244 - protein, 210 aa, Zea mays subsp. mays
  peptide (1)..(210): Ceres Seq. ID no. 12352674
TPPPPHLSTRPPVRPFVRLHAQTRERRLGRRRREAERSGRRRSDGREATPAEPEPAVPGGLLERGRDGGARRRLGLALPRPQPREPPPAAVAGGRRRRQLPPGGLRARPPAAHRHPVQEPRRHAQEEVQGRARARRAVAVVLLRPARHPRRAHAQRHQETVPAARRAARVPEAPDAAALPVAAIAAAASRGPPAAQLPPWLRPPFRKLHP

SEQ ID NO: 13245 - protein, 195 aa, Zea mays subsp. mays
  peptide (1)..(195): Ceres Seq. ID no. 12352675
  misc_feature (1)..(166): Homolog of NCBI NO: 34911060 NR Description: putative 6b-interacting protein 1 [Oryza sativa
  misc_feature (5)..(146): Homolog of NCBI NO: 18149189 NR Description: 6b-interacting protein 1 [Nicotiana tabacum]
  misc_feature (15)..(119): Homolog of NCBI NO: 18414919 NR Description: putative protein; protein id: At5g05550.1, by cDNA: gi_15010667, supported by cDNA: gi_16974318 [Arabidopsis >gi|15010668|gb|AAK73993.1| AT5g05550/MOP10_9 [Arabidopsis
  misc_feature (15)..(119): Homolog of NCBI NO: 10178132 NR Description: gb|AAF01512.1~gene_id:MOP10.9~similar to unknown
  misc_feature (15)..(119): Homolog of NCBI NO: 30680994 NR Description: expressed protein [Arabidopsis thaliana]
  misc_feature (8)..(160): Homolog of NCBI NO: 11357442 NR Description: hypothetical protein F14P22.220 - Arabidopsis >gi|6735380|emb|CAB68201.1| putative protein [Arabidopsis
  misc_feature (8)..(160): Homolog of NCBI NO: 30694843 NR Description: expressed protein [Arabidopsis thaliana] unknown protein [Arabidopsis thaliana]
  misc_feature (15)..(111): Homolog of NCBI NO: 6016685 NR Description: hypothetical protein [Arabidopsis thaliana]
  misc_feature (15)..(111): Homolog of NCBI NO: 21537288 NR Description: unknown [Arabidopsis thaliana]
  misc_feature (15)..(111): Homolog of NCBI NO: 18399118 NR Description: expressed protein; protein id: At3g11100.1, by cDNA: 126401., supported by cDNA: gi_17381250 [Arabidopsis >gi|17381251|gb|AAL36044.1| AT3g11100/F11B9_105 [Arabidopsis
MDGKLPPPNPNLPYREDCWSEGETAALVDAWGSRYLDLNRGSLRQPQWREVADAVNSRPGASARGRPPRTDIQCKNRVDTLKKKYKAERARGGPSPWSFYGQLDILVGPTLNGTKKPSPPRAALPVFRRRQTPPRSPSPQSPPPLPVALPLHNYRRGSDLPSANFIHKGRRGGRRRRRRRGVRLGRWLQQQRVRR

SEQ ID NO: 13246 - DNA, 1100 bp, Zea mays subsp. mays
  misc_feature (1)..(1100): Ceres Seq. ID no. 13498885
  misc_feature: MA Experiment ID: 20000535 Result: Down-regulated in Transcription
  misc_feature: MA Experiment 20000535 PARAMETER Experiment Name: Zm_Hybrid_Seed_Dev_P Parameter: DAP Value: 30 vs. 12
  misc_feature: MA Experiment 20000535 PARAMETER Experiment Name: Zm_Hybrid_Seed_Dev_P Parameter: Organism Value: Zea mays
  misc_feature: MA Experiment 20000535 PARAMETER Experiment Name: Zm_Hybrid_Seed_Dev_P Parameter: Plant Line Value: 35A19
  misc_feature: MA Experiment 20000535 PARAMETER Experiment Name: Zm_Hybrid_Seed_Dev_P Parameter: Tissue Value: Embryo vs. Unfert Floret
caggacacggtcgccacacgacgactcccacgcgcagccaccgcacggccgtgttgccaccaaaccgcgtggcggtgttacgctcttcgcccagatcaaaatcgaatcgatcccccaacccgatcgcctcgtcgtcaaaaaatccccattcgttccccttctcgcctccacgaaccttcacaaattgccctctcagatcttctcctaatctcactcaagccctagccaaatcccagccctagcgacaccaaccagctcgccagcgaccatggggaacccggagaagctgatgaatcagatcttcgacctcaagttcacctccaagtcgctgcagcggcaggcgcgcaagtgcgagaaggaggagaaggagcagaagctcaaggtcaagaaggcgatcgagaagggcaacatggacggcgcccgcatctacgccgagaacgccatccgcaagcgcaccgagcacatgaactacctccgcctcgcctctcgcctcgacgccgtcgtggcccgcctcgacacgcaggccaagatgcaggtcatcggcaagtccatgcagtccatcgtcaagtcgctcgactccgcgctcgccaccgggaacctccagaagatgtccgagaccatggacaatttcgagcgccagttcgtcaacatggaggtccaggccgagttcatggagggcgccatggccggctccacctccctctccacgcccgagaccgaggtcaacagcctcatgcagcaggtcgcggacgactacgggctcgaggtctccgtcggtctgccgcaggcagccgcccacgccatccctgccgccaaggataaggagaaagtcgacgaggatgacctttctcgccgcctcgccgagcttaaggcccgcggctgagagggtgtttcaggctttatcagatgcgattcatgcttatgctgttgagccgcaatgacccattgtgctgtggactgctactcatgtttggtagattcgtaaatactactgttatatgcttgaagccgtgttggcattgccatgtgggtctgtgtgactcgatggaaactttgctgtcttattgtactatcaaatccaataatttgcgcgattgagg

SEQ ID NO: 13247 - protein, 204 aa, Zea mays subsp. mays
  peptide (1)..(204): Ceres Seq. ID no. 13498886
  misc_feature (9)..(179): Pfam Name: SNF7 Pfam Description: SNF7
  misc_feature (1)..(204): Homolog of NCBI NO: 30270581 NR Description: superal1 [Zea mays]
  misc_feature (1)..(204): Homolog of NCBI NO: 29367557 NR Description: development protein-like protein [Oryza sativa
  misc_feature (1)..(204): Homolog of NCBI NO: 18410249 NR Description: developmental protein DG1118 -related
  misc_feature (1)..(204): Homolog of NCBI NO: 21537090 NR Description: developmental protein, putative [Arabidopsis
  misc_feature (1)..(204): Homolog of NCBI NO: 28916459 NR Description: putative developmental protein [Nicotiana
  misc_feature (1)..(204): Homolog of NCBI NO: 15220819 NR Description: developmental protein -related [Arabidopsis >gi|21553734|gb|AAM62827.1| developmental protein, putative thaliana] >gi|26451738|dbj|BAC42964.1| unknown protein
  misc_feature (1)..(203): Homolog of NCBI NO: 25518422 NR Description: hypothetical protein F11A6.7 - Arabidopsis >gi|9802746|gb|AAF99815.1|AC034257_7 Similar to developmental
  misc_feature (1)..(201): Homolog of NCBI NO: 39644911 NR Description: CHMP1.5 protein [Homo sapiens]
  misc_feature (9)..(203): Homolog of NCBI NO: 3789911 NR Description: developmental protein DG1118 [Dictyostelium
  misc_feature (1)..(201): Homolog of NCBI NO: 17933108 NR Description: C18orf2 [Homo sapiens]
MGNPEKLMNQIFDLKFTSKSLQRQARKCEKEEKEQKLKVKKAIEKGNMDGARIYAENAIRKRTEHMNYLRLASRLDAVVARLDTQAKMQVIGKSMQSIVKSLDSALATGNLQKMSETMDNFERQFVNMEVQAEFMEGAMAGSTSLSTPETEVNSLMQQVADDYGLEVSVGLPQAAAHAIPAAKDKEKVDEDDLSRRLAELKARG

SEQ ID NO: 13248 - protein, 197 aa, Zea mays subsp. mays
  peptide (1)..(197): Ceres Seq. ID no. 13498887
  misc_feature (2)..(172): Pfam Name: SNF7 Pfam Description: SNF7
  misc_feature (1)..(197): Homolog of NCBI NO: 30270581 NR Description: superal1 [Zea mays]
  misc_feature (1)..(197): Homolog of NCBI NO: 29367557 NR Description: development protein-like protein [Oryza sativa
  misc_feature (1)..(197): Homolog of NCBI NO: 18410249 NR Description: developmental protein DG1118 -related
  misc_feature (1)..(197): Homolog of NCBI NO: 21537090 NR Description: developmental protein, putative [Arabidopsis
  misc_feature (1)..(197): Homolog of NCBI NO: 28916459 NR Description: putative developmental protein [Nicotiana
  misc_feature (1)..(197): Homolog of NCBI NO: 15220819 NR Description: developmental protein -related [Arabidopsis >gi|21553734|gb|AAM62827.1| developmental protein, putative thaliana] >gi|26451738|dbj|BAC42964.1| unknown protein
  misc_feature (1)..(196): Homolog of NCBI NO: 25518422 NR Description: hypothetical protein F11A6.7 - Arabidopsis >gi|9802746|gb|AAF99815.1|AC034257_7 Similar to developmental
  misc_feature (1)..(194): Homolog of NCBI NO: 39644911 NR Description: CHMP1.5 protein [Homo sapiens]
  misc_feature (2)..(196): Homolog of NCBI NO: 3789911 NR Description: developmental protein DG1118 [Dictyostelium
  misc_feature (1)..(194): Homolog of NCBI NO: 17933108 NR Description: C18orf2 [Homo sapiens]
MNQIFDLKFTSKSLQRQARKCEKEEKEQKLKVKKAIEKGNMDGARIYAENAIRKRTEHMNYLRLASRLDAVVARLDTQAKMQVIGKSMQSIVKSLDSALATGNLQKMSETMDNFERQFVNMEVQAEFMEGAMAGSTSLSTPETEVNSLMQQVADDYGLEVSVGLPQAAAHAIPAAKDKEKVDEDDLSRRLAELKARG

SEQ ID NO: 13249 - protein, 157 aa, Zea mays subsp. mays
  peptide (1)..(157): Ceres Seq. ID no. 13498888
  misc_feature (1)..(132): Pfam Name: SNF7 Pfam Description: SNF7
  misc_feature (1)..(157): Homolog of NCBI NO: 15220819 NR Description: developmental protein -related [Arabidopsis >gi|21553734|gb|AAM62827.1| developmental protein, putative thaliana] >gi|26451738|dbj|BAC42964.1| unknown protein
  misc_feature (1)..(156): Homolog of NCBI NO: 25518422 NR Description: hypothetical protein F11A6.7 - Arabidopsis >gi|9802746|gb|AAF99815.1|AC034257_7 Similar to developmental
  misc_feature (1)..(154): Homolog of NCBI NO: 39644911 NR Description: CHMP1.5 protein [Homo sapiens]
  misc_feature (1)..(157): Homolog of NCBI NO: 29367557 NR Description: development protein-like protein [Oryza sativa
  misc_feature (1)..(157): Homolog of NCBI NO: 21537090 NR Description: developmental protein, putative [Arabidopsis
  misc_feature (1)..(157): Homolog of NCBI NO: 28916459 NR Description: putative developmental protein [Nicotiana
  misc_feature (1)..(157): Homolog of NCBI NO: 18410249 NR Description: developmental protein DG1118 -related
  misc_feature (1)..(157): Homolog of NCBI NO: 30270581 NR Description: superal1 [Zea mays]
  misc_feature (1)..(156): Homolog of NCBI NO: 3789911 NR Description: developmental protein DG1118 [Dictyostelium
  misc_feature (1)..(154): Homolog of NCBI NO: 17933108 NR Description: C18orf2 [Homo sapiens]
MDGARIYAENAIRKRTEHMNYLRLASRLDAVVARLDTQAKMQVIGKSMQSIVKSLDSALATGNLQKMSETMDNFERQFVNMEVQAEFMEGAMAGSTSLSTPETEVNSLMQQVADDYGLEVSVGLPQAAAHAIPAAKDKEKVDEDDLSRRLAELKARG

SEQ ID NO: 13250 - DNA, 678 bp, Zea mays subsp. mays
  misc_feature (1)..(678): Ceres Seq. ID no. 12413709
  misc_feature: MA Experiment ID: 108527 Result: Down-regulated in Transcription
  misc_feature: MA Experiment 108527 PARAMETER Experiment Name: Zm_5mM_NO_P Parameter: Age (day) Value: 8
  misc_feature: MA Experiment 108527 PARAMETER Experiment Name: Zm_5mM_NO_P Parameter: Organism Value: Zea mays
  misc_feature: MA Experiment 108527 PARAMETER Experiment Name: Zm_5mM_NO_P Parameter: Plant Line Value: 35A19
  misc_feature: MA Experiment 108527 PARAMETER Experiment Name: Zm_5mM_NO_P Parameter: Timepoint (hr) Value: 6
  misc_feature: MA Experiment 108527 PARAMETER Experiment Name: Zm_5mM_NO_P Parameter: Tissue Value: Aerial
  misc_feature: MA Experiment 108527 PARAMETER Experiment Name: Zm_5mM_NO_P Parameter: Treatment Value: 5mM NO vs. No Treatment
  misc_feature: MA Experiment ID: 108528 Result: Up-regulated in Transcription
  misc_feature: MA Experiment 108528 PARAMETER Experiment Name: Zm_Imbibed_Seeds_P Parameter: Age (day) Value: 5 vs. 2
  misc_feature: MA Experiment 108528 PARAMETER Experiment Name: Zm_Imbibed_Seeds_P Parameter: Organism Value: Zea mays
  misc_feature: MA Experiment 108528 PARAMETER Experiment Name: Zm_Imbibed_Seeds_P Parameter: Plant Line Value: 35A19
  misc_feature: MA Experiment 108528 PARAMETER Experiment Name: Zm_Imbibed_Seeds_P Parameter: Tissue Value: Aerial vs. Embryo
  misc_feature: MA Experiment ID: 108530 Result: Up-regulated in Transcription
  misc_feature: MA Experiment 108530 PARAMETER Experiment Name: Zm_Imbibed_Seeds_P Parameter: Age (day) Value: 6 vs. 2
  misc_feature: MA Experiment 108530 PARAMETER Experiment Name: Zm_Imbibed_Seeds_P Parameter: Organism Value: Zea mays
  misc_feature: MA Experiment 108530 PARAMETER Experiment Name: Zm_Imbibed_Seeds_P Parameter: Plant Line Value: 35A19
  misc_feature: MA Experiment 108530 PARAMETER Experiment Name: Zm_Imbibed_Seeds_P Parameter: Tissue Value: Aerial vs. Embryo
  misc_feature: MA Experiment ID: 108534 Result: Up-regulated in Transcription
  misc_feature: MA Experiment 108534 PARAMETER Experiment Name: Zm_4deg_Cold_P Parameter: Age (hr) Value: 8
  misc_feature: MA Experiment 108534 PARAMETER Experiment Name: Zm_4deg_Cold_P Parameter: Organism Value: Zea mays
  misc_feature: MA Experiment 108534 PARAMETER Experiment Name: Zm_4deg_Cold_P Parameter: Plant Line Value: 35A19
  misc_feature: MA Experiment 108534 PARAMETER Experiment Name: Zm_4deg_Cold_P Parameter: Temperature (deg C) Value: 4 vs. 22
  misc_feature: MA Experiment 108534 PARAMETER Experiment Name: Zm_4deg_Cold_P Parameter: Timepoint (hr) Value: 6
  misc_feature: MA Experiment 108534 PARAMETER Experiment Name: Zm_4deg_Cold_P Parameter: Tissue Value: Aerial
  misc_feature: MA Experiment ID: 108536 Result: Up-regulated in Transcription
  misc_feature: MA Experiment 108536 PARAMETER Experiment Name: Zm_Meristem_P Parameter: Age (day) Value: 8
  misc_feature: MA Experiment 108536 PARAMETER Experiment Name: Zm_Meristem_P Parameter: Organism Value: Zea mays
  misc_feature: MA Experiment 108536 PARAMETER Experiment Name: Zm_Meristem_P Parameter: Plant Line Value: 35A19
  misc_feature: MA Experiment 108536 PARAMETER Experiment Name: Zm_Meristem_P Parameter: Tissue Value: Shoot Meristem vs. Above Shoot Meristem
  misc_feature: MA Experiment ID: 108540 Result: Down-regulated in Transcription
  misc_feature: MA Experiment 108540 PARAMETER Experiment Name: Zm_20percent_PEG_P Parameter: Age (day) Value: 8
  misc_feature: MA Experiment 108540 PARAMETER Experiment Name: Zm_20percent_PEG_P Parameter: Organism Value: Zea mays
  misc_feature: MA Experiment 108540 PARAMETER Experiment Name: Zm_20percent_PEG_P Parameter: Plant Line Value: 35A19
  misc_feature: MA Experiment 108540 PARAMETER Experiment Name: Zm_20percent_PEG_P Parameter: Timepoint (hr) Value: 6
  misc_feature: MA Experiment 108540 PARAMETER Experiment Name: Zm_20percent_PEG_P Parameter: Tissue Value: Aerial
  misc_feature: MA Experiment 108540 PARAMETER Experiment Name: Zm_20percent_PEG_P Parameter: Treatment Value: 20percent PEG vs. No Treatment
  misc_feature: MA Experiment ID: 108543 Result: Down-regulated in Transcription
  misc_feature: MA Experiment ID: 108544 Result: Down-regulated in Transcription
  misc_feature: MA Experiment ID: 108545 Result: Up-regulated in Transcription
  misc_feature: MA Experiment 108545 PARAMETER Experiment Name: Zm_Imbibed_Seeds_P Parameter: Age (day) Value: 3 vs. 2
  misc_feature: MA Experiment 108545 PARAMETER Experiment Name: Zm_Imbibed_Seeds_P Parameter: Organism Value: Zea mays
  misc_feature: MA Experiment 108545 PARAMETER Experiment Name: Zm_Imbibed_Seeds_P Parameter: Plant Line Value: 35A19
  misc_feature: MA Experiment 108545 PARAMETER Experiment Name: Zm_Imbibed_Seeds_P Parameter: Tissue Value: Aerial vs. Embryo
  misc_feature: MA Experiment ID: 108547 Result: Up-regulated in Transcription
  misc_feature: MA Experiment 108547 PARAMETER Experiment Name: Zm_Imbibed_Seeds_P Parameter: Age (day) Value: 4 vs. 2
  misc_feature: MA Experiment 108547 PARAMETER Experiment Name: Zm_Imbibed_Seeds_P Parameter: Organism Value: Zea mays
  misc_feature: MA Experiment 108547 PARAMETER Experiment Name: Zm_Imbibed_Seeds_P Parameter: Plant Line Value: 35A19
  misc_feature: MA Experiment 108547 PARAMETER Experiment Name: Zm_Imbibed_Seeds_P Parameter: Tissue Value: Aerial vs. Embryo
  misc_feature: MA Experiment ID: 108559 Result: Down-regulated in Transcription
  misc_feature: MA Experiment 108559 PARAMETER Experiment Name: Zm_5mM_NO_P Parameter: Age (day) Value: 8
  misc_feature: MA Experiment 108559 PARAMETER Experiment Name: Zm_5mM_NO_P Parameter: Organism Value: Zea mays
  misc_feature: MA Experiment 108559 PARAMETER Experiment Name: Zm_5mM_NO_P Parameter: Plant Line Value: 35A19
  misc_feature: MA Experiment 108559 PARAMETER Experiment Name: Zm_5mM_NO_P Parameter: Timepoint (hr) Value: 12
  misc_feature: MA Experiment 108559 PARAMETER Experiment Name: Zm_5mM_NO_P Parameter: Tissue Value: Aerial
  misc_feature: MA Experiment 108559 PARAMETER Experiment Name: Zm_5mM_NO_P Parameter: Treatment Value: 5mM NO vs. No Treatment
  misc_feature: MA Experiment ID: 108687 Result: Down-regulated in Transcription
  misc_feature: MA Experiment 108687 PARAMETER Experiment Name: Zm_Embryos-Flowers__P Parameter: Tissue Value: Embryo vs. Aerial+
  misc_feature: MA Experiment ID: 20000479 Result: Down-regulated in Transcription
  misc_feature: MA Experiment 20000479 PARAMETER Experiment Name: Zm_Drought_P Parameter: Age (day) Value: 10
  misc_feature: MA Experiment 20000479 PARAMETER Experiment Name: Zm_Drought_P Parameter: Organism Value: Zea mays
  misc_feature: MA Experiment 20000479 PARAMETER Experiment Name: Zm_Drought_P Parameter: Plant Line Value: 35A19
  misc_feature: MA Experiment 20000479 PARAMETER Experiment Name: Zm_Drought_P Parameter: Timepoint (hr) Value: 48
  misc_feature: MA Experiment 20000479 PARAMETER Experiment Name: Zm_Drought_P Parameter: Tissue Value: Aerial
  misc_feature: MA Experiment 20000479 PARAMETER Experiment Name: Zm_Drought_P Parameter: Treatment Value: Drought vs. No Drought
  misc_feature: MA Experiment ID: 20000480 Result: Down-regulated in Transcription
  misc_feature: MA Experiment 20000480 PARAMETER Experiment Name: Zm_Drought_P Parameter: Age (day) Value: 11
  misc_feature: MA Experiment 20000480 PARAMETER Experiment Name: Zm_Drought_P Parameter: Organism Value: Zea mays
  misc_feature: MA Experiment 20000480 PARAMETER Experiment Name: Zm_Drought_P Parameter: Plant Line Value: 35A19
  misc_feature: MA Experiment 20000480 PARAMETER Experiment Name: Zm_Drought_P Parameter: Timepoint (hr) Value: 72
  misc_feature: MA Experiment 20000480 PARAMETER Experiment Name: Zm_Drought_P Parameter: Tissue Value: Aerial
  misc_feature: MA Experiment 20000480 PARAMETER Experiment Name: Zm_Drought_P Parameter: Treatment Value: Drought vs. No Drought
  misc_feature: MA Experiment ID: 20000492 Result: Down-regulated in Transcription
  misc_feature: MA Experiment 20000492 PARAMETER Experiment Name: Zm_Hybrid_Seed_Dev_P Parameter: DAP Value: 12
  misc_feature: MA Experiment 20000492 PARAMETER Experiment Name: Zm_Hybrid_Seed_Dev_P Parameter: Organism Value: Zea mays
  misc_feature: MA Experiment 20000492 PARAMETER Experiment Name: Zm_Hybrid_Seed_Dev_P Parameter: Plant Line Value: 35A19
  misc_feature: MA Experiment 20000492 PARAMETER Experiment Name: Zm_Hybrid_Seed_Dev_P Parameter: Tissue Value: Fert Kernel vs. Unfert Floret
  misc_feature: MA Experiment ID: 20000535 Result: Down-regulated in Transcription
  misc_feature: MA Experiment 20000535 PARAMETER Experiment Name: Zm_Hybrid_Seed_Dev_P Parameter: DAP Value: 30 vs. 12
  misc_feature: MA Experiment 20000535 PARAMETER Experiment Name: Zm_Hybrid_Seed_Dev_P Parameter: Organism Value: Zea mays
  misc_feature: MA Experiment 20000535 PARAMETER Experiment Name: Zm_Hybrid_Seed_Dev_P Parameter: Plant Line Value: 35A19
  misc_feature: MA Experiment 20000535 PARAMETER Experiment Name: Zm_Hybrid_Seed_Dev_P Parameter: Tissue Value: Embryo vs. Unfert Floret
gtaagaaccactttcacctgaactcctgaagcaaaagcaatggccatgagagcgcttccgctgaccccttccaggagctcctcgtttggagctcaccaaaccaggccgagcggcggcggccccagatcagtgagagcttatgcgaagggagacgaggagggcgacaagcagtccctcttcggaagcatcaccgaggcgctggacttctcgcaggtccggtcggagaaggacgccgagctgctgtacgaggccagggagtccaccagaggtggagggaggatgacgagggagcagtacggagcacttaggcggaagattggtggcacctaccaggatttcttcaagtcatatgttgaagtcgacgggcaatacgtggaggagggttgggtcgacaagacctgcaagatctgcaagaaggacacaaggggggagccgaggcaggttgacaagctaggaagatacgctcacgttgcgtgcctggagaaccccaaaccgacgaactttttcgccaaaatcttcgccagatgaactatgctgcgtccgtcgaaagcgttgtctcgctcgctcgtggttagagagtacaatatataggtagtgttgttgtggcttcaaaggggacaagattgtgcacaattttccaaatggattggtatgtactgatgagcatcagcgcgttcc

SEQ ID NO: 13251 - protein, 162 aa, Zea mays subsp. mays
  peptide (1)..(162): Ceres Seq. ID no. 12413710
  misc_feature (1)..(162): Homolog of NCBI NO: 34907850 NR Description: P0031D02.12 [Oryza sativa (japonica
  misc_feature (1)..(162): Homolog of NCBI NO: 15228878 NR Description: putative protein; protein id: At3g56290.1, by cDNA: gi_17064853, supported by cDNA: gi_20148692 [Arabidopsis
MAMRALPLTPSRSSSFGAHQTRPSGGGPRSVRAYAKGDEEGDKQSLFGSITEALDFSQVRSEKDAELLYEARESTRGGGRMTREQYGALRRKIGGTYQDFFKSYVEVDGQYVEEGWVDKTCKICKKDTRGEPRQVDKLGRYAHVACLENPKPTNFFAKIFAR

SEQ ID NO: 13252 - protein, 160 aa, Zea mays subsp. mays
  peptide (1)..(160): Ceres Seq. ID no. 12413711
  misc_feature (1)..(160): Homolog of NCBI NO: 34907850 NR Description: P0031D02.12 [Oryza sativa (japonica
  misc_feature (1)..(160): Homolog of NCBI NO: 15228878 NR Description: putative protein; protein id: At3g56290.1, by cDNA: gi_17064853, supported by cDNA: gi_20148692 [Arabidopsis
MRALPLTPSRSSSFGAHQTRPSGGGPRSVRAYAKGDEEGDKQSLFGSITEALDFSQVRSEKDAELLYEARESTRGGGRMTREQYGALRRKIGGTYQDFFKSYVEVDGQYVEEGWVDKTCKICKKDTRGEPRQVDKLGRYAHVACLENPKPTNFFAKIFAR

SEQ ID NO: 13253 - protein, 82 aa, Zea mays subsp. mays
  peptide (1)..(82): Ceres Seq. ID no. 12413712
  misc_feature (1)..(82): Homolog of NCBI NO: 34907850 NR Description: P0031D02.12 [Oryza sativa (japonica
  misc_feature (1)..(82): Homolog of NCBI NO: 15228878 NR Description: putative protein; protein id: At3g56290.1, by cDNA: gi_17064853, supported by cDNA: gi_20148692 [Arabidopsis
MTREQYGALRRKIGGTYQDFFKSYVEVDGQYVEEGWVDKTCKICKKDTRGEPRQVDKLGRYAHVACLENPKPTNFFAKIFAR

SEQ ID NO: 13254 - DNA, 1806 bp, Zea mays subsp. mays
  misc_feature (1)..(1806): Ceres Seq. ID no. 12411349
  misc_feature: MA Experiment ID: 108535 Result: Up-regulated in Transcription
  misc_feature: MA Experiment 108535 PARAMETER Experiment Name: Zm_Meristem_P Parameter: Age (day) Value: 8
  misc_feature: MA Experiment 108535 PARAMETER Experiment Name: Zm_Meristem_P Parameter: Organism Value: Zea mays
  misc_feature: MA Experiment 108535 PARAMETER Experiment Name: Zm_Meristem_P Parameter: Plant Line Value: 35A19
  misc_feature: MA Experiment 108535 PARAMETER Experiment Name: Zm_Meristem_P Parameter: Tissue Value: Root Meristem vs. Above Root Meristem
  misc_feature: MA Experiment ID: 108543 Result: Up-regulated in Transcription
  misc_feature: MA Experiment ID: 108556 Result: Down-regulated in Transcription
  misc_feature: MA Experiment 108556 PARAMETER Experiment Name: Zm_Drought_P Parameter: Age (day) Value: 9
  misc_feature: MA Experiment 108556 PARAMETER Experiment Name: Zm_Drought_P Parameter: Organism Value: Zea mays
  misc_feature: MA Experiment 108556 PARAMETER Experiment Name: Zm_Drought_P Parameter: Plant Line Value: 35A19
  misc_feature: MA Experiment 108556 PARAMETER Experiment Name: Zm_Drought_P Parameter: Timepoint (hr) Value: 24
  misc_feature: MA Experiment 108556 PARAMETER Experiment Name: Zm_Drought_P Parameter: Tissue Value: Aerial
  misc_feature: MA Experiment 108556 PARAMETER Experiment Name: Zm_Drought_P Parameter: Treatment Value: Drought vs. No Drought
  misc_feature: MA Experiment ID: 20000108 Result: Up-regulated in Transcription
  misc_feature: MA Experiment 20000108 PARAMETER Experiment Name: Zm_Root-Tips_P Parameter: Age (day) Value: 12
  misc_feature: MA Experiment 20000108 PARAMETER Experiment Name: Zm_Root-Tips_P Parameter: Organism Value: Zea mays
  misc_feature: MA Experiment 20000108 PARAMETER Experiment Name: Zm_Root-Tips_P Parameter: Tissue Value: Root tips vs. Root mid region    35
  misc_feature: MA Experiment 20000108 PARAMETER Experiment Name: Zm_Root-Tips_P Parameter: Tissue Value: Root tips vs. Root mid region   Sequence Listing-Misc Features (4)
  misc_feature: MA Experiment ID: 20000478 Result: Down-regulated in Transcription
  misc_feature: MA Experiment 20000478 PARAMETER Experiment Name: Zm_5mM_SA_P Parameter: Age (day) Value: 11
  misc_feature: MA Experiment 20000478 PARAMETER Experiment Name: Zm_5mM_SA_P Parameter: Organism Value: Zea mays
  misc_feature: MA Experiment 20000478 PARAMETER Experiment Name: Zm_5mM_SA_P Parameter: Plant Line Value: 35A19
  misc_feature: MA Experiment 20000478 PARAMETER Experiment Name: Zm_5mM_SA_P Parameter: Timepoint (hr) Value: 72
  misc_feature: MA Experiment 20000478 PARAMETER Experiment Name: Zm_5mM_SA_P Parameter: Tissue Value: Aerial
  misc_feature: MA Experiment 20000478 PARAMETER Experiment Name: Zm_5mM_SA_P Parameter: Treatment Value: 5mM SA vs. No Treatment
  misc_feature: MA Experiment ID: 20000487 Result: Down-regulated in Transcription
  misc_feature: MA Experiment 20000487 PARAMETER Experiment Name: Zm_50mM_NH4NO3_L_to_H_P Parameter: Organism Value: Zea mays
  misc_feature: MA Experiment 20000487 PARAMETER Experiment Name: Zm_50mM_NH4NO3_L_to_H_P Parameter: Timepoint (hr) Value: 4
  misc_feature: MA Experiment 20000487 PARAMETER Experiment Name: Zm_50mM_NH4NO3_L_to_H_P Parameter: Tissue Value: Leaves
  misc_feature: MA Experiment 20000487 PARAMETER Experiment Name: Zm_50mM_NH4NO3_L_to_H_P Parameter: Treatment Value: 50mM NH4NO3 vs. 100mM Mannitol
  misc_feature: MA Experiment ID: 20000492 Result: Up-regulated in Transcription
  misc_feature: MA Experiment 20000492 PARAMETER Experiment Name: Zm_Hybrid_Seed_Dev_P Parameter: DAP Value: 12
  misc_feature: MA Experiment 20000492 PARAMETER Experiment Name: Zm_Hybrid_Seed_Dev_P Parameter: Organism Value: Zea mays
  misc_feature: MA Experiment 20000492 PARAMETER Experiment Name: Zm_Hybrid_Seed_Dev_P Parameter: Plant Line Value: 35A19
  misc_feature: MA Experiment 20000492 PARAMETER Experiment Name: Zm_Hybrid_Seed_Dev_P Parameter: Tissue Value: Fert Kernel vs. Unfert Floret
  misc_feature: MA Experiment ID: 20000535 Result: Up-regulated in Transcription
  misc_feature: MA Experiment 20000535 PARAMETER Experiment Name: Zm_Hybrid_Seed_Dev_P Parameter: DAP Value: 30 vs. 12
  misc_feature: MA Experiment 20000535 PARAMETER Experiment Name: Zm_Hybrid_Seed_Dev_P Parameter: Organism Value: Zea mays
  misc_feature: MA Experiment 20000535 PARAMETER Experiment Name: Zm_Hybrid_Seed_Dev_P Parameter: Plant Line Value: 35A19
  misc_feature: MA Experiment 20000535 PARAMETER Experiment Name: Zm_Hybrid_Seed_Dev_P Parameter: Tissue Value: Embryo vs. Unfert Floret
  misc_feature: MA Experiment ID: 20000632 Result: Down-regulated in Transcription
  misc_feature: MA Experiment 20000632 PARAMETER Experiment Name: Zm_Herbicide-Treatments_P Parameter: Timepoint (hr) Value: 4
  misc_feature: MA Experiment 20000632 PARAMETER Experiment Name: Zm_Herbicide-Treatments_P Parameter: Tissue Value: Aerial
  misc_feature: MA Experiment 20000632 PARAMETER Experiment Name: Zm_Herbicide-Treatments_P Parameter: Treatment Value: Glean vs. No Treatment
  misc_feature: MA Experiment ID: 20001608 Result: Up-regulated in Transcription
  misc_feature: MA Experiment 20001608 PARAMETER Experiment Name: Zm_50ppm_KNO3_L-to-H_P Parameter: Age (day) Value: 21
  misc_feature: MA Experiment 20001608 PARAMETER Experiment Name: Zm_50ppm_KNO3_L-to-H_P Parameter: Organism Value: Zea mays
  misc_feature: MA Experiment 20001608 PARAMETER Experiment Name: Zm_50ppm_KNO3_L-to-H_P Parameter: Plant Line Value: 35A19
  misc_feature: MA Experiment 20001608 PARAMETER Experiment Name: Zm_50ppm_KNO3_L-to-H_P Parameter: Timepoint (hr) Value: 48
  misc_feature: MA Experiment 20001608 PARAMETER Experiment Name: Zm_50ppm_KNO3_L-to-H_P Parameter: Tissue Value: Shoots
  misc_feature: MA Experiment 20001608 PARAMETER Experiment Name: Zm_50ppm_KNO3_L-to-H_P Parameter: Treatment Value: 50ppm KNO3 vs. 50ppm KCl
cttcctctctgttctctctctctctctcttcctccagtagtccagtcctcctccttcgaatcccaaggtggcggccagagagtagagatagagagagagtgggactatagagacgttaagaacatcctaatcgaaaaccgttgctgcttgttattattaacgccgccgccgcctcctgcattcgtatggtccgcgtcgtcacggggctcctgcgttcgtaaggcaccgccgcagcgtctcggctggatcaacaggccggccgatccgtcttctccccctcctcctgcgggtcggcgtttggggatcatggcggcgcgggcggctgacgagaacaggagaccggcggcagggaagcccgcgccaggcgtccgagacatggcgagccggcgcgcgctcacggacatcaagaacctcgtcggggctgccccgtacccctgcgccatcgccaagaagcccatgctgcagaagagcagaagggacgaaaagcagccagcgttggcaagcagccggcccatgacaaggaaattcgccgcctccttggcgagcaagggccaacctgaatgtcagccgatcgtagctgatccagaacccgaattttgtcaacagaaggaatcagtaggcgatggcaccgttgatattgacgtggaactctacgagctggtcgacgatagtgatagtgacatcgacatgggtgcgacagagaacaaggacattatgaacgaagatgaattgctcatggatattgacagtgcagactcggggaacccgcttgctgcaacagaatatgttgaagagctttacaccttttacagagaaaatgaggctaagagttgtgtaaggccagattacatgtccagccaacaagacataaactcaaagatgagagcaattctgattgactggctgattgaggttcactacaagtttgaactgatggatgagacgctctttcttatggtaaacataatagatagattcttggaaaaggaagtggttccaaggaagaagctacaactggttggagtcacagctatgctgctcgcttgtaaatatgaggaggtatctgttccagttgttgaggaccttgtgctgatatctgaccgtgcctacacaaaagggcaaattctagaaatggaaaagttgattctgaacacgctgcagttcaacatgtctgttccaacaccttatgtcttcatgaagaggtttctgaaagctgcagatgcagataaacagcttgagctagcgtcatttttcatgctggagctctgcttggtagaataccaaatgctggattatcggccttcgcatctggctgctgctgcggtttatactgcgcagtgtgctatcaatcgttgccagcactggacaaaggtctgcgagtctcatagcagatacactagcgaccaactcctggagtgctcgaggatgatggtagattttcaccagaaggctggaaccagtaagctcactggcgtgcacaggaagtacagtacctacaagttcggttgcgtggccaagattttgcctgcgcagttcctgctggagtcgggagggacaccgcctccttcaggtgcaaactagttgaatcgacctattcaactgggtggattttttaaagtttttagaatactccatgaacaagatgcagaaaacatcgtgttgatgttgcccaaaagtgcatcgaatttctttggagagttatgattaacaactttttttttatctatgttgaatgacgagtgacggtcggtcacgttgtgcttgtgcagttatactgcggctaataacaaactgtccagttattct

SEQ ID NO: 13255 - protein, 526 aa, Zea mays subsp. mays
  peptide (1)..(526): Ceres Seq. ID no. 12411350
  misc_feature (265)..(391): Pfam Name: Cyclin, N-terminal domain Pfam Description: Cyclin, N-terminal domain
  misc_feature (108)..(517): Homolog of NCBI NO: 38345935 NR Description: OSJNBb0078D11.10 [Oryza sativa (japonica
  misc_feature (108)..(517): Homolog of NCBI NO: 6331704 NR Description: cyclin [Oryza sativa]
  misc_feature (118)..(516): Homolog of NCBI NO: 3913236 NR Description: G2/mitotic-specific cyclin 2 (B-like cyclin)
  misc_feature (128)..(516): Homolog of NCBI NO: 2130122 NR Description: cyclin III - maize >gi|516548|gb|AAA20236.1|
  misc_feature (128)..(514): Homolog of NCBI NO: 22330658 NR Description: Cyclin B2;4; protein id: At1g76310.1 [Arabidopsis
  misc_feature (128)..(514): Homolog of NCBI NO: 25294186 NR Description: hypothetical protein F15M4.19 [imported] -
  misc_feature (128)..(516): Homolog of NCBI NO: 1168893 NR Description: G2/mitotic-specific cyclin 1 (B-like cyclin) >gi|914861|emb|CAA57559.1| cycMs1 [Medicago sativa subsp. x
  misc_feature (128)..(516): Homolog of NCBI NO: 1362054 NR Description: mitosis-specific cyclin CycIII - alfalfa
  misc_feature (128)..(514): Homolog of NCBI NO: 15217987 NR Description: Cyclin B2;3; protein id: At1g20610.1 [Arabidopsis
  misc_feature (128)..(514): Homolog of NCBI NO: 25294182 NR Description: protein F2D10.10 [imported] - Arabidopsis >gi|8778595|gb|AAF79603.1|AC027665_4 F5M15.6 [Arabidopsis >gi|8886952|gb|AAF80638.1|AC069251_31 F2D10.10 [Arabidopsis
LPLCSLSLSLPPVVQSSSFESQGGGQRVEIEREWDYRDVKNILIENRCCLLLLTPPPPPAFVWSASSRGSCVRKAPPQRLGWINRPADPSSPPPPAGRRLGIMAARAADENRRPAAGKPAPGVRDMASRRALTDIKNLVGAAPYPCAIAKKPMLQKSRRDEKQPALASSRPMTRKFAASLASKGQPECQPIVADPEPEFCQQKESVGDGTVDIDVELYELVDDSDSDIDMGATENKDIMNEDELLMDIDSADSGNPLAATEYVEELYTFYRENEAKSCVRPDYMSSQQDINSKMRAILIDWLIEVHYKFELMDETLFLMVNIIDRFLEKEVVPRKKLQLVGVTAMLLACKYEEVSVPVVEDLVLISDRAYTKGQILEMEKLILNTLQFNMSVPTPYVFMKRFLKAADADKQLELASFFMLELCLVEYQMLDYRPSHLAAAAVYTAQCAINRCQHWTKVCESHSRYTSDQLLECSRMMVDFHQKAGTSKLTGVHRKYSTYKFGCVAKILPAQFLLESGGTPPPSGAN

SEQ ID NO: 13256 - protein, 424 aa, Zea mays subsp. mays
  peptide (1)..(424): Ceres Seq. ID no. 12411351
  misc_feature (163)..(289): Pfam Name: Cyclin, N-terminal domain Pfam Description: Cyclin, N-terminal domain
  misc_feature (6)..(415): Homolog of NCBI NO: 38345935 NR Description: OSJNBb0078D11.10 [Oryza sativa (japonica
  misc_feature (6)..(415): Homolog of NCBI NO: 6331704 NR Description: cyclin [Oryza sativa]
  misc_feature (16)..(414): Homolog of NCBI NO: 3913236 NR Description: G2/mitotic-specific cyclin 2 (B-like cyclin)
  misc_feature (26)..(414): Homolog of NCBI NO: 2130122 NR Description: cyclin III - maize >gi|516548|gb|AAA20236.1|
  misc_feature (26)..(412): Homolog of NCBI NO: 22330658 NR Description: Cyclin B2;4; protein id: At1g76310.1 [Arabidopsis
  misc_feature (26)..(412): Homolog of NCBI NO: 25294186 NR Description: hypothetical protein F15M4.19 [imported] -
  misc_feature (26)..(414): Homolog of NCBI NO: 1168893 NR Description: G2/mitotic-specific cyclin 1 (B-like cyclin) >gi|914861|emb|CAA57559.1| cycMs1 [Medicago sativa subsp. x
  misc_feature (26)..(414): Homolog of NCBI NO: 1362054 NR Description: mitosis-specific cyclin CycIII - alfalfa
  misc_feature (26)..(412): Homolog of NCBI NO: 15217987 NR Description: Cyclin B2;3; protein id: At1g20610.1 [Arabidopsis
  misc_feature (26)..(412): Homolog of NCBI NO: 25294182 NR Description: protein F2D10.10 [imported] - Arabidopsis >gi|8778595|gb|AAF79603.1|AC027665_4 F5M15.6 [Arabidopsis >gi|8886952|gb|AAF80638.1|AC069251_31 F2D10.10 [Arabidopsis
MAARAADENRRPAAGKPAPGVRDMASRRALTDIKNLVGAAPYPCAIAKKPMLQKSRRDEKQPALASSRPMTRKFAASLASKGQPECQPIVADPEPEFCQQKESVGDGTVDIDVELYELVDDSDSDIDMGATENKDIMNEDELLMDIDSADSGNPLAATEYVEELYTFYRENEAKSCVRPDYMSSQQDINSKMRAILIDWLIEVHYKFELMDETLFLMVNIIDRFLEKEVVPRKKLQLVGVTAMLLACKYEEVSVPVVEDLVLISDRAYTKGQILEMEKLILNTLQFNMSVPTPYVFMKRFLKAADADKQLELASFFMLELCLVEYQMLDYRPSHLAAAAVYTAQCAINRCQHWTKVCESHSRYTSDQLLECSRMMVDFHQKAGTSKLTGVHRKYSTYKFGCVAKILPAQFLLESGGTPPPSGAN

SEQ ID NO: 13257 - protein, 401 aa, Zea mays subsp. mays
  peptide (1)..(401): Ceres Seq. ID no. 12411352
  misc_feature (140)..(266): Pfam Name: Cyclin, N-terminal domain Pfam Description: Cyclin, N-terminal domain
  misc_feature (1)..(392): Homolog of NCBI NO: 38345935 NR Description: OSJNBb0078D11.10 [Oryza sativa (japonica
  misc_feature (1)..(392): Homolog of NCBI NO: 6331704 NR Description: cyclin [Oryza sativa]
  misc_feature (1)..(391): Homolog of NCBI NO: 3913236 NR Description: G2/mitotic-specific cyclin 2 (B-like cyclin)
  misc_feature (3)..(391): Homolog of NCBI NO: 2130122 NR Description: cyclin III - maize >gi|516548|gb|AAA20236.1|
  misc_feature (3)..(389): Homolog of NCBI NO: 22330658 NR Description: Cyclin B2;4; protein id: At1g76310.1 [Arabidopsis
  misc_feature (3)..(389): Homolog of NCBI NO: 25294186 NR Description: hypothetical protein F15M4.19 [imported] -
  misc_feature (3)..(391): Homolog of NCBI NO: 1168893 NR Description: G2/mitotic-specific cyclin 1 (B-like cyclin) >gi|914861|emb|CAA57559.1| cycMs1 [Medicago sativa subsp. x
  misc_feature (3)..(391): Homolog of NCBI NO: 1362054 NR Description: mitosis-specific cyclin CycIII - alfalfa
  misc_feature (3)..(389): Homolog of NCBI NO: 15217987 NR Description: Cyclin B2;3; protein id: At1g20610.1 [Arabidopsis
  misc_feature (3)..(389): Homolog of NCBI NO: 25294182 NR Description: protein F2D10.10 [imported] - Arabidopsis >gi|8778595|gb|AAF79603.1|AC027665_4 F5M15.6 [Arabidopsis >gi|8886952|gb|AAF80638.1|AC069251_31 F2D10.10 [Arabidopsis
MASRRALTDIKNLVGAAPYPCAIAKKPMLQKSRRDEKQPALASSRPMTRKFAASLASKGQPECQPIVADPEPEFCQQKESVGDGTVDIDVELYELVDDSDSDIDMGATENKDIMNEDELLMDIDSADSGNPLAATEYVEELYTFYRENEAKSCVRPDYMSSQQDINSKMRAILIDWLIEVHYKFELMDETLFLMVNIIDRFLEKEVVPRKKLQLVGVTAMLLACKYEEVSVPVVEDLVLISDRAYTKGQILEMEKLILNTLQFNMSVPTPYVFMKRFLKAADADKQLELASFFMLELCLVEYQMLDYRPSHLAAAAVYTAQCAINRCQHWTKVCESHSRYTSDQLLECSRMMVDFHQKAGTSKLTGVHRKYSTYKFGCVAKILPAQFLLESGGTPPPSGAN

SEQ ID NO: 13258 - DNA, 1193 bp, Zea mays subsp. mays
  misc_feature (1)..(1193): Ceres Seq. ID no. 12406389
  misc_feature: MA Experiment ID: 108529 Result: Up-regulated in Transcription
  misc_feature: MA Experiment 108529 PARAMETER Experiment Name: Zm_Imbibed_Seeds_P Parameter: Age (day) Value: 5 vs. 2
  misc_feature: MA Experiment 108529 PARAMETER Experiment Name: Zm_Imbibed_Seeds_P Parameter: Organism Value: Zea mays
  misc_feature: MA Experiment 108529 PARAMETER Experiment Name: Zm_Imbibed_Seeds_P Parameter: Plant Line Value: 35A19
  misc_feature: MA Experiment 108529 PARAMETER Experiment Name: Zm_Imbibed_Seeds_P Parameter: Tissue Value: Roots vs. Embryo
  misc_feature: MA Experiment ID: 108533 Result: Down-regulated in Transcription
  misc_feature: MA Experiment 108533 PARAMETER Experiment Name: Zm_4deg_Cold_P Parameter: Age (hr) Value: 8
  misc_feature: MA Experiment 108533 PARAMETER Experiment Name: Zm_4deg_Cold_P Parameter: Organism Value: Zea mays
  misc_feature: MA Experiment 108533 PARAMETER Experiment Name: Zm_4deg_Cold_P Parameter: Plant Line Value: 35A19
  misc_feature: MA Experiment 108533 PARAMETER Experiment Name: Zm_4deg_Cold_P Parameter: Temperature (deg C) Value: 4 vs. 22
  misc_feature: MA Experiment 108533 PARAMETER Experiment Name: Zm_4deg_Cold_P Parameter: Timepoint (hr) Value: 1
  misc_feature: MA Experiment 108533 PARAMETER Experiment Name: Zm_4deg_Cold_P Parameter: Tissue Value: Aerial
  misc_feature: MA Experiment ID: 108535 Result: Down-regulated in Transcription
  misc_feature: MA Experiment 108535 PARAMETER Experiment Name: Zm_Meristem_P Parameter: Age (day) Value: 8
  misc_feature: MA Experiment 108535 PARAMETER Experiment Name: Zm_Meristem_P Parameter: Organism Value: Zea mays
  misc_feature: MA Experiment 108535 PARAMETER Experiment Name: Zm_Meristem_P Parameter: Plant Line Value: 35A19
  misc_feature: MA Experiment 108535 PARAMETER Experiment Name: Zm_Meristem_P Parameter: Tissue Value: Root Meristem vs. Above Root Meristem
  misc_feature: MA Experiment ID: 108536 Result: Up-regulated in Transcription
  misc_feature: MA Experiment 108536 PARAMETER Experiment Name: Zm_Meristem_P Parameter: Age (day) Value: 8
  misc_feature: MA Experiment 108536 PARAMETER Experiment Name: Zm_Meristem_P Parameter: Organism Value: Zea mays
  misc_feature: MA Experiment 108536 PARAMETER Experiment Name: Zm_Meristem_P Parameter: Plant Line Value: 35A19
  misc_feature: MA Experiment 108536 PARAMETER Experiment Name: Zm_Meristem_P Parameter: Tissue Value: Shoot Meristem vs. Above Shoot Meristem
  misc_feature: MA Experiment ID: 108544 Result: Up-regulated in Transcription
  misc_feature: MA Experiment ID: 108687 Result: Down-regulated in Transcription
  misc_feature: MA Experiment 108687 PARAMETER Experiment Name: Zm_Embryos-Flowers__P Parameter: Tissue Value: Embryo vs. Aerial+
  misc_feature: MA Experiment ID: 20000492 Result: Up-regulated in Transcription
  misc_feature: MA Experiment 20000492 PARAMETER Experiment Name: Zm_Hybrid_Seed_Dev_P Parameter: DAP Value: 12
  misc_feature: MA Experiment 20000492 PARAMETER Experiment Name: Zm_Hybrid_Seed_Dev_P Parameter: Organism Value: Zea mays
  misc_feature: MA Experiment 20000492 PARAMETER Experiment Name: Zm_Hybrid_Seed_Dev_P Parameter: Plant Line Value: 35A19
  misc_feature: MA Experiment 20000492 PARAMETER Experiment Name: Zm_Hybrid_Seed_Dev_P Parameter: Tissue Value: Fert Kernel vs. Unfert Floret
actcggagtcggaggcgccacgcgcgcgtgtataaataactgcgcctcactgctgcggtgcacggtgtccccctccctccccgctgtctgtggctgcaggccacccccatagcccccgagctctgtgtgcgatggactactcgggcaccaaggagtcgcctcctgccggggcttggtggtcgagggagacggtggccgtggtgaccggcgcgaaccgcggcatcggccacgcgctcgccgcccgcctggccgagcacggcctcaccgtggtgctcaccgcgcgggacggcgagcgcggggaggccgccgcggcgccgctcctcgcgcgcgggctcgcagtcgtcttccgcaggctcgacgtctccgannnngcctccgtcgccgagttcgccgcgtggatccgcgacgccctcggcgngcctcgacatcctggtgaacaacgcagccgtgtcgtttaacgagatngacaccaacctccgtggagcacgccgaggctgtcctcaggaccaacttctacggggccaagatgctcaccgaagcgctcctgccgctgttccggcagtcgtcggcgaccagcaggatcctcaacgtcagctcccagcttggccttctcaacaaggtgagcgacccgtcgctgagggcgctgctgctggacgaggacgggctgacggaggcggggatagaggcgatggtgtcgcggttcctggcgcaggtgaaggacgggacgtggggcgggcagggttggcccaaggtgtggacggactactcggtctccaagctggccctgaacgcctactcgcggctgctggcgcggcggctgncnangngccggcgcgcgcgtgagcgtcaactgcttctgccccgggttcacgcgcacgggcatgaccaagggctgggggaagcgcaccgccgaggaggcggccgacgtcgccgcgcggctcgcgctgctggcgcccgccgagctccccacggggaccttcttcaagtggtgcacgccgcagctctactccaagctgtgactgtgactggatagctacgcctaccgtcgtcggcagtgtgtgcgtgcgctccgtgaacgctggagtatatatatatagttcggttcctttagctactctgatcagaagtcagaaacgggagtgtcgatctgccaaggtgctttcggttgaacacagctcgtttgtgacctctcg

SEQ ID NO: 13259 - protein, 168 aa, Zea mays subsp. mays
  peptide (1)..(168): Ceres Seq. ID no. 12406390
  misc_feature (1)..(151): Homolog of NCBI NO: 21740778 NR Description: OSJNBa0067K08.19 [Oryza sativa (japonica
  misc_feature (1)..(97): Homolog of NCBI NO: 15231739 NR Description: putative protein; protein id: At3g59710.1
  misc_feature (1)..(98): Homolog of NCBI NO: 15241346 NR Description: carbonyl reductase-like protein; protein id:
  misc_feature (1)..(98): Homolog of NCBI NO: 34907100 NR Description: putative carbonyl reductase-like protein [Oryza
  misc_feature (1)..(109): Homolog of NCBI NO: 15240361 NR Description: carbonyl reductase - like protein; protein id:
  misc_feature (1)..(109): Homolog of NCBI NO: 10176876 NR Description: carbonyl reductase-like protein [Arabidopsis
  misc_feature (1)..(97): Homolog of NCBI NO: 38346769 NR Description: OSJNBa0081C01.20 [Oryza sativa (japonica
  misc_feature (1)..(97): Homolog of NCBI NO: 15233062 NR Description: putative protein; protein id: At3g61220.1, by cDNA: gi_15028054, supported by cDNA: gi_20259056 [Arabidopsis
  misc_feature (1)..(97): Homolog of NCBI NO: 38346772 NR Description: OSJNBa0081C01.23 [Oryza sativa (japonica
  misc_feature (1)..(97): Homolog of NCBI NO: 15224100 NR Description: putative carbonyl reductase; protein id: [Arabidopsis thaliana] >gi|25412197|pir||F84633 probable carbonyl
  misc_feature (99)..(99): Xaa is any aa, unknown or other
  misc_feature (100)..(100): Xaa is any aa, unknown or other
  misc_feature (101)..(101): Xaa is any aa, unknown or other
MLTEALLPLFRQSSATSRILNVSSQLGLLNKVSDPSLRALLLDEDGLTEAGIEAMVSRFLAQVKDGTWGGQGWPKVWTDYSVSKLALNAYSRLLARRLXXXRRARERQLLLPRVHAHGHDQGLGEAHRRGGGRRRRAARAAGARRAPHGDLLQVVHAAALLQAVTVTG

SEQ ID NO: 13260 - protein, 114 aa, Zea mays subsp. mays
  peptide (1)..(114): Ceres Seq. ID no. 12406391
  misc_feature (1)..(97): Homolog of NCBI NO: 21740778 NR Description: OSJNBa0067K08.19 [Oryza sativa (japonica
  misc_feature (1)..(43): Homolog of NCBI NO: 15231739 NR Description: putative protein; protein id: At3g59710.1
  misc_feature (1)..(44): Homolog of NCBI NO: 15241346 NR Description: carbonyl reductase-like protein; protein id:
  misc_feature (1)..(44): Homolog of NCBI NO: 34907100 NR Description: putative carbonyl reductase-like protein [Oryza
  misc_feature (1)..(55): Homolog of NCBI NO: 15240361 NR Description: carbonyl reductase - like protein; protein id:
  misc_feature (1)..(55): Homolog of NCBI NO: 10176876 NR Description: carbonyl reductase-like protein [Arabidopsis
  misc_feature (1)..(43): Homolog of NCBI NO: 38346769 NR Description: OSJNBa0081C01.20 [Oryza sativa (japonica
  misc_feature (1)..(43): Homolog of NCBI NO: 15233062 NR Description: putative protein; protein id: At3g61220.1, by cDNA: gi_15028054, supported by cDNA: gi_20259056 [Arabidopsis
  misc_feature (1)..(43): Homolog of NCBI NO: 38346772 NR Description: OSJNBa0081C01.23 [Oryza sativa (japonica
  misc_feature (1)..(43): Homolog of NCBI NO: 15224100 NR Description: putative carbonyl reductase; protein id: [Arabidopsis thaliana] >gi|25412197|pir||F84633 probable carbonyl
  misc_feature (45)..(45): Xaa is any aa, unknown or other
  misc_feature (46)..(46): Xaa is any aa, unknown or other
  misc_feature (47)..(47): Xaa is any aa, unknown or other
MVSRFLAQVKDGTWGGQGWPKVWTDYSVSKLALNAYSRLLARRLXXXRRARERQLLLPRVHAHGHDQGLGEAHRRGGGRRRRAARAAGARRAPHGDLLQVVHAAALLQAVTVTG

SEQ ID NO: 13261 - protein, 108 aa, Zea mays subsp. mays
  peptide (1)..(108): Ceres Seq. ID no. 12406392
  misc_feature (1)..(95): Homolog of NCBI NO: 21740778 NR Description: OSJNBa0067K08.19 [Oryza sativa (japonica
  misc_feature (15)..(95): Homolog of NCBI NO: 15231739 NR Description: putative protein; protein id: At3g59710.1
  misc_feature (15)..(95): Homolog of NCBI NO: 15241346 NR Description: carbonyl reductase-like protein; protein id:
  misc_feature (10)..(95): Homolog of NCBI NO: 34907100 NR Description: putative carbonyl reductase-like protein [Oryza
  misc_feature (15)..(95): Homolog of NCBI NO: 15240361 NR Description: carbonyl reductase - like protein; protein id:
  misc_feature (15)..(95): Homolog of NCBI NO: 10176876 NR Description: carbonyl reductase-like protein [Arabidopsis
  misc_feature (21)..(95): Homolog of NCBI NO: 38346769 NR Description: OSJNBa0081C01.20 [Oryza sativa (japonica
  misc_feature (22)..(95): Homolog of NCBI NO: 15233062 NR Description: putative protein; protein id: At3g61220.1, by cDNA: gi_15028054, supported by cDNA: gi_20259056 [Arabidopsis
  misc_feature (21)..(95): Homolog of NCBI NO: 38346772 NR Description: OSJNBa0081C01.23 [Oryza sativa (japonica
  misc_feature (22)..(95): Homolog of NCBI NO: 15224100 NR Description: putative carbonyl reductase; protein id: [Arabidopsis thaliana] >gi|25412197|pir||F84633 probable carbonyl
  misc_feature (79)..(79): Xaa is any aa, unknown or other
  misc_feature (80)..(80): Xaa is any aa, unknown or other
  misc_feature (96)..(96): Xaa is any aa, unknown or other
MDYSGTKESPPAGAWWSRETVAVVTGANRGIGHALAARLAEHGLTVVLTARDGERGEAAAAPLLARGLAVVFRRLDVSXXASVAEFAAWIRDALGXPRHPGEQRSRVV

SEQ ID NO: 13262 - DNA, 1988 bp, Zea mays subsp. mays
  misc_feature (1)..(1988): Ceres Seq. ID no. 12411341
  misc_feature: MA Experiment ID: 108527 Result: Down-regulated in Transcription
  misc_feature: MA Experiment 108527 PARAMETER Experiment Name: Zm_5mM_NO_P Parameter: Age (day) Value: 8
  misc_feature: MA Experiment 108527 PARAMETER Experiment Name: Zm_5mM_NO_P Parameter: Organism Value: Zea mays
  misc_feature: MA Experiment 108527 PARAMETER Experiment Name: Zm_5mM_NO_P Parameter: Plant Line Value: 35A19
  misc_feature: MA Experiment 108527 PARAMETER Experiment Name: Zm_5mM_NO_P Parameter: Timepoint (hr) Value: 6
  misc_feature: MA Experiment 108527 PARAMETER Experiment Name: Zm_5mM_NO_P Parameter: Tissue Value: Aerial
  misc_feature: MA Experiment 108527 PARAMETER Experiment Name: Zm_5mM_NO_P Parameter: Treatment Value: 5mM NO vs. No Treatment
  misc_feature: MA Experiment ID: 108528 Result: Up-regulated in Transcription
  misc_feature: MA Experiment 108528 PARAMETER Experiment Name: Zm_Imbibed_Seeds_P Parameter: Age (day) Value: 5 vs. 2
  misc_feature: MA Experiment 108528 PARAMETER Experiment Name: Zm_Imbibed_Seeds_P Parameter: Organism Value: Zea mays
  misc_feature: MA Experiment 108528 PARAMETER Experiment Name: Zm_Imbibed_Seeds_P Parameter: Plant Line Value: 35A19
  misc_feature: MA Experiment 108528 PARAMETER Experiment Name: Zm_Imbibed_Seeds_P Parameter: Tissue Value: Aerial vs. Embryo
  misc_feature: MA Experiment ID: 108529 Result: Up-regulated in Transcription
  misc_feature: MA Experiment 108529 PARAMETER Experiment Name: Zm_Imbibed_Seeds_P Parameter: Age (day) Value: 5 vs. 2
  misc_feature: MA Experiment 108529 PARAMETER Experiment Name: Zm_Imbibed_Seeds_P Parameter: Organism Value: Zea mays
  misc_feature: MA Experiment 108529 PARAMETER Experiment Name: Zm_Imbibed_Seeds_P Parameter: Plant Line Value: 35A19
  misc_feature: MA Experiment 108529 PARAMETER Experiment Name: Zm_Imbibed_Seeds_P Parameter: Tissue Value: Roots vs. Embryo
  misc_feature: MA Experiment ID: 108530 Result: Up-regulated in Transcription
  misc_feature: MA Experiment 108530 PARAMETER Experiment Name: Zm_Imbibed_Seeds_P Parameter: Age (day) Value: 6 vs. 2
  misc_feature: MA Experiment 108530 PARAMETER Experiment Name: Zm_Imbibed_Seeds_P Parameter: Organism Value: Zea mays
  misc_feature: MA Experiment 108530 PARAMETER Experiment Name: Zm_Imbibed_Seeds_P Parameter: Plant Line Value: 35A19
  misc_feature: MA Experiment 108530 PARAMETER Experiment Name: Zm_Imbibed_Seeds_P Parameter: Tissue Value: Aerial vs. Embryo
  misc_feature: MA Experiment ID: 108535 Result: Down-regulated in Transcription
  misc_feature: MA Experiment 108535 PARAMETER Experiment Name: Zm_Meristem_P Parameter: Age (day) Value: 8
  misc_feature: MA Experiment 108535 PARAMETER Experiment Name: Zm_Meristem_P Parameter: Organism Value: Zea mays
  misc_feature: MA Experiment 108535 PARAMETER Experiment Name: Zm_Meristem_P Parameter: Plant Line Value: 35A19
  misc_feature: MA Experiment 108535 PARAMETER Experiment Name: Zm_Meristem_P Parameter: Tissue Value: Root Meristem vs. Above Root Meristem
  misc_feature: MA Experiment ID: 108544 Result: Up-regulated in Transcription
  misc_feature: MA Experiment ID: 108556 Result: Down-regulated in Transcription
  misc_feature: MA Experiment 108556 PARAMETER Experiment Name: Zm_Drought_P Parameter: Age (day) Value: 9
  misc_feature: MA Experiment 108556 PARAMETER Experiment Name: Zm_Drought_P Parameter: Organism Value: Zea mays
  misc_feature: MA Experiment 108556 PARAMETER Experiment Name: Zm_Drought_P Parameter: Plant Line Value: 35A19
  misc_feature: MA Experiment 108556 PARAMETER Experiment Name: Zm_Drought_P Parameter: Timepoint (hr) Value: 24
  misc_feature: MA Experiment 108556 PARAMETER Experiment Name: Zm_Drought_P Parameter: Tissue Value: Aerial
  misc_feature: MA Experiment 108556 PARAMETER Experiment Name: Zm_Drought_P Parameter: Treatment Value: Drought vs. No Drought
  misc_feature: MA Experiment ID: 20000478 Result: Down-regulated in Transcription
  misc_feature: MA Experiment 20000478 PARAMETER Experiment Name: Zm_5mM_SA_P Parameter: Age (day) Value: 11
  misc_feature: MA Experiment 20000478 PARAMETER Experiment Name: Zm_5mM_SA_P Parameter: Organism Value: Zea mays
  misc_feature: MA Experiment 20000478 PARAMETER Experiment Name: Zm_5mM_SA_P Parameter: Plant Line Value: 35A19
  misc_feature: MA Experiment 20000478 PARAMETER Experiment Name: Zm_5mM_SA_P Parameter: Timepoint (hr) Value: 72
  misc_feature: MA Experiment 20000478 PARAMETER Experiment Name: Zm_5mM_SA_P Parameter: Tissue Value: Aerial
  misc_feature: MA Experiment 20000478 PARAMETER Experiment Name: Zm_5mM_SA_P Parameter: Treatment Value: 5mM SA vs. No Treatment
  misc_feature: MA Experiment ID: 20000479 Result: Down-regulated in Transcription
  misc_feature: MA Experiment 20000479 PARAMETER Experiment Name: Zm_Drought_P Parameter: Age (day) Value: 10
  misc_feature: MA Experiment 20000479 PARAMETER Experiment Name: Zm_Drought_P Parameter: Organism Value: Zea mays
  misc_feature: MA Experiment 20000479 PARAMETER Experiment Name: Zm_Drought_P Parameter: Plant Line Value: 35A19
  misc_feature: MA Experiment 20000479 PARAMETER Experiment Name: Zm_Drought_P Parameter: Timepoint (hr) Value: 48
  misc_feature: MA Experiment 20000479 PARAMETER Experiment Name: Zm_Drought_P Parameter: Tissue Value: Aerial
  misc_feature: MA Experiment 20000479 PARAMETER Experiment Name: Zm_Drought_P Parameter: Treatment Value: Drought vs. No Drought
  misc_feature: MA Experiment ID: 20000480 Result: Down-regulated in Transcription
  misc_feature: MA Experiment 20000480 PARAMETER Experiment Name: Zm_Drought_P Parameter: Age (day) Value: 11
  misc_feature: MA Experiment 20000480 PARAMETER Experiment Name: Zm_Drought_P Parameter: Organism Value: Zea mays
  misc_feature: MA Experiment 20000480 PARAMETER Experiment Name: Zm_Drought_P Parameter: Plant Line Value: 35A19
  misc_feature: MA Experiment 20000480 PARAMETER Experiment Name: Zm_Drought_P Parameter: Timepoint (hr) Value: 72
  misc_feature: MA Experiment 20000480 PARAMETER Experiment Name: Zm_Drought_P Parameter: Tissue Value: Aerial
  misc_feature: MA Experiment 20000480 PARAMETER Experiment Name: Zm_Drought_P Parameter: Treatment Value: Drought vs. No Drought
  misc_feature: MA Experiment ID: 20000535 Result: Down-regulated in Transcription
  misc_feature: MA Experiment 20000535 PARAMETER Experiment Name: Zm_Hybrid_Seed_Dev_P Parameter: DAP Value: 30 vs. 12
  misc_feature: MA Experiment 20000535 PARAMETER Experiment Name: Zm_Hybrid_Seed_Dev_P Parameter: Organism Value: Zea mays
  misc_feature: MA Experiment 20000535 PARAMETER Experiment Name: Zm_Hybrid_Seed_Dev_P Parameter: Plant Line Value: 35A19
  misc_feature: MA Experiment 20000535 PARAMETER Experiment Name: Zm_Hybrid_Seed_Dev_P Parameter: Tissue Value: Embryo vs. Unfert Floret
aaactagtgtgtgaaatatctcctacaatatatatccggctctctctgtgtgcgtgctctaactgcagcggagcctcacagttgttcgtgtgctgtgtatttgtcactggtggtgctgtgcagaccaagctactgcgggagggagaagggtgtgtgccggcccgccgccaagcactgctacccggccggcggccatggaggtgagctccgtggagttcggtcatcacgcggcggccgcctcaaagtgctttgacgacgacggtcgcctcaagcgcacagggacgatgtggacggcgagcgcgcacattatcacggccgtgatagggtccggggtgctgtcgctcgcgtgggccatcgcgcagctcggctgggtggcaggccccaccgtcatgctgctcttctccttcgtcacctactacacatcggccctactcgccgactgctaccgctccggcgacgcctgcaccggcaagcgcaactacacgtacatggacgcggttaacgccaatctcagtggcgtcaaggtctggttctgcggcttcctgcagtacgccaacatcgtcggagtcgccataggctacaccattgccgcctctattagcatgctggcgatccagagggcgaactgcttccacgtggaggggcacggggacccctgcaacatctccagcacgccctacatgatcatcttcggcgtcgtgcagattttcttctcgcagatcccggacttcgaccagatatcgtggctctccatcctcgccgccgtcatgtccttcacctactccaccatcggcctgggcctgggcatcgcgcaggtggtgtccaacaagggcgtgcagggcagcctgacggggatcagcgtcggcgcggtcaccccggtcgacaagatgtggcgcagcctgcaggcgttcggcgacatcgccttcgcctactcctactccctcatcctcatcgagatccaggacaccatccgcgcgccgccgccgtccgagtccaaggtcatgcggcgcgccaccgtcgtcagcgtggccgtcaccacgttcttctacatgctgtgcgggtgcatggggtacgccgcgttcggggacaacgcccccgggaacctcctcacgggcttcggcttctacgagcccttctggctcctcgacgtcgccaacgccgccatcgccgtgcacctcgtcggcgcctaccaggtctactgccagcccctgttcgccttcgtcgagaagtgggcgcgccagaggtggcccaagtcccgctacatcacgggcgaggtcgacgtcccgctcccgctcgggaccgccggcggccggtgctacaagctcagcctgttccggctgacgtggcggacggcgttcgtggtggccacgacggtggtgtccatgctgctgcccttcttcaacgacgtggtcgggctcctgggcgcgctggggttctggccgctcaccgtctacttccccgtggagatgtacatcgtgcagaagaaggtgcccaggtggagcacgcggtgggtgtgcctgcagctgctcagcgtcgcctgcctcgtcatcaccgtcgcctccgccgcaggctccgttgccgggatcgtctctgacctcaaagtgtacaaaccgttcgtcaccacctcctgatggaccggcctagcttccgtgcagttcaaaacacacatacgcacgaacagatcattaattggcgcctagtatatatgtgcagtctttaattaaattaactaggcattaatcgatcgatcaccactacgcgtcgttctagtgatgcgcgtagcttgcatcaccgctcgctgatttaatttccattgtttttctttgatgatctggttagccgaaatggctagtgaattaagagaaaacaaatagtagcagtactgtgtgagtaatcccaagtcaaatacgttattgaagttgtcggcggtacaaaacgcttgtaaaatgtttgtgtttcaattaatcaagaagaattgtacgtgtttc

SEQ ID NO: 13263 - protein, 478 aa, Zea mays subsp. mays
  peptide (1)..(478): Ceres Seq. ID no. 12411342
  misc_feature (1)..(474): Homolog of NCBI NO: 20161442 NR Description: putative amino acid transport protein [Oryza
  misc_feature (16)..(474): Homolog of NCBI NO: 27447657 NR Description: amino acid transporter [Lycopersicon esculentum]
  misc_feature (1)..(477): Homolog of NCBI NO: 7442735 NR Description: amino acid transport protein AAP1 - castor bean
  misc_feature (16)..(474): Homolog of NCBI NO: 21553710 NR Description: amino acid carrier, putative [Arabidopsis
  misc_feature (16)..(474): Homolog of NCBI NO: 15223930 NR Description: amino acid carrier, putative; protein id: supported by cDNA: 15825., supported by cDNA: gi_20466643
  misc_feature (16)..(476): Homolog of NCBI NO: 15216030 NR Description: amino acid permease AAP4 [Vicia faba var. minor]
  misc_feature (16)..(477): Homolog of NCBI NO: 27447653 NR Description: amino acid transporter [Lycopersicon esculentum]
  misc_feature (15)..(477): Homolog of NCBI NO: 15242347 NR Description: amino acid transport protein AAP2; protein id: supported by cDNA: 114602., supported by cDNA: gi_19699270 thaliana] >gi|1076287|pir||S52421 amino acid transport amine acid
  misc_feature (15)..(477): Homolog of NCBI NO: 21536895 NR Description: amino acid transport protein AAP2 [Arabidopsis
  misc_feature (15)..(477): Homolog of NCBI NO: 15237539 NR Description: amino acid transporter AAP4 (pir||S51169); id: At5g63850.1, supported by cDNA: 116681., supported by cDNA: [Arabidopsis thaliana] >gi|10177673|dbj|BAB11033.1| amino acid
MEVSSVEFGHHAAAASKCFDDDGRLKRTGTMWTASAHIITAVIGSGVLSLAWAIAQLGWVAGPTVMLLFSFVTYYTSALLADCYRSGDACTGKRNYTYMDAVNANLSGVKVWFCGFLQYANIVGVAIGYTIAASISMLAIQRANCFHVEGHGDPCNISSTPYMIIFGVVQIFFSQIPDFDQISWLSILAAVMSFTYSTIGLGLGIAQVVSNKGVQGSLTGISVGAVTPVDKMWRSLQAFGDIAFAYSYSLILIEIQDTIRAPPPSESKVMRRATVVSVAVTTFFYMLCGCMGYAAFGDNAPGNLLTGFGFYEPFWLLDVANAAIAVHLVGAYQVYCQPLFAFVEKWARQRWPKSRYITGEVDVPLPLGTAGGRCYKLSLFRLTWRTAFVVATTVVSMLLPFFNDVVGLLGALGFWPLTVYFPVEMYIVQKKVPRWSTRWVCLQLLSVACLVITVASAAGSVAGIVSDLKVYKPFVTTS

SEQ ID NO: 13264 - protein, 448 aa, Zea mays subsp. mays
  peptide (1)..(448): Ceres Seq. ID no. 12411343
  misc_feature (1)..(444): Homolog of NCBI NO: 20161442 NR Description: putative amino acid transport protein [Oryza
  misc_feature (1)..(444): Homolog of NCBI NO: 27447657 NR Description: amino acid transporter [Lycopersicon esculentum]
  misc_feature (1)..(447): Homolog of NCBI NO: 7442735 NR Description: amino acid transport protein AAP1 - castor bean
  misc_feature (1)..(444): Homolog of NCBI NO: 21553710 NR Description: amino acid carrier, putative [Arabidopsis
  misc_feature (1)..(444): Homolog of NCBI NO: 15223930 NR Description: amino acid carrier, putative; protein id: supported by cDNA: 15825., supported by cDNA: gi_20466643
  misc_feature (1)..(446): Homolog of NCBI NO: 15216030 NR Description: amino acid permease AAP4 [Vicia faba var. minor]
  misc_feature (1)..(447): Homolog of NCBI NO: 27447653 NR Description: amino acid transporter [Lycopersicon esculentum]
  misc_feature (1)..(447): Homolog of NCBI NO: 15242347 NR Description: amino acid transport protein AAP2; protein id: supported by cDNA: 114602., supported by cDNA: gi_19699270 thaliana] >gi|1076287|pir||S52421 amino acid transport amine acid
  misc_feature (1)..(447): Homolog of NCBI NO: 21536895 NR Description: amino acid transport protein AAP2 [Arabidopsis
  misc_feature (1)..(447): Homolog of NCBI NO: 15237539 NR Description: amino acid transporter AAP4 (pir||S51169); id: At5g63850.1, supported by cDNA: 116681., supported by cDNA: [Arabidopsis thaliana] >gi|10177673|dbj|BAB11033.1| amino acid
MWTASAHIITAVIGSGVLSLAWAIAQLGWVAGPTVMLLFSFVTYYTSALLADCYRSGDACTGKRNYTYMDAVNANLSGVKVWFCGFLQYANIVGVAIGYTIAASISMLAIQRANCFHVEGHGDPCNISSTPYMIIFGVVQIFFSQIPDFDQISWLSILAAVMSFTYSTIGLGLGIAQVVSNKGVQGSLTGISVGAVTPVDKMWRSLQAFGDIAFAYSYSLILIEIQDTIRAPPPSESKVMRRATVVSVAVTTFFYMLCGCMGYAAFGDNAPGNLLTGFGFYEPFWLLDVANAAIAVHLVGAYQVYCQPLFAFVEKWARQRWPKSRYITGEVDVPLPLGTAGGRCYKLSLFRLTWRTAFVVATTVVSMLLPFFNDVVGLLGALGFWPLTVYFPVEMYIVQKKVPRWSTRWVCLQLLSVACLVITVASAAGSVAGIVSDLKVYKPFVTTS

SEQ ID NO: 13265 - protein, 413 aa, Zea mays subsp. mays
  peptide (1)..(413): Ceres Seq. ID no. 12411344
  misc_feature (1)..(409): Homolog of NCBI NO: 20161442 NR Description: putative amino acid transport protein [Oryza
  misc_feature (1)..(409): Homolog of NCBI NO: 27447657 NR Description: amino acid transporter [Lycopersicon esculentum]
  misc_feature (1)..(412): Homolog of NCBI NO: 7442735 NR Description: amino acid transport protein AAP1 - castor bean
  misc_feature (1)..(409): Homolog of NCBI NO: 21553710 NR Description: amino acid carrier, putative [Arabidopsis
  misc_feature (1)..(409): Homolog of NCBI NO: 15223930 NR Description: amino acid carrier, putative; protein id: supported by cDNA: 15825., supported by cDNA: gi_20466643
  misc_feature (1)..(411): Homolog of NCBI NO: 15216030 NR Description: amino acid permease AAP4 [Vicia faba var. minor]
  misc_feature (1)..(412): Homolog of NCBI NO: 27447653 NR Description: amino acid transporter [Lycopersicon esculentum]
  misc_feature (1)..(412): Homolog of NCBI NO: 15242347 NR Description: amino acid transport protein AAP2; protein id: supported by cDNA: 114602., supported by cDNA: gi_19699270 thaliana] >gi|1076287|pir||S52421 amino acid transport amine acid
  misc_feature (1)..(412): Homolog of NCBI NO: 21536895 NR Description: amino acid transport protein AAP2 [Arabidopsis
  misc_feature (1)..(412): Homolog of NCBI NO: 15237539 NR Description: amino acid transporter AAP4 (pir||S51169); id: At5g63850.1, supported by cDNA: 116681., supported by cDNA: [Arabidopsis thaliana] >gi|10177673|dbj|BAB11033.1| amino acid
MLLFSFVTYYTSALLADCYRSGDACTGKRNYTYMDAVNANLSGVKVWFCGFLQYANIVGVAIGYTIAASISMLAIQRANCFHVEGHGDPCNISSTPYMIIFGVVQIFFSQIPDFDQISWLSILAAVMSFTYSTIGLGLGIAQVVSNKGVQGSLTGISVGAVTPVDKMWRSLQAFGDIAFAYSYSLILIEIQDTIRAPPPSESKVMRRATVVSVAVTTFFYMLCGCMGYAAFGDNAPGNLLTGFGFYEPFWLLDVANAAIAVHLVGAYQVYCQPLFAFVEKWARQRWPKSRYITGEVDVPLPLGTAGGRCYKLSLFRLTWRTAFVVATTVVSMLLPFFNDVVGLLGALGFWPLTVYFPVEMYIVQKKVPRWSTRWVCLQLLSVACLVITVASAAGSVAGIVSDLKVYKPFVTTS

SEQ ID NO: 13266 - DNA, 902 bp, Zea mays subsp. mays
  misc_feature (1)..(902): Ceres Seq. ID no. 12377811
  misc_feature: MA Experiment ID: 108522 Result: Down-regulated in Transcription
  misc_feature: MA Experiment 108522 PARAMETER Experiment Name: Zm_42deg_Heat_P Parameter: Age (day) Value: 8
  misc_feature: MA Experiment 108522 PARAMETER Experiment Name: Zm_42deg_Heat_P Parameter: Organism Value: Zea mays
  misc_feature: MA Experiment 108522 PARAMETER Experiment Name: Zm_42deg_Heat_P Parameter: Plant Line Value: 35A19
  misc_feature: MA Experiment 108522 PARAMETER Experiment Name: Zm_42deg_Heat_P Parameter: Temperature (deg C) Value: 42 vs. 22
  misc_feature: MA Experiment 108522 PARAMETER Experiment Name: Zm_42deg_Heat_P Parameter: Timepoint (hr) Value: 1
  misc_feature: MA Experiment 108522 PARAMETER Experiment Name: Zm_42deg_Heat_P Parameter: Tissue Value: Aerial
  misc_feature: MA Experiment ID: 108527 Result: Down-regulated in Transcription
  misc_feature: MA Experiment 108527 PARAMETER Experiment Name: Zm_5mM_NO_P Parameter: Age (day) Value: 8
  misc_feature: MA Experiment 108527 PARAMETER Experiment Name: Zm_5mM_NO_P Parameter: Organism Value: Zea mays
  misc_feature: MA Experiment 108527 PARAMETER Experiment Name: Zm_5mM_NO_P Parameter: Plant Line Value: 35A19
  misc_feature: MA Experiment 108527 PARAMETER Experiment Name: Zm_5mM_NO_P Parameter: Timepoint (hr) Value: 6
  misc_feature: MA Experiment 108527 PARAMETER Experiment Name: Zm_5mM_NO_P Parameter: Tissue Value: Aerial
  misc_feature: MA Experiment 108527 PARAMETER Experiment Name: Zm_5mM_NO_P Parameter: Treatment Value: 5mM NO vs. No Treatment
  misc_feature: MA Experiment ID: 108530 Result: Down-regulated in Transcription
  misc_feature: MA Experiment 108530 PARAMETER Experiment Name: Zm_Imbibed_Seeds_P Parameter: Age (day) Value: 6 vs. 2
  misc_feature: MA Experiment 108530 PARAMETER Experiment Name: Zm_Imbibed_Seeds_P Parameter: Organism Value: Zea mays
  misc_feature: MA Experiment 108530 PARAMETER Experiment Name: Zm_Imbibed_Seeds_P Parameter: Plant Line Value: 35A19
  misc_feature: MA Experiment 108530 PARAMETER Experiment Name: Zm_Imbibed_Seeds_P Parameter: Tissue Value: Aerial vs. Embryo
  misc_feature: MA Experiment ID: 108535 Result: Down-regulated in Transcription
  misc_feature: MA Experiment 108535 PARAMETER Experiment Name: Zm_Meristem_P Parameter: Age (day) Value: 8
  misc_feature: MA Experiment 108535 PARAMETER Experiment Name: Zm_Meristem_P Parameter: Organism Value: Zea mays
  misc_feature: MA Experiment 108535 PARAMETER Experiment Name: Zm_Meristem_P Parameter: Plant Line Value: 35A19
  misc_feature: MA Experiment 108535 PARAMETER Experiment Name: Zm_Meristem_P Parameter: Tissue Value: Root Meristem vs. Above Root Meristem
  misc_feature: MA Experiment ID: 108544 Result: Up-regulated in Transcription
  misc_feature: MA Experiment ID: 108545 Result: Down-regulated in Transcription
  misc_feature: MA Experiment 108545 PARAMETER Experiment Name: Zm_Imbibed_Seeds_P Parameter: Age (day) Value: 3 vs. 2
  misc_feature: MA Experiment 108545 PARAMETER Experiment Name: Zm_Imbibed_Seeds_P Parameter: Organism Value: Zea mays
  misc_feature: MA Experiment 108545 PARAMETER Experiment Name: Zm_Imbibed_Seeds_P Parameter: Plant Line Value: 35A19
  misc_feature: MA Experiment 108545 PARAMETER Experiment Name: Zm_Imbibed_Seeds_P Parameter: Tissue Value: Aerial vs. Embryo
  misc_feature: MA Experiment ID: 108556 Result: Down-regulated in Transcription
  misc_feature: MA Experiment 108556 PARAMETER Experiment Name: Zm_Drought_P Parameter: Age (day) Value: 9
  misc_feature: MA Experiment 108556 PARAMETER Experiment Name: Zm_Drought_P Parameter: Organism Value: Zea mays
  misc_feature: MA Experiment 108556 PARAMETER Experiment Name: Zm_Drought_P Parameter: Plant Line Value: 35A19
  misc_feature: MA Experiment 108556 PARAMETER Experiment Name: Zm_Drought_P Parameter: Timepoint (hr) Value: 24
  misc_feature: MA Experiment 108556 PARAMETER Experiment Name: Zm_Drought_P Parameter: Tissue Value: Aerial
  misc_feature: MA Experiment 108556 PARAMETER Experiment Name: Zm_Drought_P Parameter: Treatment Value: Drought vs. No Drought
  misc_feature: MA Experiment ID: 108559 Result: Down-regulated in Transcription
  misc_feature: MA Experiment 108559 PARAMETER Experiment Name: Zm_5mM_NO_P Parameter: Age (day) Value: 8
  misc_feature: MA Experiment 108559 PARAMETER Experiment Name: Zm_5mM_NO_P Parameter: Organism Value: Zea mays
  misc_feature: MA Experiment 108559 PARAMETER Experiment Name: Zm_5mM_NO_P Parameter: Plant Line Value: 35A19
  misc_feature: MA Experiment 108559 PARAMETER Experiment Name: Zm_5mM_NO_P Parameter: Timepoint (hr) Value: 12
  misc_feature: MA Experiment 108559 PARAMETER Experiment Name: Zm_5mM_NO_P Parameter: Tissue Value: Aerial
  misc_feature: MA Experiment 108559 PARAMETER Experiment Name: Zm_5mM_NO_P Parameter: Treatment Value: 5mM NO vs. No Treatment
  misc_feature: MA Experiment ID: 108687 Result: Down-regulated in Transcription
  misc_feature: MA Experiment 108687 PARAMETER Experiment Name: Zm_Embryos-Flowers__P Parameter: Tissue Value: Embryo vs. Aerial+
  misc_feature: MA Experiment ID: 20000108 Result: Down-regulated in Transcription
  misc_feature: MA Experiment 20000108 PARAMETER Experiment Name: Zm_Root-Tips_P Parameter: Age (day) Value: 12
  misc_feature: MA Experiment 20000108 PARAMETER Experiment Name: Zm_Root-Tips_P Parameter: Organism Value: Zea mays
  misc_feature: MA Experiment 20000108 PARAMETER Experiment Name: Zm_Root-Tips_P Parameter: Tissue Value: Root tips vs. Root mid region    35
  misc_feature: MA Experiment 20000108 PARAMETER Experiment Name: Zm_Root-Tips_P Parameter: Tissue Value: Root tips vs. Root mid region   Sequence Listing-Misc Features (4)
  misc_feature: MA Experiment ID: 20000479 Result: Down-regulated in Transcription
  misc_feature: MA Experiment 20000479 PARAMETER Experiment Name: Zm_Drought_P Parameter: Age (day) Value: 10
  misc_feature: MA Experiment 20000479 PARAMETER Experiment Name: Zm_Drought_P Parameter: Organism Value: Zea mays
  misc_feature: MA Experiment 20000479 PARAMETER Experiment Name: Zm_Drought_P Parameter: Plant Line Value: 35A19
  misc_feature: MA Experiment 20000479 PARAMETER Experiment Name: Zm_Drought_P Parameter: Timepoint (hr) Value: 48
  misc_feature: MA Experiment 20000479 PARAMETER Experiment Name: Zm_Drought_P Parameter: Tissue Value: Aerial
  misc_feature: MA Experiment 20000479 PARAMETER Experiment Name: Zm_Drought_P Parameter: Treatment Value: Drought vs. No Drought
  misc_feature: MA Experiment ID: 20000480 Result: Down-regulated in Transcription
  misc_feature: MA Experiment 20000480 PARAMETER Experiment Name: Zm_Drought_P Parameter: Age (day) Value: 11
  misc_feature: MA Experiment 20000480 PARAMETER Experiment Name: Zm_Drought_P Parameter: Organism Value: Zea mays
  misc_feature: MA Experiment 20000480 PARAMETER Experiment Name: Zm_Drought_P Parameter: Plant Line Value: 35A19
  misc_feature: MA Experiment 20000480 PARAMETER Experiment Name: Zm_Drought_P Parameter: Timepoint (hr) Value: 72
  misc_feature: MA Experiment 20000480 PARAMETER Experiment Name: Zm_Drought_P Parameter: Tissue Value: Aerial
  misc_feature: MA Experiment 20000480 PARAMETER Experiment Name: Zm_Drought_P Parameter: Treatment Value: Drought vs. No Drought
  misc_feature: MA Experiment ID: 20000492 Result: Down-regulated in Transcription
  misc_feature: MA Experiment 20000492 PARAMETER Experiment Name: Zm_Hybrid_Seed_Dev_P Parameter: DAP Value: 12
  misc_feature: MA Experiment 20000492 PARAMETER Experiment Name: Zm_Hybrid_Seed_Dev_P Parameter: Organism Value: Zea mays
  misc_feature: MA Experiment 20000492 PARAMETER Experiment Name: Zm_Hybrid_Seed_Dev_P Parameter: Plant Line Value: 35A19
  misc_feature: MA Experiment 20000492 PARAMETER Experiment Name: Zm_Hybrid_Seed_Dev_P Parameter: Tissue Value: Fert Kernel vs. Unfert Floret
  misc_feature: MA Experiment ID: 20000535 Result: Down-regulated in Transcription
  misc_feature: MA Experiment 20000535 PARAMETER Experiment Name: Zm_Hybrid_Seed_Dev_P Parameter: DAP Value: 30 vs. 12
  misc_feature: MA Experiment 20000535 PARAMETER Experiment Name: Zm_Hybrid_Seed_Dev_P Parameter: Organism Value: Zea mays
  misc_feature: MA Experiment 20000535 PARAMETER Experiment Name: Zm_Hybrid_Seed_Dev_P Parameter: Plant Line Value: 35A19
  misc_feature: MA Experiment 20000535 PARAMETER Experiment Name: Zm_Hybrid_Seed_Dev_P Parameter: Tissue Value: Embryo vs. Unfert Floret
gagtagtaattagtttgtgcccgtgtccgtgtttggttgaataataaattgacgaaagagggccaagtatagcttagagagagaagctagctagctgaaatggaggctagcagccgccgccgcgtctctcttgtgccactgctggtggtgatcatcgggtgctgtgcctgccgcgcccagatcccgatcccggcgaggacggacgggttcgtgtacggcgggaagccgccggcgtggggcgagacggtggtggtagaggcgttcttggacccagtgtgccccgacagccgcgacgcgtggccggcgctcaagatggtcgtcgagcactatagctcacgcgtgtccgtcgtcgttcacctcttcccgctgccttaccacagctatgccttcattgcgtgccggtcaattcatgcggtgaacaaactaaatccgtcgttcgtgtaccctctgctggagaagttcttcaaataccagaaacgttactataatcagccaacatacgaaaaatcaagagctacagtggttgatgaaataaccaagaaccttgttgtgcccatcatcggtgaaactaatttggcggcattcagagcaggtttcaacgattcacattctgatcaggctacaaggatatctttcaagaacggctgtgcacgaggtgtgaccgggacnccctacttctttgtgaatggcatacccatcaacgattcaggttctcctctggaanacaaggactggatttctatcctgcgtcccttggttggaaagatgtaacgcggttgctagtttgttcatcaataaagtcctagtagagtaaacaaacaaaagctgaataataaataacattaatcagcatcgtcattctcaggaaaaaaaaagagtgctaactcagnaactctcctcgc

SEQ ID NO: 13267 - protein, 223 aa, Zea mays subsp. mays
  peptide (1)..(223): Ceres Seq. ID no. 12377812
  misc_feature (1)..(223): Homolog of NCBI NO: 38346025 NR Description: OSJNBb0071D01.2 [Oryza sativa (japonica
  misc_feature (9)..(220): Homolog of NCBI NO: 15222928 NR Description: unknown protein; protein id: At1g76020.1
  misc_feature (8)..(220): Homolog of NCBI NO: 22329686 NR Description: unknown protein; protein id: At1g20225.1, by cDNA: gi_17065543 [Arabidopsis thaliana] Unknown protein [Arabidopsis thaliana]
  misc_feature (8)..(219): Homolog of NCBI NO: 25518088 NR Description: T20H2.2 protein - Arabidopsis thaliana Contains similarity to pigpen protein from Mus musculus and contains protein of unknown function DUF78 PF|01918 domain.
  misc_feature (9)..(197): Homolog of NCBI NO: 8778813 NR Description: T4O12.23 [Arabidopsis thaliana]
  misc_feature (190)..(190): Xaa is any aa, unknown or other
  misc_feature (209)..(209): Xaa is any aa, unknown or other
MEASSRRRVSLVPLLVVIIGCCACRAQIPIPARTDGFVYGGKPPAWGETVVVEAFLDPVCPDSRDAWPALKMVVEHYSSRVSVVVHLFPLPYHSYAFIACRSIHAVNKLNPSFVYPLLEKFFKYQKRYYNQPTYEKSRATVVDEITKNLVVPIIGETNLAAFRAGFNDSHSDQATRISFKNGCARGVTGXPYFFVNGIPINDSGSPLEXKDWISILRPLVGKM

SEQ ID NO: 13268 - protein, 152 aa, Zea mays subsp. mays
  peptide (1)..(152): Ceres Seq. ID no. 12377813
  misc_feature (1)..(152): Homolog of NCBI NO: 38346025 NR Description: OSJNBb0071D01.2 [Oryza sativa (japonica
  misc_feature (1)..(149): Homolog of NCBI NO: 15222928 NR Description: unknown protein; protein id: At1g76020.1
  misc_feature (1)..(149): Homolog of NCBI NO: 22329686 NR Description: unknown protein; protein id: At1g20225.1, by cDNA: gi_17065543 [Arabidopsis thaliana] Unknown protein [Arabidopsis thaliana]
  misc_feature (1)..(148): Homolog of NCBI NO: 25518088 NR Description: T20H2.2 protein - Arabidopsis thaliana Contains similarity to pigpen protein from Mus musculus and contains protein of unknown function DUF78 PF|01918 domain.
  misc_feature (1)..(126): Homolog of NCBI NO: 8778813 NR Description: T4O12.23 [Arabidopsis thaliana]
  misc_feature (119)..(119): Xaa is any aa, unknown or other
  misc_feature (138)..(138): Xaa is any aa, unknown or other
MVVEHYSSRVSVVVHLFPLPYHSYAFIACRSIHAVNKLNPSFVYPLLEKFFKYQKRYYNQPTYEKSRATVVDEITKNLVVPIIGETNLAAFRAGFNDSHSDQATRISFKNGCARGVTGXPYFFVNGIPINDSGSPLEXKDWISILRPLVGKM

SEQ ID NO: 13269 - DNA, 1619 bp, Zea mays subsp. mays
  misc_feature (1)..(1619): Ceres Seq. ID no. 12369137
  misc_feature: MA Experiment ID: 108504 Result: Up-regulated in Transcription
  misc_feature: MA Experiment 108504 PARAMETER Experiment Name: Zm_Drought_P Parameter: Age (day) Value: 8
  misc_feature: MA Experiment 108504 PARAMETER Experiment Name: Zm_Drought_P Parameter: Organism Value: Zea mays
  misc_feature: MA Experiment 108504 PARAMETER Experiment Name: Zm_Drought_P Parameter: Plant Line Value: 35A19
  misc_feature: MA Experiment 108504 PARAMETER Experiment Name: Zm_Drought_P Parameter: Timepoint (hr) Value: 12
  misc_feature: MA Experiment 108504 PARAMETER Experiment Name: Zm_Drought_P Parameter: Tissue Value: Aerial
  misc_feature: MA Experiment 108504 PARAMETER Experiment Name: Zm_Drought_P Parameter: Treatment Value: Drought vs. No Drought
  misc_feature: MA Experiment ID: 108539 Result: Up-regulated in Transcription
  misc_feature: MA Experiment 108539 PARAMETER Experiment Name: Zm_20percent_PEG_P Parameter: Age (day) Value: 8
  misc_feature: MA Experiment 108539 PARAMETER Experiment Name: Zm_20percent_PEG_P Parameter: Organism Value: Zea mays
  misc_feature: MA Experiment 108539 PARAMETER Experiment Name: Zm_20percent_PEG_P Parameter: Plant Line Value: 35A19
  misc_feature: MA Experiment 108539 PARAMETER Experiment Name: Zm_20percent_PEG_P Parameter: Timepoint (hr) Value: 1
  misc_feature: MA Experiment 108539 PARAMETER Experiment Name: Zm_20percent_PEG_P Parameter: Tissue Value: Aerial
  misc_feature: MA Experiment 108539 PARAMETER Experiment Name: Zm_20percent_PEG_P Parameter: Treatment Value: 20percent PEG vs. No Treatment
  misc_feature: MA Experiment ID: 108540 Result: Up-regulated in Transcription
  misc_feature: MA Experiment 108540 PARAMETER Experiment Name: Zm_20percent_PEG_P Parameter: Age (day) Value: 8
  misc_feature: MA Experiment 108540 PARAMETER Experiment Name: Zm_20percent_PEG_P Parameter: Organism Value: Zea mays
  misc_feature: MA Experiment 108540 PARAMETER Experiment Name: Zm_20percent_PEG_P Parameter: Plant Line Value: 35A19
  misc_feature: MA Experiment 108540 PARAMETER Experiment Name: Zm_20percent_PEG_P Parameter: Timepoint (hr) Value: 6
  misc_feature: MA Experiment 108540 PARAMETER Experiment Name: Zm_20percent_PEG_P Parameter: Tissue Value: Aerial
  misc_feature: MA Experiment 108540 PARAMETER Experiment Name: Zm_20percent_PEG_P Parameter: Treatment Value: 20percent PEG vs. No Treatment
  misc_feature: MA Experiment ID: 108556 Result: Up-regulated in Transcription
  misc_feature: MA Experiment 108556 PARAMETER Experiment Name: Zm_Drought_P Parameter: Age (day) Value: 9
  misc_feature: MA Experiment 108556 PARAMETER Experiment Name: Zm_Drought_P Parameter: Organism Value: Zea mays
  misc_feature: MA Experiment 108556 PARAMETER Experiment Name: Zm_Drought_P Parameter: Plant Line Value: 35A19
  misc_feature: MA Experiment 108556 PARAMETER Experiment Name: Zm_Drought_P Parameter: Timepoint (hr) Value: 24
  misc_feature: MA Experiment 108556 PARAMETER Experiment Name: Zm_Drought_P Parameter: Tissue Value: Aerial
  misc_feature: MA Experiment 108556 PARAMETER Experiment Name: Zm_Drought_P Parameter: Treatment Value: Drought vs. No Drought
  misc_feature: MA Experiment ID: 108597 Result: Up-regulated in Transcription
  misc_feature: MA Experiment 108597 PARAMETER Experiment Name: Zm_100uM_ABA_P Parameter: Age (day) Value: 9
  misc_feature: MA Experiment 108597 PARAMETER Experiment Name: Zm_100uM_ABA_P Parameter: Organism Value: Zea mays
  misc_feature: MA Experiment 108597 PARAMETER Experiment Name: Zm_100uM_ABA_P Parameter: Plant Line Value: 35A19
  misc_feature: MA Experiment 108597 PARAMETER Experiment Name: Zm_100uM_ABA_P Parameter: Timepoint (hr) Value: 24
  misc_feature: MA Experiment 108597 PARAMETER Experiment Name: Zm_100uM_ABA_P Parameter: Tissue Value: Aerial
  misc_feature: MA Experiment 108597 PARAMETER Experiment Name: Zm_100uM_ABA_P Parameter: Treatment Value: 100uM ABA vs. No Treatment
  misc_feature: MA Experiment ID: 108689 Result: Up-regulated in Transcription
  misc_feature: MA Experiment 108689 PARAMETER Experiment Name: Zm_Drought_Roots_P Parameter: Age (day) Value: 9
  misc_feature: MA Experiment 108689 PARAMETER Experiment Name: Zm_Drought_Roots_P Parameter: Organism Value: Zea mays
  misc_feature: MA Experiment 108689 PARAMETER Experiment Name: Zm_Drought_Roots_P Parameter: Plant Line Value: 35A19
  misc_feature: MA Experiment 108689 PARAMETER Experiment Name: Zm_Drought_Roots_P Parameter: Timepoint (hr) Value: 24
  misc_feature: MA Experiment 108689 PARAMETER Experiment Name: Zm_Drought_Roots_P Parameter: Tissue Value: Roots
  misc_feature: MA Experiment 108689 PARAMETER Experiment Name: Zm_Drought_Roots_P Parameter: Treatment Value: Drought vs. No Drought
  misc_feature: MA Experiment ID: 20000479 Result: Up-regulated in Transcription
  misc_feature: MA Experiment 20000479 PARAMETER Experiment Name: Zm_Drought_P Parameter: Age (day) Value: 10
  misc_feature: MA Experiment 20000479 PARAMETER Experiment Name: Zm_Drought_P Parameter: Organism Value: Zea mays
  misc_feature: MA Experiment 20000479 PARAMETER Experiment Name: Zm_Drought_P Parameter: Plant Line Value: 35A19
  misc_feature: MA Experiment 20000479 PARAMETER Experiment Name: Zm_Drought_P Parameter: Timepoint (hr) Value: 48
  misc_feature: MA Experiment 20000479 PARAMETER Experiment Name: Zm_Drought_P Parameter: Tissue Value: Aerial
  misc_feature: MA Experiment 20000479 PARAMETER Experiment Name: Zm_Drought_P Parameter: Treatment Value: Drought vs. No Drought
  misc_feature: MA Experiment ID: 20000480 Result: Up-regulated in Transcription
  misc_feature: MA Experiment 20000480 PARAMETER Experiment Name: Zm_Drought_P Parameter: Age (day) Value: 11
  misc_feature: MA Experiment 20000480 PARAMETER Experiment Name: Zm_Drought_P Parameter: Organism Value: Zea mays
  misc_feature: MA Experiment 20000480 PARAMETER Experiment Name: Zm_Drought_P Parameter: Plant Line Value: 35A19
  misc_feature: MA Experiment 20000480 PARAMETER Experiment Name: Zm_Drought_P Parameter: Timepoint (hr) Value: 72
  misc_feature: MA Experiment 20000480 PARAMETER Experiment Name: Zm_Drought_P Parameter: Tissue Value: Aerial
  misc_feature: MA Experiment 20000480 PARAMETER Experiment Name: Zm_Drought_P Parameter: Treatment Value: Drought vs. No Drought
gtgcccgtttcgcctcgcgcctgcgttgctctgctatttccatttccattgcacccatttccggggtcgcctgcgttgcttcgcgtgggagcgtgattcgtttaggcctctcgccaatttcggagggcgacggcgacgtgctttcggcgggcgggcagagaaaatctagagtcttgggtttgccagacgcgcctttgtgggagacagacacttgctctcgcctccaatggccgagatctgctgcgaggaagccaagtcgacgccggcaaccgccgtggctgcggcttcagtctccgccacggccgcagcggccgcagccgtggcagtggcctcctcggcgttagagaggaggcgacgcaggctggagatgaggaggttccgcgtcgcgagcgatcccgaggagctggtcgcggatgacgtccgcgctgccaagcggcagaggctggcgcgcacgctgtccggctcctgccccgacgcgggctcggactccgacaggccggccctgcccaggtacggggtcacctccgtctgcggccgacggcgcgagatggaggacacggtctccatcaggccggacttcctgcccggcaccagcaagcacaacttcttcggcgtcttcgacggccacggctgctcccacgtagcgacgatgtgccaggacaacatgcacgaggttgtcgcggacgagcacacgaaggctgcctntggcgaggagacggcgtggaagggcgtgatggagaggagcttctcgcgattggatgagcaggccgccagctgggcgaccagccgcagccgcgacgagcctgcctgcaggtgcgagcagcagatgcccttgcgctgcgatcacgtggggtccaccgccgtggtcgccgtcgttagccccagccacgtagtcgtcgccaacgccggcgactcgcgcgccgtcctctcccgcggcggcgtccccgttccgctctccgtcgaccacaagcctgaccgacctgacgagctggctcgcatcgaggcggcgggtggccgcgtcatttactgggatggtgcccgtgttctcggcgtcctcgccatgtctcgagccataggggataggtacctaaagccgtttgtgtcgtcggagccggaggtaacggtgacggagcgcaccgacgacgacgagtgtctgatcctggccagcgacggcctgtgggacgtcgtgaccaacgagatggcgtgcgaggtcgtccgggcgtgcttccgtagcaacggtccgccggcgccggccgctcgcccgaacggcgtggccctcccggcagccggcgcgggcgccgaggacggatcggcggttgtcaagggtgtgggcaaggaggactccgacaaggcgtgctccgacgcggccatgctgctggcaaagctggcgctggcccggcggagcgccgacaatgttagcgtggtcgtcgtggatctccgccggggcatatgattctcggagcgaagcagagcagggcaaaatcatatgctccatgcttgaaactagctcttctgaaatccacgctaatttctcccccattttgaccatccttctattttgatgtagtattagtagtagatcctgatcagatgaatataatagacgcttttcttctctc

SEQ ID NO: 13270 - protein, 408 aa, Zea mays subsp. mays
  peptide (1)..(408): Ceres Seq. ID no. 12369138
  misc_feature (94)..(397): Pfam Name: Protein phosphatase 2C Pfam Description: Protein phosphatase 2C
  misc_feature (365)..(406): Homolog of NCBI NO: 15229745 NR Description: protein phosphatase 2C (PP2C); protein id: supported by cDNA: gi_18389241 [Arabidopsis thaliana] Protein phosphatase 2C (PP2C) >gi|1076391|pir||S55457
  misc_feature (57)..(408): Homolog of NCBI NO: 10432446 NR Description: protein phosphatase 2C [Nicotiana tabacum]
  misc_feature (67)..(406): Homolog of NCBI NO: 7768151 NR Description: protein phpsphatase 2C (PP2C) [Fagus sylvatica]
  misc_feature (94)..(374): Homolog of NCBI NO: 33309516 NR Description: protein phosphatase 2C [Prunus avium]
  misc_feature (42)..(406): Homolog of NCBI NO: 34902050 NR Description: putative Serine/threonine phosphatases [Oryza
  misc_feature (1)..(338): Homolog of NCBI NO: 15229745 NR Description: protein phosphatase 2C (PP2C); protein id: supported by cDNA: gi_18389241 [Arabidopsis thaliana] Protein phosphatase 2C (PP2C) >gi|1076391|pir||S55457
  misc_feature (11)..(408): Homolog of NCBI NO: 34908256 NR Description: putative protein phosphatase 2C [Oryza sativa
  misc_feature (373)..(406): Homolog of NCBI NO: 33309516 NR Description: protein phosphatase 2C [Prunus avium]
  misc_feature (25)..(338): Homolog of NCBI NO: 15227078 NR Description: protein phosphatase 2C (PP2C), putative; protein At2g29380.1 [Arabidopsis thaliana] >gi|25352214|pir||F84695
  misc_feature (373)..(406): Homolog of NCBI NO: 15227078 NR Description: protein phosphatase 2C (PP2C), putative; protein At2g29380.1 [Arabidopsis thaliana] >gi|25352214|pir||F84695
  misc_feature (160)..(160): Xaa is any aa, unknown or other
MAEICCEEAKSTPATAVAAASVSATAAAAAAVAVASSALERRRRRLEMRRFRVASDPEELVADDVRAAKRQRLARTLSGSCPDAGSDSDRPALPRYGVTSVCGRRREMEDTVSIRPDFLPGTSKHNFFGVFDGHGCSHVATMCQDNMHEVVADEHTKAAXGEETAWKGVMERSFSRLDEQAASWATSRSRDEPACRCEQQMPLRCDHVGSTAVVAVVSPSHVVVANAGDSRAVLSRGGVPVPLSVDHKPDRPDELARIEAAGGRVIYWDGARVLGVLAMSRAIGDRYLKPFVSSEPEVTVTERTDDDECLILASDGLWDVVTNEMACEVVRACFRSNGPPAPAARPNGVALPAAGAGAEDGSAVVKGVGKEDSDKACSDAAMLLAKLALARRSADNVSVVVVDLRRGI

SEQ ID NO: 13271 - protein, 361 aa, Zea mays subsp. mays
  peptide (1)..(361): Ceres Seq. ID no. 12369139
  misc_feature (47)..(350): Pfam Name: Protein phosphatase 2C Pfam Description: Protein phosphatase 2C
  misc_feature (1)..(361): Homolog of NCBI NO: 34908256 NR Description: putative protein phosphatase 2C [Oryza sativa
  misc_feature (1)..(359): Homolog of NCBI NO: 34902050 NR Description: putative Serine/threonine phosphatases [Oryza
  misc_feature (1)..(291): Homolog of NCBI NO: 15229745 NR Description: protein phosphatase 2C (PP2C); protein id: supported by cDNA: gi_18389241 [Arabidopsis thaliana] Protein phosphatase 2C (PP2C) >gi|1076391|pir||S55457
  misc_feature (318)..(359): Homolog of NCBI NO: 15229745 NR Description: protein phosphatase 2C (PP2C); protein id: supported by cDNA: gi_18389241 [Arabidopsis thaliana] Protein phosphatase 2C (PP2C) >gi|1076391|pir||S55457
  misc_feature (10)..(361): Homolog of NCBI NO: 10432446 NR Description: protein phosphatase 2C [Nicotiana tabacum]
  misc_feature (20)..(359): Homolog of NCBI NO: 7768151 NR Description: protein phpsphatase 2C (PP2C) [Fagus sylvatica]
  misc_feature (47)..(327): Homolog of NCBI NO: 33309516 NR Description: protein phosphatase 2C [Prunus avium]
  misc_feature (326)..(359): Homolog of NCBI NO: 33309516 NR Description: protein phosphatase 2C [Prunus avium]
  misc_feature (1)..(291): Homolog of NCBI NO: 15227078 NR Description: protein phosphatase 2C (PP2C), putative; protein At2g29380.1 [Arabidopsis thaliana] >gi|25352214|pir||F84695
  misc_feature (326)..(359): Homolog of NCBI NO: 15227078 NR Description: protein phosphatase 2C (PP2C), putative; protein At2g29380.1 [Arabidopsis thaliana] >gi|25352214|pir||F84695
  misc_feature (113)..(113): Xaa is any aa, unknown or other
MRRFRVASDPEELVADDVRAAKRQRLARTLSGSCPDAGSDSDRPALPRYGVTSVCGRRREMEDTVSIRPDFLPGTSKHNFFGVFDGHGCSHVATMCQDNMHEVVADEHTKAAXGEETAWKGVMERSFSRLDEQAASWATSRSRDEPACRCEQQMPLRCDHVGSTAVVAVVSPSHVVVANAGDSRAVLSRGGVPVPLSVDHKPDRPDELARIEAAGGRVIYWDGARVLGVLAMSRAIGDRYLKPFVSSEPEVTVTERTDDDECLILASDGLWDVVTNEMACEVVRACFRSNGPPAPAARPNGVALPAAGAGAEDGSAVVKGVGKEDSDKACSDAAMLLAKLALARRSADNVSVVVVDLRRGI

SEQ ID NO: 13272 - protein, 301 aa, Zea mays subsp. mays
  peptide (1)..(301): Ceres Seq. ID no. 12369140
  misc_feature (1)..(290): Pfam Name: Protein phosphatase 2C Pfam Description: Protein phosphatase 2C
  misc_feature (1)..(301): Homolog of NCBI NO: 34908256 NR Description: putative protein phosphatase 2C [Oryza sativa
  misc_feature (1)..(299): Homolog of NCBI NO: 34902050 NR Description: putative Serine/threonine phosphatases [Oryza
  misc_feature (1)..(231): Homolog of NCBI NO: 15229745 NR Description: protein phosphatase 2C (PP2C); protein id: supported by cDNA: gi_18389241 [Arabidopsis thaliana] Protein phosphatase 2C (PP2C) >gi|1076391|pir||S55457
  misc_feature (258)..(299): Homolog of NCBI NO: 15229745 NR Description: protein phosphatase 2C (PP2C); protein id: supported by cDNA: gi_18389241 [Arabidopsis thaliana] Protein phosphatase 2C (PP2C) >gi|1076391|pir||S55457
  misc_feature (1)..(301): Homolog of NCBI NO: 10432446 NR Description: protein phosphatase 2C [Nicotiana tabacum]
  misc_feature (1)..(299): Homolog of NCBI NO: 7768151 NR Description: protein phpsphatase 2C (PP2C) [Fagus sylvatica]
  misc_feature (1)..(267): Homolog of NCBI NO: 33309516 NR Description: protein phosphatase 2C [Prunus avium]
  misc_feature (266)..(299): Homolog of NCBI NO: 33309516 NR Description: protein phosphatase 2C [Prunus avium]
  misc_feature (1)..(231): Homolog of NCBI NO: 15227078 NR Description: protein phosphatase 2C (PP2C), putative; protein At2g29380.1 [Arabidopsis thaliana] >gi|25352214|pir||F84695
  misc_feature (266)..(299): Homolog of NCBI NO: 15227078 NR Description: protein phosphatase 2C (PP2C), putative; protein At2g29380.1 [Arabidopsis thaliana] >gi|25352214|pir||F84695
  misc_feature (53)..(53): Xaa is any aa, unknown or other
MEDTVSIRPDFLPGTSKHNFFGVFDGHGCSHVATMCQDNMHEVVADEHTKAAXGEETAWKGVMERSFSRLDEQAASWATSRSRDEPACRCEQQMPLRCDHVGSTAVVAVVSPSHVVVANAGDSRAVLSRGGVPVPLSVDHKPDRPDELARIEAAGGRVIYWDGARVLGVLAMSRAIGDRYLKPFVSSEPEVTVTERTDDDECLILASDGLWDVVTNEMACEVVRACFRSNGPPAPAARPNGVALPAAGAGAEDGSAVVKGVGKEDSDKACSDAAMLLAKLALARRSADNVSVVVVDLRRGI

SEQ ID NO: 13273 - DNA, 2115 bp, Zea mays subsp. mays
  misc_feature (1)..(2115): Ceres Seq. ID no. 12365140
  misc_feature: MA Experiment ID: 108522 Result: Down-regulated in Transcription
  misc_feature: MA Experiment 108522 PARAMETER Experiment Name: Zm_42deg_Heat_P Parameter: Age (day) Value: 8
  misc_feature: MA Experiment 108522 PARAMETER Experiment Name: Zm_42deg_Heat_P Parameter: Organism Value: Zea mays
  misc_feature: MA Experiment 108522 PARAMETER Experiment Name: Zm_42deg_Heat_P Parameter: Plant Line Value: 35A19
  misc_feature: MA Experiment 108522 PARAMETER Experiment Name: Zm_42deg_Heat_P Parameter: Temperature (deg C) Value: 42 vs. 22
  misc_feature: MA Experiment 108522 PARAMETER Experiment Name: Zm_42deg_Heat_P Parameter: Timepoint (hr) Value: 1
  misc_feature: MA Experiment 108522 PARAMETER Experiment Name: Zm_42deg_Heat_P Parameter: Tissue Value: Aerial
  misc_feature: MA Experiment ID: 108535 Result: Up-regulated in Transcription
  misc_feature: MA Experiment 108535 PARAMETER Experiment Name: Zm_Meristem_P Parameter: Age (day) Value: 8
  misc_feature: MA Experiment 108535 PARAMETER Experiment Name: Zm_Meristem_P Parameter: Organism Value: Zea mays
  misc_feature: MA Experiment 108535 PARAMETER Experiment Name: Zm_Meristem_P Parameter: Plant Line Value: 35A19
  misc_feature: MA Experiment 108535 PARAMETER Experiment Name: Zm_Meristem_P Parameter: Tissue Value: Root Meristem vs. Above Root Meristem
  misc_feature: MA Experiment ID: 108544 Result: Down-regulated in Transcription
  misc_feature: MA Experiment ID: 20000487 Result: Up-regulated in Transcription
  misc_feature: MA Experiment 20000487 PARAMETER Experiment Name: Zm_50mM_NH4NO3_L_to_H_P Parameter: Organism Value: Zea mays
  misc_feature: MA Experiment 20000487 PARAMETER Experiment Name: Zm_50mM_NH4NO3_L_to_H_P Parameter: Timepoint (hr) Value: 4
  misc_feature: MA Experiment 20000487 PARAMETER Experiment Name: Zm_50mM_NH4NO3_L_to_H_P Parameter: Tissue Value: Leaves
  misc_feature: MA Experiment 20000487 PARAMETER Experiment Name: Zm_50mM_NH4NO3_L_to_H_P Parameter: Treatment Value: 50mM NH4NO3 vs. 100mM Mannitol
  misc_feature: MA Experiment ID: 20000488 Result: Up-regulated in Transcription
  misc_feature: MA Experiment 20000488 PARAMETER Experiment Name: Zm_50mM_NH4NO3_L_to_H_P Parameter: Organism Value: Zea mays
  misc_feature: MA Experiment 20000488 PARAMETER Experiment Name: Zm_50mM_NH4NO3_L_to_H_P Parameter: Timepoint (hr) Value: 8
  misc_feature: MA Experiment 20000488 PARAMETER Experiment Name: Zm_50mM_NH4NO3_L_to_H_P Parameter: Tissue Value: Leaves
  misc_feature: MA Experiment 20000488 PARAMETER Experiment Name: Zm_50mM_NH4NO3_L_to_H_P Parameter: Treatment Value: 50mM NH4NO3 vs. 100mM Mannitol
  misc_feature: MA Experiment ID: 20000492 Result: Up-regulated in Transcription
  misc_feature: MA Experiment 20000492 PARAMETER Experiment Name: Zm_Hybrid_Seed_Dev_P Parameter: DAP Value: 12
  misc_feature: MA Experiment 20000492 PARAMETER Experiment Name: Zm_Hybrid_Seed_Dev_P Parameter: Organism Value: Zea mays
  misc_feature: MA Experiment 20000492 PARAMETER Experiment Name: Zm_Hybrid_Seed_Dev_P Parameter: Plant Line Value: 35A19
  misc_feature: MA Experiment 20000492 PARAMETER Experiment Name: Zm_Hybrid_Seed_Dev_P Parameter: Tissue Value: Fert Kernel vs. Unfert Floret
  misc_feature: MA Experiment ID: 20001606 Result: Up-regulated in Transcription
  misc_feature: MA Experiment 20001606 PARAMETER Experiment Name: Zm_50ppm_KNO3_L-to-H_P Parameter: Age (day) Value: 19
  misc_feature: MA Experiment 20001606 PARAMETER Experiment Name: Zm_50ppm_KNO3_L-to-H_P Parameter: Organism Value: Zea mays
  misc_feature: MA Experiment 20001606 PARAMETER Experiment Name: Zm_50ppm_KNO3_L-to-H_P Parameter: Plant Line Value: 35A19
  misc_feature: MA Experiment 20001606 PARAMETER Experiment Name: Zm_50ppm_KNO3_L-to-H_P Parameter: Timepoint (hr) Value: 8
  misc_feature: MA Experiment 20001606 PARAMETER Experiment Name: Zm_50ppm_KNO3_L-to-H_P Parameter: Tissue Value: Shoots
  misc_feature: MA Experiment 20001606 PARAMETER Experiment Name: Zm_50ppm_KNO3_L-to-H_P Parameter: Treatment Value: 50ppm KNO3 vs. 50ppm KCl
ataagaaattcgattttcacccaaccctaagcccctcctccctcgtaatcccactccagccgccgccgcgccgccgcctctagcctccggatccaatccagcatcgccgccgcaaaccatgggcttcgacgtgggcgtcgtcccgttcaaccccgacggctggggtcctcctgacgtcccggcgattccgcagtctctggggcgcggtgcctccatccccttcgcgcccttctcccgctccgacaagctgggccgcatcgccgactggacgcgcaaccacgccggtcccgccgccttcgccgcggcgtcacgggactccgtattcgacttcacctccgcggacgactcgctcgtcgccggggccgaggactcctcgttccgcctcgtcgatgctaagccgcagccgcggccgcaacggttcggccccaagtggcgcttcaaccagcgccagcagctcccacagcgccaagacgaggaggtggaggcgcgccgccgcttggccgagaaggagcgcgcacgccgcgatcgccacttccagaacaaccgctcacatcaccaccctggcttccggggcaaccagccctcgtcgtcagccaagccctccgtcgacatccagcccgactggaccatgcgcgagcagatccccttcgccaacttcaccaagctctccttctccgtgtccgaccagcccgaggatctcctcttatgcggcgccgtcgagtcctacgatcgggcctatgaccgtgtcaaccccaaggccgcgcgccgtctcgagcgcttcaagtcccgcaacttcttcaaggtcaccaccaccgacgaccctgtcatccgccgcctcgctgaggaggacaaagccacggtgttcgcgactgatgccatcctcgccgctctcatgtgcacgccccgcagcatcctgtcgtgggacattgtcgtgcagcgtgtgggcaacaagctgttccttgacaagcgtgatggctcccagctcgacctgctcactgtcaatgagactgcgcaggagcagcttcctgagaacaaggatgacatcaactccgcacactcgctcgctgttgaggccacctacatcaaccagaacttctctcagcaggtgctgcaccgcaatggtgagaaggttaactttgacgagcccaacccatttgcttctgagggtgaagaggctgcatctgttggctaccgctaccgccgttggaagttgaatgatgagatcagccttgttgctcgctgtgaggtgcatgctgtcagtgttgatcaaagtggtactcgccagtttattaccgtcaatgccctaaatgagtttgattcaaagattactggtgttgactggaggcagaagcttgagacccagcgtggagctgtccttgctacagagctcaagaacaatgccaacaaacttgctcgctggactgcccaggctttgcttgctggtgctgacatgatgaagttgggctatgtgtcacgggtgaacccccgtgatcagtacaaccattctgtgctcactgtgatgggatacaagccaagggattttgctgcacagatcaacctcaacactgcaaacatgtggggaatcgtcaagtcaattgtggacatctgcatgaagtttgaagagggcaagtatgtgtttgtcaaagatccagcaaagccacagttgaggatctatgaggtaccatctgatgcgtttgagaatgattatgttgaagagccacttccagaggaggagcaggttcgcccgcttggagaagttgacgccactgcagaggaaatggatgcagttgctgaggcagaggccaacaatgtatcttctgctaatggtggtgagggtgggaagagtgcagaagcgacccttgcttgaagggaatagagggttcttttaccctttgcaagaaaattcccttttttggttaattatctgtgtcgtggaagacatgatccgctggtattgatacatgtcttcttatggctaatgcgaaaactatcacatttgtttttttttctctttcatgcttagacatgctatagtttttttaagcacccctcgatcgtttctgctgcaatgtttctgtgtaagaactattgaatctgattctgtgtttttttgtt

SEQ ID NO: 13274 - protein, 582 aa, Zea mays subsp. mays
  peptide (1)..(582): Ceres Seq. ID no. 12365141
  misc_feature (3)..(539): Pfam Name: Eukaryotic translation initiation factor 3 Pfam Description: Eukaryotic translation initiation factor 3
  misc_feature (3)..(578): Homolog of NCBI NO: 15241470 NR Description: eukaryotic translation initiation factor 3 eukaryotic translation initiation factor 3 subunit 7 [Arabidopsis
  misc_feature (32)..(568): Homolog of NCBI NO: 15233469 NR Description: translation initiation factor eIF3 - like protein id: At4g20980.1, supported by cDNA: gi_17528987 thaliana] >gi|6685535|sp|P56820|IF37_ARATH Eukaryotic translation
  misc_feature (32)..(568): Homolog of NCBI NO: 17528988 NR Description: putative translation initiation factor eIF3
  misc_feature (156)..(568): Homolog of NCBI NO: 12407755 NR Description: initiation factor 3d [Arabidopsis thaliana]
  misc_feature (3)..(540): Homolog of NCBI NO: 4503523 NR Description: eukaryotic translation initiation factor 3
  misc_feature (3)..(540): Homolog of NCBI NO: 34866902 NR Description: similar to eukaryotic translation initiation (zeta, 66/67kD); translation initiation factor eIF3 p66 subunit
  misc_feature (3)..(540): Homolog of NCBI NO: 26337171 NR Description: unnamed protein product [Mus musculus]
  misc_feature (3)..(541): Homolog of NCBI NO: 27882463 NR Description: Similar to eukaryotic translation initiation
  misc_feature (1)..(539): Homolog of NCBI NO: 24649360 NR Description: Eukaryotic initiation factor 3 p66 subunit
  misc_feature (3)..(540): Homolog of NCBI NO: 38174024 NR Description: Unknown (protein for MGC:75703) [Silurana
MGFDVGVVPFNPDGWGPPDVPAIPQSLGRGASIPFAPFSRSDKLGRIADWTRNHAGPAAFAAASRDSVFDFTSADDSLVAGAEDSSFRLVDAKPQPRPQRFGPKWRFNQRQQLPQRQDEEVEARRRLAEKERARRDRHFQNNRSHHHPGFRGNQPSSSAKPSVDIQPDWTMREQIPFANFTKLSFSVSDQPEDLLLCGAVESYDRAYDRVNPKAARRLERFKSRNFFKVTTTDDPVIRRLAEEDKATVFATDAILAALMCTPRSILSWDIVVQRVGNKLFLDKRDGSQLDLLTVNETAQEQLPENKDDINSAHSLAVEATYINQNFSQQVLHRNGEKVNFDEPNPFASEGEEAASVGYRYRRWKLNDEISLVARCEVHAVSVDQSGTRQFITVNALNEFDSKITGVDWRQKLETQRGAVLATELKNNANKLARWTAQALLAGADMMKLGYVSRVNPRDQYNHSVLTVMGYKPRDFAAQINLNTANMWGIVKSIVDICMKFEEGKYVFVKDPAKPQLRIYEVPSDAFENDYVEEPLPEEEQVRPLGEVDATAEEMDAVAEAEANNVSSANGGEGGKSAEATLA

SEQ ID NO: 13275 - protein, 412 aa, Zea mays subsp. mays
  peptide (1)..(412): Ceres Seq. ID no. 12365142
  misc_feature (1)..(369): Pfam Name: Eukaryotic translation initiation factor 3 Pfam Description: Eukaryotic translation initiation factor 3
  misc_feature (1)..(408): Homolog of NCBI NO: 15241470 NR Description: eukaryotic translation initiation factor 3 eukaryotic translation initiation factor 3 subunit 7 [Arabidopsis
  misc_feature (1)..(398): Homolog of NCBI NO: 15233469 NR Description: translation initiation factor eIF3 - like protein id: At4g20980.1, supported by cDNA: gi_17528987 thaliana] >gi|6685535|sp|P56820|IF37_ARATH Eukaryotic translation
  misc_feature (1)..(398): Homolog of NCBI NO: 17528988 NR Description: putative translation initiation factor eIF3
  misc_feature (1)..(398): Homolog of NCBI NO: 12407755 NR Description: initiation factor 3d [Arabidopsis thaliana]
  misc_feature (1)..(370): Homolog of NCBI NO: 4503523 NR Description: eukaryotic translation initiation factor 3
  misc_feature (1)..(370): Homolog of NCBI NO: 34866902 NR Description: similar to eukaryotic translation initiation (zeta, 66/67kD); translation initiation factor eIF3 p66 subunit
  misc_feature (1)..(370): Homolog of NCBI NO: 26337171 NR Description: unnamed protein product [Mus musculus]
  misc_feature (1)..(371): Homolog of NCBI NO: 27882463 NR Description: Similar to eukaryotic translation initiation
  misc_feature (1)..(369): Homolog of NCBI NO: 24649360 NR Description: Eukaryotic initiation factor 3 p66 subunit
  misc_feature (1)..(370): Homolog of NCBI NO: 38174024 NR Description: Unknown (protein for MGC:75703) [Silurana
MREQIPFANFTKLSFSVSDQPEDLLLCGAVESYDRAYDRVNPKAARRLERFKSRNFFKVTTTDDPVIRRLAEEDKATVFATDAILAALMCTPRSILSWDIVVQRVGNKLFLDKRDGSQLDLLTVNETAQEQLPENKDDINSAHSLAVEATYINQNFSQQVLHRNGEKVNFDEPNPFASEGEEAASVGYRYRRWKLNDEISLVARCEVHAVSVDQSGTRQFITVNALNEFDSKITGVDWRQKLETQRGAVLATELKNNANKLARWTAQALLAGADMMKLGYVSRVNPRDQYNHSVLTVMGYKPRDFAAQINLNTANMWGIVKSIVDICMKFEEGKYVFVKDPAKPQLRIYEVPSDAFENDYVEEPLPEEEQVRPLGEVDATAEEMDAVAEAEANNVSSANGGEGGKSAEATLA

SEQ ID NO: 13276 - protein, 324 aa, Zea mays subsp. mays
  peptide (1)..(324): Ceres Seq. ID no. 12365143
  misc_feature (1)..(281): Pfam Name: Eukaryotic translation initiation factor 3 Pfam Description: Eukaryotic translation initiation factor 3
  misc_feature (1)..(320): Homolog of NCBI NO: 15241470 NR Description: eukaryotic translation initiation factor 3 eukaryotic translation initiation factor 3 subunit 7 [Arabidopsis
  misc_feature (1)..(310): Homolog of NCBI NO: 15233469 NR Description: translation initiation factor eIF3 - like protein id: At4g20980.1, supported by cDNA: gi_17528987 thaliana] >gi|6685535|sp|P56820|IF37_ARATH Eukaryotic translation
  misc_feature (1)..(310): Homolog of NCBI NO: 17528988 NR Description: putative translation initiation factor eIF3
  misc_feature (1)..(310): Homolog of NCBI NO: 12407755 NR Description: initiation factor 3d [Arabidopsis thaliana]
  misc_feature (1)..(282): Homolog of NCBI NO: 4503523 NR Description: eukaryotic translation initiation factor 3
  misc_feature (1)..(282): Homolog of NCBI NO: 34866902 NR Description: similar to eukaryotic translation initiation (zeta, 66/67kD); translation initiation factor eIF3 p66 subunit
  misc_feature (1)..(282): Homolog of NCBI NO: 26337171 NR Description: unnamed protein product [Mus musculus]
  misc_feature (1)..(283): Homolog of NCBI NO: 27882463 NR Description: Similar to eukaryotic translation initiation
  misc_feature (1)..(281): Homolog of NCBI NO: 24649360 NR Description: Eukaryotic initiation factor 3 p66 subunit
  misc_feature (1)..(282): Homolog of NCBI NO: 38174024 NR Description: Unknown (protein for MGC:75703) [Silurana
MCTPRSILSWDIVVQRVGNKLFLDKRDGSQLDLLTVNETAQEQLPENKDDINSAHSLAVEATYINQNFSQQVLHRNGEKVNFDEPNPFASEGEEAASVGYRYRRWKLNDEISLVARCEVHAVSVDQSGTRQFITVNALNEFDSKITGVDWRQKLETQRGAVLATELKNNANKLARWTAQALLAGADMMKLGYVSRVNPRDQYNHSVLTVMGYKPRDFAAQINLNTANMWGIVKSIVDICMKFEEGKYVFVKDPAKPQLRIYEVPSDAFENDYVEEPLPEEEQVRPLGEVDATAEEMDAVAEAEANNVSSANGGEGGKSAEATLA

SEQ ID NO: 13277 - DNA, 1248 bp, Zea mays subsp. mays
  misc_feature (1)..(1248): Ceres Seq. ID no. 12411333
  misc_feature: MA Experiment ID: 108687 Result: Down-regulated in Transcription
  misc_feature: MA Experiment 108687 PARAMETER Experiment Name: Zm_Embryos-Flowers__P Parameter: Tissue Value: Embryo vs. Aerial+
  misc_feature: MA Experiment ID: 20000535 Result: Down-regulated in Transcription
  misc_feature: MA Experiment 20000535 PARAMETER Experiment Name: Zm_Hybrid_Seed_Dev_P Parameter: DAP Value: 30 vs. 12
  misc_feature: MA Experiment 20000535 PARAMETER Experiment Name: Zm_Hybrid_Seed_Dev_P Parameter: Organism Value: Zea mays
  misc_feature: MA Experiment 20000535 PARAMETER Experiment Name: Zm_Hybrid_Seed_Dev_P Parameter: Plant Line Value: 35A19
  misc_feature: MA Experiment 20000535 PARAMETER Experiment Name: Zm_Hybrid_Seed_Dev_P Parameter: Tissue Value: Embryo vs. Unfert Floret
gagccaattgagtggcagccagaaaaacccagagcgcgagcagcgagcgagcgcgggctcctgtgtgcagtgtgtctgcgctagagggcgaagggcacggaccgccttcgtcaataattgcggtacgaacggggcaaatccgtcgtttaaagaggtcgctgatagcgcctgctggtggcgagagagagaaagcagcagaatcgctgagggatcgtcgatccggagaggcaaaaaagccgagagatcaggcagggcaccatggggcgcgggaaggtggtgctgcagcggatcgagaacaagatcagccggcaggtgaccttcgccaagcgccggaacggcctgctcaagaaggcgtacgagctctccatcctctgcgacgccgaggtcgcgctcgtcctcttctcccacgccggccgcctctaccagttctcatcctcctccaatctgcttaagactctagagcggtaccagaggtacatctatggcttcagccgatgctgcagtgccatctagcgatcagatgcagaataactatcaagaatatgtgaagctgaaggcacgagttgaggttttacagcactcacaaaggaatcttcttggtgaagatctggccctacttagcccaagtgaacttgaccagcttgagaatcaagtagacaagaccttgaagcaaataagatcaagaaagactcaagtgttacttgatgaactttgtgacttaaagagaaaggaacaaatgctgcaagatgcaaacagggttctgaaaaggaagctgggcgagtttgaggcagaggcggcttctcccccgcagttagcgtggcaaggcgaaggcggcatgttgtcccatgaccctccacagccagaacacttcttccaggctctggagagcaacccatgtctgcaacctacataccatacgatggacatgaaccagcagccagtgccagcgccgggcggctgctatcctgcatggatgtcttagccagtgcttcattccattgccttgagaagtgtcctgaccttcacagatccctacgagctttattactgcttttgcctgcccctttgctgcttgcggtgcttactgaactgtccaaatgaccacatggtcatatataggttattgctgtctttatcttatgttgatcacggcctgctcagctgctttagcgccatgcaaaatggcttgggcgatgcacgcttgaatgggtcgaactgcttatgttttgggagtataaatcacttagc

SEQ ID NO: 13278 - protein, 166 aa, Zea mays subsp. mays
  peptide (1)..(166): Ceres Seq. ID no. 12411334
  misc_feature (2)..(100): Pfam Name: K-box region Pfam Description: K-box region
  misc_feature (2)..(166): Homolog of NCBI NO: 29372758 NR Description: m24 [Zea mays]
  misc_feature (2)..(166): Homolog of NCBI NO: 29372762 NR Description: m31 [Zea mays]
  misc_feature (2)..(166): Homolog of NCBI NO: 5295982 NR Description: MADS box-like protein [Oryza sativa (japonica
  misc_feature (2)..(166): Homolog of NCBI NO: 29570318 NR Description: MADS-box transcriptional factor [Triticum
  misc_feature (2)..(166): Homolog of NCBI NO: 28630965 NR Description: MADS7 [Lolium perenne]
  misc_feature (1)..(165): Homolog of NCBI NO: 8567991 NR Description: MADS-box protein MADS4 [Nicotiana tabacum]
  misc_feature (1)..(144): Homolog of NCBI NO: 6467976 NR Description: MADS box protein DOMADS3 [Dendrobium grex Madame
  misc_feature (1)..(165): Homolog of NCBI NO: 13384050 NR Description: MADS-box transcription factor FBP9 [Petunia x
  misc_feature (1)..(165): Homolog of NCBI NO: 33342042 NR Description: MADS-box transcription factor [Houttuynia cordata]
  misc_feature (1)..(165): Homolog of NCBI NO: 20385584 NR Description: MADS-box protein 2 [Vitis vinifera]
MASADAAVPSSDQMQNNYQEYVKLKARVEVLQHSQRNLLGEDLALLSPSELDQLENQVDKTLKQIRSRKTQVLLDELCDLKRKEQMLQDANRVLKRKLGEFEAEAASPPQLAWQGEGGMLSHDPPQPEHFFQALESNPCLQPTYHTMDMNQQPVPAPGGCYPAWMS

SEQ ID NO: 13279 - protein, 153 aa, Zea mays subsp. mays; identical to SEQ ID NO: 5098
  peptide (1)..(153): Ceres Seq. ID no. 12411335
  misc_feature (1)..(87): Pfam Name: K-box region Pfam Description: K-box region
  misc_feature (1)..(153): Homolog of NCBI NO: 29372758 NR Description: m24 [Zea mays]
  misc_feature (1)..(153): Homolog of NCBI NO: 29372762 NR Description: m31 [Zea mays]
  misc_feature (1)..(153): Homolog of NCBI NO: 5295982 NR Description: MADS box-like protein [Oryza sativa (japonica
  misc_feature (1)..(153): Homolog of NCBI NO: 29570318 NR Description: MADS-box transcriptional factor [Triticum
  misc_feature (1)..(153): Homolog of NCBI NO: 28630965 NR Description: MADS7 [Lolium perenne]
  misc_feature (1)..(152): Homolog of NCBI NO: 8567991 NR Description: MADS-box protein MADS4 [Nicotiana tabacum]
  misc_feature (1)..(131): Homolog of NCBI NO: 6467976 NR Description: MADS box protein DOMADS3 [Dendrobium grex Madame
  misc_feature (1)..(152): Homolog of NCBI NO: 13384050 NR Description: MADS-box transcription factor FBP9 [Petunia x
  misc_feature (1)..(152): Homolog of NCBI NO: 33342042 NR Description: MADS-box transcription factor [Houttuynia cordata]
  misc_feature (1)..(152): Homolog of NCBI NO: 20385584 NR Description: MADS-box protein 2 [Vitis vinifera]

SEQ ID NO: 13280 - protein, 104 aa, Zea mays subsp. mays
  peptide (1)..(104): Ceres Seq. ID no. 12411336
SQLSGSQKNPEREQRASAGSCVQCVCARGRRARTAFVNNCGTNGANPSFKEVADSACWWRERESSRIAEGSSIRRGKKAERSGRAPWGAGRWCCSGSRTRSAGR

SEQ ID NO: 13281 - DNA, 1233 bp, Zea mays subsp. mays; identical to SEQ ID NO: 2545
  misc_feature (1)..(1233): Ceres Seq. ID no. 13564187
  misc_feature: MA Experiment ID: 108536 Result: Up-regulated in Transcription
  misc_feature: MA Experiment 108536 PARAMETER Experiment Name: Zm_Meristem_P Parameter: Age (day) Value: 8
  misc_feature: MA Experiment 108536 PARAMETER Experiment Name: Zm_Meristem_P Parameter: Organism Value: Zea mays
  misc_feature: MA Experiment 108536 PARAMETER Experiment Name: Zm_Meristem_P Parameter: Plant Line Value: 35A19
  misc_feature: MA Experiment 108536 PARAMETER Experiment Name: Zm_Meristem_P Parameter: Tissue Value: Shoot Meristem vs. Above Shoot Meristem

SEQ ID NO: 13282 - protein, 267 aa, Zea mays subsp. mays; identical to SEQ ID NO: 2546
  peptide (1)..(267): Ceres Seq. ID no. 13564188
  misc_feature (1)..(267): Homolog of NCBI NO: 11385533 NR Description: glutathione S-transferase GST 41 [Zea mays]
  misc_feature (1)..(267): Homolog of NCBI NO: 11385533 NR Description: glutathione S-transferase GST 41 [Zea mays]
  misc_feature (1)..(267): Homolog of NCBI NO: 11385533 NR Description: glutathione S-transferase GST 41 [Zea mays]

SEQ ID NO: 13283 - protein, 251 aa, Zea mays subsp. mays; identical to SEQ ID NO: 2547
  peptide (1)..(251): Ceres Seq. ID no. 13564189
  misc_feature (1)..(251): Homolog of NCBI NO: 11385533 NR Description: glutathione S-transferase GST 41 [Zea mays]
  misc_feature (1)..(251): Homolog of NCBI NO: 11385533 NR Description: glutathione S-transferase GST 41 [Zea mays]
  misc_feature (1)..(251): Homolog of NCBI NO: 11385533 NR Description: glutathione S-transferase GST 41 [Zea mays]

SEQ ID NO: 13284 - DNA, 1479 bp, Zea mays subsp. mays
  misc_feature (1)..(1479): Ceres Seq. ID no. 12355763
  misc_feature: MA Experiment ID: 108527 Result: Down-regulated in Transcription
  misc_feature: MA Experiment 108527 PARAMETER Experiment Name: Zm_5mM_NO_P Parameter: Age (day) Value: 8
  misc_feature: MA Experiment 108527 PARAMETER Experiment Name: Zm_5mM_NO_P Parameter: Organism Value: Zea mays
  misc_feature: MA Experiment 108527 PARAMETER Experiment Name: Zm_5mM_NO_P Parameter: Plant Line Value: 35A19
  misc_feature: MA Experiment 108527 PARAMETER Experiment Name: Zm_5mM_NO_P Parameter: Timepoint (hr) Value: 6
  misc_feature: MA Experiment 108527 PARAMETER Experiment Name: Zm_5mM_NO_P Parameter: Tissue Value: Aerial
  misc_feature: MA Experiment 108527 PARAMETER Experiment Name: Zm_5mM_NO_P Parameter: Treatment Value: 5mM NO vs. No Treatment
  misc_feature: MA Experiment ID: 108528 Result: Up-regulated in Transcription
  misc_feature: MA Experiment 108528 PARAMETER Experiment Name: Zm_Imbibed_Seeds_P Parameter: Age (day) Value: 5 vs. 2
  misc_feature: MA Experiment 108528 PARAMETER Experiment Name: Zm_Imbibed_Seeds_P Parameter: Organism Value: Zea mays
  misc_feature: MA Experiment 108528 PARAMETER Experiment Name: Zm_Imbibed_Seeds_P Parameter: Plant Line Value: 35A19
  misc_feature: MA Experiment 108528 PARAMETER Experiment Name: Zm_Imbibed_Seeds_P Parameter: Tissue Value: Aerial vs. Embryo
  misc_feature: MA Experiment ID: 108530 Result: Up-regulated in Transcription
  misc_feature: MA Experiment 108530 PARAMETER Experiment Name: Zm_Imbibed_Seeds_P Parameter: Age (day) Value: 6 vs. 2
  misc_feature: MA Experiment 108530 PARAMETER Experiment Name: Zm_Imbibed_Seeds_P Parameter: Organism Value: Zea mays
  misc_feature: MA Experiment 108530 PARAMETER Experiment Name: Zm_Imbibed_Seeds_P Parameter: Plant Line Value: 35A19
  misc_feature: MA Experiment 108530 PARAMETER Experiment Name: Zm_Imbibed_Seeds_P Parameter: Tissue Value: Aerial vs. Embryo
  misc_feature: MA Experiment ID: 108535 Result: Down-regulated in Transcription
  misc_feature: MA Experiment 108535 PARAMETER Experiment Name: Zm_Meristem_P Parameter: Age (day) Value: 8
  misc_feature: MA Experiment 108535 PARAMETER Experiment Name: Zm_Meristem_P Parameter: Organism Value: Zea mays
  misc_feature: MA Experiment 108535 PARAMETER Experiment Name: Zm_Meristem_P Parameter: Plant Line Value: 35A19
  misc_feature: MA Experiment 108535 PARAMETER Experiment Name: Zm_Meristem_P Parameter: Tissue Value: Root Meristem vs. Above Root Meristem
  misc_feature: MA Experiment ID: 108544 Result: Up-regulated in Transcription
  misc_feature: MA Experiment ID: 108545 Result: Up-regulated in Transcription
  misc_feature: MA Experiment 108545 PARAMETER Experiment Name: Zm_Imbibed_Seeds_P Parameter: Age (day) Value: 3 vs. 2
  misc_feature: MA Experiment 108545 PARAMETER Experiment Name: Zm_Imbibed_Seeds_P Parameter: Organism Value: Zea mays
  misc_feature: MA Experiment 108545 PARAMETER Experiment Name: Zm_Imbibed_Seeds_P Parameter: Plant Line Value: 35A19
  misc_feature: MA Experiment 108545 PARAMETER Experiment Name: Zm_Imbibed_Seeds_P Parameter: Tissue Value: Aerial vs. Embryo
  misc_feature: MA Experiment ID: 108547 Result: Up-regulated in Transcription
  misc_feature: MA Experiment 108547 PARAMETER Experiment Name: Zm_Imbibed_Seeds_P Parameter: Age (day) Value: 4 vs. 2
  misc_feature: MA Experiment 108547 PARAMETER Experiment Name: Zm_Imbibed_Seeds_P Parameter: Organism Value: Zea mays
  misc_feature: MA Experiment 108547 PARAMETER Experiment Name: Zm_Imbibed_Seeds_P Parameter: Plant Line Value: 35A19
  misc_feature: MA Experiment 108547 PARAMETER Experiment Name: Zm_Imbibed_Seeds_P Parameter: Tissue Value: Aerial vs. Embryo
  misc_feature: MA Experiment ID: 108559 Result: Down-regulated in Transcription
  misc_feature: MA Experiment 108559 PARAMETER Experiment Name: Zm_5mM_NO_P Parameter: Age (day) Value: 8
  misc_feature: MA Experiment 108559 PARAMETER Experiment Name: Zm_5mM_NO_P Parameter: Organism Value: Zea mays
  misc_feature: MA Experiment 108559 PARAMETER Experiment Name: Zm_5mM_NO_P Parameter: Plant Line Value: 35A19
  misc_feature: MA Experiment 108559 PARAMETER Experiment Name: Zm_5mM_NO_P Parameter: Timepoint (hr) Value: 12
  misc_feature: MA Experiment 108559 PARAMETER Experiment Name: Zm_5mM_NO_P Parameter: Tissue Value: Aerial
  misc_feature: MA Experiment 108559 PARAMETER Experiment Name: Zm_5mM_NO_P Parameter: Treatment Value: 5mM NO vs. No Treatment
  misc_feature: MA Experiment ID: 108687 Result: Down-regulated in Transcription
  misc_feature: MA Experiment 108687 PARAMETER Experiment Name: Zm_Embryos-Flowers__P Parameter: Tissue Value: Embryo vs. Aerial+
  misc_feature: MA Experiment ID: 20000535 Result: Down-regulated in Transcription
  misc_feature: MA Experiment 20000535 PARAMETER Experiment Name: Zm_Hybrid_Seed_Dev_P Parameter: DAP Value: 30 vs. 12
  misc_feature: MA Experiment 20000535 PARAMETER Experiment Name: Zm_Hybrid_Seed_Dev_P Parameter: Organism Value: Zea mays
  misc_feature: MA Experiment 20000535 PARAMETER Experiment Name: Zm_Hybrid_Seed_Dev_P Parameter: Plant Line Value: 35A19
  misc_feature: MA Experiment 20000535 PARAMETER Experiment Name: Zm_Hybrid_Seed_Dev_P Parameter: Tissue Value: Embryo vs. Unfert Floret
actgccactgtacttgtgttgtgttgtgctgtgctgtgctgcgagaagaaggagaagcagaggaagagcaggtgctgagaagcctgccggcgcgcgttacgacaagcatatatgggggagatcaccaatgtcatggagtaccaggccatcgccaagcagaagcttccgaagatggcctacgactactacgcgtccggcgccgaggacgagtggacgctgcaggagaacagggaggccttctccaggatcttgttccgtccgcgcatactgatcgacgtgtccaagatcgacatgaccaccaccgtgctggggttcaagatctccatgcccatcatggtcgcccccactgctatgcagaagatggctcacccagatggggagaacgccactgcgcgcgcggcggctgcggcaggcaccataatgacactgtcgtcctgggcaacttcaagcgtcgaggaggttgcctcgaccgggccagggatccgcttcttccagctatacgtctacaaggacaggaaggtggtggagcagctggtgaggcgagctgaaagagctgggttcaaggccatcgcgctcaccgtcgacacgccgcgccttggccgcagggaagctgacatcaagaacagattcgtcctgccaccacacctgacgctcaagaacttcgaaggtctggacctcggcaaaatggaccaggctgctgattcagggctggcttcctatgtcgccggccaagtcgaccgcaccctgagctggaaagacgtcaagtagttgcagaccatcaccacgctgccgatcctcgtcaagggagtgctcaccgctgaagacacgaggcttgcggtggcgaacggcgcggcggggatcatcgtgtcgaaccacggcgcgcggcagctggactacgtgccggcgaccatcagcgcgctggaggaggtcgtgaaggccgcccggggccacctccccgtgttcgtcgacggtggcgtccgccgcggcaccgacgtcttcaaggcgctcgcgctcggcgccgccggcgtattcgtcgggaggccggtggtgttctccctggcggcggcgggcgaggccggcgtgtccaacgtcctgcgcatgctgcgggacgagttcgagctcaccatggcgctcagcggctgcacctccctcgccgaaatcacccgcaagcacatcatcaccgagtccgacaagctcagcgccatcccgtcgcgcttgtagatgaggcaaaatcaatcgcctgctacgccgccggtcgatcggggatagtcagctcgtgcatggatgcatgcatgcgtgctcgatgtcgatgacgatgatgataccatatataatctaggactgcgcatatatatattttgttccagaaatgatcgatcactgtactgtactgtaaaatcttatagattattacacgcatggtgtgcgctgcatcttcattagttgttaataatggcgcacacatggtgatctctctgc

SEQ ID NO: 13285 - protein, 218 aa, Zea mays subsp. mays
  peptide (1)..(218): Ceres Seq. ID no. 12355764
  misc_feature (14)..(218): Pfam Name: FMN-dependent dehydrogenase Pfam Description: FMN-dependent dehydrogenase
  misc_feature (3)..(218): Homolog of NCBI NO: 15231850 NR Description: glycolate oxidase, putative; protein id: supported by cDNA: gi_15450740, supported by cDNA: gi_16226422, by cDNA: gi_16226771, supported by cDNA: gi_16604393, supported
  misc_feature (3)..(218): Homolog of NCBI NO: 16226772 NR Description: AT3g14420/MOA2_2 [Arabidopsis thaliana]
  misc_feature (3)..(218): Homolog of NCBI NO: 27549566 NR Description: glycolate oxidase [Zantedeschia aethiopica]
  misc_feature (3)..(218): Homolog of NCBI NO: 15229497 NR Description: glycolate oxidase; protein id: At3g14415.1
  misc_feature (3)..(218): Homolog of NCBI NO: 7431428 NR Description: (S)-2-hydroxy-acid oxidase (EC 1.1.3.15) - >gi|217909|dbj|BAA03131.1| glycolate oxidase [Cucurbita cv.
  misc_feature (3)..(218): Homolog of NCBI NO: 1773330 NR Description: glycolate oxidase [Mesembryanthemum crystallinum]
  misc_feature (3)..(218): Homolog of NCBI NO: 121530 NR Description: (S)-2-hydroxy-acid oxidase, peroxisomal
  misc_feature (3)..(218): Homolog of NCBI NO: 2554675 NR Description: Three-Dimensional Structure Of Glycolate Oxidase
  misc_feature (3)..(218): Homolog of NCBI NO: 228403 NR Description: glycolate oxidase
  misc_feature (3)..(218): Homolog of NCBI NO: 999542 NR Description: Chain A, Glycolate Oxidase (E.C.1.1.3.15) Mutant Tyr 24 Replaced By Phe (Y24f) >gi|999543|pdb|1GYL|B Chain B,
MGEITNVMEYQAIAKQKLPKMAYDYYASGAEDEWTLQENREAFSRILFRPRILIDVSKIDMTTTVLGFKISMPIMVAPTAMQKMAHPDGENATARAAAAAGTIMTLSSWATSSVEEVASTGPGIRFFQLYVYKDRKVVEQLVRRAERAGFKAIALTVDTPRLGRREADIKNRFVLPPHLTLKNFEGLDLGKMDQAADSGLASYVAGQVDRTLSWKDVK

SEQ ID NO: 13286 - protein, 211 aa, Zea mays subsp. mays
  peptide (1)..(211): Ceres Seq. ID no. 12355765
  misc_feature (7)..(211): Pfam Name: FMN-dependent dehydrogenase Pfam Description: FMN-dependent dehydrogenase
  misc_feature (1)..(211): Homolog of NCBI NO: 15231850 NR Description: glycolate oxidase, putative; protein id: supported by cDNA: gi_15450740, supported by cDNA: gi_16226422, by cDNA: gi_16226771, supported by cDNA: gi_16604393, supported
  misc_feature (1)..(211): Homolog of NCBI NO: 16226772 NR Description: AT3g14420/MOA2_2 [Arabidopsis thaliana]
  misc_feature (1)..(211): Homolog of NCBI NO: 27549566 NR Description: glycolate oxidase [Zantedeschia aethiopica]
  misc_feature (1)..(211): Homolog of NCBI NO: 15229497 NR Description: glycolate oxidase; protein id: At3g14415.1
  misc_feature (1)..(211): Homolog of NCBI NO: 7431428 NR Description: (S)-2-hydroxy-acid oxidase (EC 1.1.3.15) - >gi|217909|dbj|BAA03131.1| glycolate oxidase [Cucurbita cv.
  misc_feature (1)..(211): Homolog of NCBI NO: 1773330 NR Description: glycolate oxidase [Mesembryanthemum crystallinum]
  misc_feature (1)..(211): Homolog of NCBI NO: 121530 NR Description: (S)-2-hydroxy-acid oxidase, peroxisomal
  misc_feature (1)..(211): Homolog of NCBI NO: 2554675 NR Description: Three-Dimensional Structure Of Glycolate Oxidase
  misc_feature (1)..(211): Homolog of NCBI NO: 228403 NR Description: glycolate oxidase
  misc_feature (1)..(211): Homolog of NCBI NO: 999542 NR Description: Chain A, Glycolate Oxidase (E.C.1.1.3.15) Mutant Tyr 24 Replaced By Phe (Y24f) >gi|999543|pdb|1GYL|B Chain B,
MEYQAIAKQKLPKMAYDYYASGAEDEWTLQENREAFSRILFRPRILIDVSKIDMTTTVLGFKISMPIMVAPTAMQKMAHPDGENATARAAAAAGTIMTLSSWATSSVEEVASTGPGIRFFQLYVYKDRKVVEQLVRRAERAGFKAIALTVDTPRLGRREADIKNRFVLPPHLTLKNFEGLDLGKMDQAADSGLASYVAGQVDRTLSWKDVK

SEQ ID NO: 13287 - protein, 198 aa, Zea mays subsp. mays
  peptide (1)..(198): Ceres Seq. ID no. 12355766
  misc_feature (1)..(198): Pfam Name: FMN-dependent dehydrogenase Pfam Description: FMN-dependent dehydrogenase
  misc_feature (1)..(198): Homolog of NCBI NO: 1773330 NR Description: glycolate oxidase [Mesembryanthemum crystallinum]
  misc_feature (1)..(198): Homolog of NCBI NO: 121530 NR Description: (S)-2-hydroxy-acid oxidase, peroxisomal
  misc_feature (1)..(198): Homolog of NCBI NO: 2554675 NR Description: Three-Dimensional Structure Of Glycolate Oxidase
  misc_feature (1)..(198): Homolog of NCBI NO: 16226772 NR Description: AT3g14420/MOA2_2 [Arabidopsis thaliana]
  misc_feature (1)..(198): Homolog of NCBI NO: 15229497 NR Description: glycolate oxidase; protein id: At3g14415.1
  misc_feature (1)..(198): Homolog of NCBI NO: 7431428 NR Description: (S)-2-hydroxy-acid oxidase (EC 1.1.3.15) - >gi|217909|dbj|BAA03131.1| glycolate oxidase [Cucurbita cv.
  misc_feature (1)..(198): Homolog of NCBI NO: 27549566 NR Description: glycolate oxidase [Zantedeschia aethiopica]
  misc_feature (1)..(198): Homolog of NCBI NO: 15231850 NR Description: glycolate oxidase, putative; protein id: supported by cDNA: gi_15450740, supported by cDNA: gi_16226422, by cDNA: gi_16226771, supported by cDNA: gi_16604393, supported
  misc_feature (1)..(198): Homolog of NCBI NO: 228403 NR Description: glycolate oxidase
  misc_feature (1)..(198): Homolog of NCBI NO: 999542 NR Description: Chain A, Glycolate Oxidase (E.C.1.1.3.15) Mutant Tyr 24 Replaced By Phe (Y24f) >gi|999543|pdb|1GYL|B Chain B,
MAYDYYASGAEDEWTLQENREAFSRILFRPRILIDVSKIDMTTTVLGFKISMPIMVAPTAMQKMAHPDGENATARAAAAAGTIMTLSSWATSSVEEVASTGPGIRFFQLYVYKDRKVVEQLVRRAERAGFKAIALTVDTPRLGRREADIKNRFVLPPHLTLKNFEGLDLGKMDQAADSGLASYVAGQVDRTLSWKDVK

SEQ ID NO: 13288 - DNA, 992 bp, Zea mays subsp. mays
  misc_feature (1)..(992): Ceres Seq. ID no. 12412778
  misc_feature: MA Experiment ID: 108527 Result: Down-regulated in Transcription
  misc_feature: MA Experiment 108527 PARAMETER Experiment Name: Zm_5mM_NO_P Parameter: Age (day) Value: 8
  misc_feature: MA Experiment 108527 PARAMETER Experiment Name: Zm_5mM_NO_P Parameter: Organism Value: Zea mays
  misc_feature: MA Experiment 108527 PARAMETER Experiment Name: Zm_5mM_NO_P Parameter: Plant Line Value: 35A19
  misc_feature: MA Experiment 108527 PARAMETER Experiment Name: Zm_5mM_NO_P Parameter: Timepoint (hr) Value: 6
  misc_feature: MA Experiment 108527 PARAMETER Experiment Name: Zm_5mM_NO_P Parameter: Tissue Value: Aerial
  misc_feature: MA Experiment 108527 PARAMETER Experiment Name: Zm_5mM_NO_P Parameter: Treatment Value: 5mM NO vs. No Treatment
  misc_feature: MA Experiment ID: 108530 Result: Up-regulated in Transcription
  misc_feature: MA Experiment 108530 PARAMETER Experiment Name: Zm_Imbibed_Seeds_P Parameter: Age (day) Value: 6 vs. 2
  misc_feature: MA Experiment 108530 PARAMETER Experiment Name: Zm_Imbibed_Seeds_P Parameter: Organism Value: Zea mays
  misc_feature: MA Experiment 108530 PARAMETER Experiment Name: Zm_Imbibed_Seeds_P Parameter: Plant Line Value: 35A19
  misc_feature: MA Experiment 108530 PARAMETER Experiment Name: Zm_Imbibed_Seeds_P Parameter: Tissue Value: Aerial vs. Embryo
  misc_feature: MA Experiment ID: 108534 Result: Up-regulated in Transcription
  misc_feature: MA Experiment 108534 PARAMETER Experiment Name: Zm_4deg_Cold_P Parameter: Age (hr) Value: 8
  misc_feature: MA Experiment 108534 PARAMETER Experiment Name: Zm_4deg_Cold_P Parameter: Organism Value: Zea mays
  misc_feature: MA Experiment 108534 PARAMETER Experiment Name: Zm_4deg_Cold_P Parameter: Plant Line Value: 35A19
  misc_feature: MA Experiment 108534 PARAMETER Experiment Name: Zm_4deg_Cold_P Parameter: Temperature (deg C) Value: 4 vs. 22
  misc_feature: MA Experiment 108534 PARAMETER Experiment Name: Zm_4deg_Cold_P Parameter: Timepoint (hr) Value: 6
  misc_feature: MA Experiment 108534 PARAMETER Experiment Name: Zm_4deg_Cold_P Parameter: Tissue Value: Aerial
  misc_feature: MA Experiment ID: 108536 Result: Up-regulated in Transcription
  misc_feature: MA Experiment 108536 PARAMETER Experiment Name: Zm_Meristem_P Parameter: Age (day) Value: 8
  misc_feature: MA Experiment 108536 PARAMETER Experiment Name: Zm_Meristem_P Parameter: Organism Value: Zea mays
  misc_feature: MA Experiment 108536 PARAMETER Experiment Name: Zm_Meristem_P Parameter: Plant Line Value: 35A19
  misc_feature: MA Experiment 108536 PARAMETER Experiment Name: Zm_Meristem_P Parameter: Tissue Value: Shoot Meristem vs. Above Shoot Meristem
  misc_feature: MA Experiment ID: 108543 Result: Down-regulated in Transcription
  misc_feature: MA Experiment ID: 108597 Result: Down-regulated in Transcription
  misc_feature: MA Experiment 108597 PARAMETER Experiment Name: Zm_100uM_ABA_P Parameter: Age (day) Value: 9
  misc_feature: MA Experiment 108597 PARAMETER Experiment Name: Zm_100uM_ABA_P Parameter: Organism Value: Zea mays
  misc_feature: MA Experiment 108597 PARAMETER Experiment Name: Zm_100uM_ABA_P Parameter: Plant Line Value: 35A19
  misc_feature: MA Experiment 108597 PARAMETER Experiment Name: Zm_100uM_ABA_P Parameter: Timepoint (hr) Value: 24
  misc_feature: MA Experiment 108597 PARAMETER Experiment Name: Zm_100uM_ABA_P Parameter: Tissue Value: Aerial
  misc_feature: MA Experiment 108597 PARAMETER Experiment Name: Zm_100uM_ABA_P Parameter: Treatment Value: 100uM ABA vs. No Treatment
  misc_feature: MA Experiment ID: 108688 Result: Down-regulated in Transcription
  misc_feature: MA Experiment 108688 PARAMETER Experiment Name: Zm_Embryos-Flowers__P Parameter: Tissue Value: Immature Flowers vs. Aerial+
  misc_feature: MA Experiment ID: 20001610 Result: Up-regulated in Transcription
  misc_feature: MA Experiment 20001610 PARAMETER Experiment Name: Zm_50ppm_KNO3_L-to-H_P Parameter: Age (day) Value: 19
  misc_feature: MA Experiment 20001610 PARAMETER Experiment Name: Zm_50ppm_KNO3_L-to-H_P Parameter: Organism Value: Zea mays
  misc_feature: MA Experiment 20001610 PARAMETER Experiment Name: Zm_50ppm_KNO3_L-to-H_P Parameter: Plant Line Value: 35A19
  misc_feature: MA Experiment 20001610 PARAMETER Experiment Name: Zm_50ppm_KNO3_L-to-H_P Parameter: Timepoint (hr) Value: 2
  misc_feature: MA Experiment 20001610 PARAMETER Experiment Name: Zm_50ppm_KNO3_L-to-H_P Parameter: Tissue Value: Roots
  misc_feature: MA Experiment 20001610 PARAMETER Experiment Name: Zm_50ppm_KNO3_L-to-H_P Parameter: Treatment Value: 50ppm KNO3 vs. 50ppm KCl
aatccaaatccggctcctcctcctcctcctcctggcactggcagcgaagatccaaagatagcacaatcgcatctcacacgccgagctatttctacttgagagaatcccccttctcccacaaggagcgagtaatttgaggcagagaccgacagagatggcagcagttatggtgtctcgccaaggccgggagctgcagcggtacagcgcgagcacgggcgggcgcgtggtggtgggctgcgtcccgtaccgcgtgcgcgggggcgacggcgaggtggaggtcctggtgatcagctcgcagaagaagggccccgcggggggcgtgctgatccccaagggcgggtgggagctggacgagtccatggacgaggcggcccggcgcgaggccgcggaggaggccggcgtgctcggcgagacgggccccgcgctgggccgctggtgctaccgcagccgcagctacgacgccacgtacgagggcttcgtgctcccgctgcgcgtcaccgcggagctggaccggtggcccgagatggccgcgcgccgcagggagtgggtctccgccgccgaggccatcgcgcgctgcccccacccgtggatgcgcgaggcgctgcagcggttctccgacaccgtcgcggtcgcggcggagacgatgcacctcgcctccgccctctagctctaggcccggccggccgtcgatcgcttccctcttcccgccgcggtctcgtcggaccgcgggcggcctcgcgcgttttttcggccgccgcgcacggacgcggcgcgtgcggggctgccgccgcctgctctgctcgctggattggacggaacacgccatcattcagtcagacaaatctggacgtcgtcgagctgtggcaccaggacgcggcctgtacattgttcttgggggggtctcgttttgaaatacaaacttgtaaatgtcacggagtttaacgagatccactgtggtactctactagtatacaatacacgaagaagaaatg

SEQ ID NO: 13289 - protein, 170 aa, Zea mays subsp. mays
  peptide (1)..(170): Ceres Seq. ID no. 12412779
  misc_feature (23)..(153): Pfam Name: NUDIX domain Pfam Description: NUDIX domain
  misc_feature (1)..(153): Homolog of NCBI NO: 22330598 NR Description: unknown protein; protein id: At1g73540.1, by cDNA: gi_18252868 [Arabidopsis thaliana] unknown protein [Arabidopsis thaliana]
  misc_feature (1)..(153): Homolog of NCBI NO: 25367539 NR Description: unknown protein [imported] - Arabidopsis thaliana
  misc_feature (1)..(160): Homolog of NCBI NO: 15221055 NR Description: unknown protein; protein id: At1g18300.1 thaliana] >gi|6714298|gb|AAF25994.1|AC013354_13 F15H18.18 thaliana] >gi|8671772|gb|AAF78378.1|AC069551_11 T10O22.27
  misc_feature (1)..(150): Homolog of NCBI NO: 18379275 NR Description: expressed protein; protein id: At2g01670.1, by cDNA: 8247., supported by cDNA: gi_13272382, supported by gi_15293192, supported by cDNA: gi_15724325 [Arabidopsis
  misc_feature (5)..(150): Homolog of NCBI NO: 21595695 NR Description: unknown [Arabidopsis thaliana]
  misc_feature (5)..(150): Homolog of NCBI NO: 15223919 NR Description: hypothetical protein; protein id: At1g14860.1
  misc_feature (5)..(150): Homolog of NCBI NO: 38175436 NR Description: MutT-like protein [Oryza sativa (japonica
  misc_feature (5)..(150): Homolog of NCBI NO: 34900054 NR Description: MutT-like protein~contains ESTs
  misc_feature (5)..(150): Homolog of NCBI NO: 18399682 NR Description: expressed protein; protein id: At3g12600.1 thaliana] >gi|9294354|dbj|BAB02251.1| to unknown protein [Arabidopsis thaliana]
  misc_feature (1)..(85): Homolog of NCBI NO: 38605803 NR Description: OSJNBb0014D23.5 [Oryza sativa (japonica
MAAVMVSRQGRELQRYSASTGGRVVVGCVPYRVRGGDGEVEVLVISSQKKGPAGGVLIPKGGWELDESMDEAARREAAEEAGVLGETGPALGRWCYRSRSYDATYEGFVLPLRVTAELDRWPEMAARRREWVSAAEAIARCPHPWMREALQRFSDTVAVAAETMHLASAL

SEQ ID NO: 13290 - protein, 166 aa, Zea mays subsp. mays
  peptide (1)..(166): Ceres Seq. ID no. 12412780
  misc_feature (19)..(149): Pfam Name: NUDIX domain Pfam Description: NUDIX domain
  misc_feature (1)..(149): Homolog of NCBI NO: 22330598 NR Description: unknown protein; protein id: At1g73540.1, by cDNA: gi_18252868 [Arabidopsis thaliana] unknown protein [Arabidopsis thaliana]
  misc_feature (1)..(149): Homolog of NCBI NO: 25367539 NR Description: unknown protein [imported] - Arabidopsis thaliana
  misc_feature (1)..(156): Homolog of NCBI NO: 15221055 NR Description: unknown protein; protein id: At1g18300.1 thaliana] >gi|6714298|gb|AAF25994.1|AC013354_13 F15H18.18 thaliana] >gi|8671772|gb|AAF78378.1|AC069551_11 T10O22.27
  misc_feature (1)..(146): Homolog of NCBI NO: 18379275 NR Description: expressed protein; protein id: At2g01670.1, by cDNA: 8247., supported by cDNA: gi_13272382, supported by gi_15293192, supported by cDNA: gi_15724325 [Arabidopsis
  misc_feature (1)..(146): Homolog of NCBI NO: 21595695 NR Description: unknown [Arabidopsis thaliana]
  misc_feature (1)..(146): Homolog of NCBI NO: 15223919 NR Description: hypothetical protein; protein id: At1g14860.1
  misc_feature (1)..(146): Homolog of NCBI NO: 38175436 NR Description: MutT-like protein [Oryza sativa (japonica
  misc_feature (1)..(146): Homolog of NCBI NO: 34900054 NR Description: MutT-like protein~contains ESTs
  misc_feature (1)..(146): Homolog of NCBI NO: 18399682 NR Description: expressed protein; protein id: At3g12600.1 thaliana] >gi|9294354|dbj|BAB02251.1| to unknown protein [Arabidopsis thaliana]
  misc_feature (1)..(81): Homolog of NCBI NO: 38605803 NR Description: OSJNBb0014D23.5 [Oryza sativa (japonica
MVSRQGRELQRYSASTGGRVVVGCVPYRVRGGDGEVEVLVISSQKKGPAGGVLIPKGGWELDESMDEAARREAAEEAGVLGETGPALGRWCYRSRSYDATYEGFVLPLRVTAELDRWPEMAARRREWVSAAEAIARCPHPWMREALQRFSDTVAVAAETMHLASAL

SEQ ID NO: 13291 - protein, 102 aa, Zea mays subsp. mays
  peptide (1)..(102): Ceres Seq. ID no. 12412781
  misc_feature (1)..(85): Pfam Name: NUDIX domain Pfam Description: NUDIX domain
  misc_feature (1)..(85): Homolog of NCBI NO: 22330598 NR Description: unknown protein; protein id: At1g73540.1, by cDNA: gi_18252868 [Arabidopsis thaliana] unknown protein [Arabidopsis thaliana]
  misc_feature (1)..(85): Homolog of NCBI NO: 25367539 NR Description: unknown protein [imported] - Arabidopsis thaliana
  misc_feature (1)..(92): Homolog of NCBI NO: 15221055 NR Description: unknown protein; protein id: At1g18300.1 thaliana] >gi|6714298|gb|AAF25994.1|AC013354_13 F15H18.18 thaliana] >gi|8671772|gb|AAF78378.1|AC069551_11 T10O22.27
  misc_feature (1)..(82): Homolog of NCBI NO: 18379275 NR Description: expressed protein; protein id: At2g01670.1, by cDNA: 8247., supported by cDNA: gi_13272382, supported by gi_15293192, supported by cDNA: gi_15724325 [Arabidopsis
  misc_feature (1)..(82): Homolog of NCBI NO: 21595695 NR Description: unknown [Arabidopsis thaliana]
  misc_feature (1)..(82): Homolog of NCBI NO: 15223919 NR Description: hypothetical protein; protein id: At1g14860.1
  misc_feature (1)..(82): Homolog of NCBI NO: 38175436 NR Description: MutT-like protein [Oryza sativa (japonica
  misc_feature (1)..(82): Homolog of NCBI NO: 34900054 NR Description: MutT-like protein~contains ESTs
  misc_feature (1)..(82): Homolog of NCBI NO: 18399682 NR Description: expressed protein; protein id: At3g12600.1 thaliana] >gi|9294354|dbj|BAB02251.1| to unknown protein [Arabidopsis thaliana]
  misc_feature (1)..(17): Homolog of NCBI NO: 38605803 NR Description: OSJNBb0014D23.5 [Oryza sativa (japonica
MDEAARREAAEEAGVLGETGPALGRWCYRSRSYDATYEGFVLPLRVTAELDRWPEMAARRREWVSAAEAIARCPHPWMREALQRFSDTVAVAAETMHLASAL

SEQ ID NO: 13292 - DNA, 1648 bp, Zea mays subsp. mays
  misc_feature (1)..(1648): Ceres Seq. ID no. 12355441
  misc_feature: MA Experiment ID: 108523 Result: Down-regulated in Transcription
  misc_feature: MA Experiment 108523 PARAMETER Experiment Name: Zm_42deg_Heat_P Parameter: Age (day) Value: 8
  misc_feature: MA Experiment 108523 PARAMETER Experiment Name: Zm_42deg_Heat_P Parameter: Organism Value: Zea mays
  misc_feature: MA Experiment 108523 PARAMETER Experiment Name: Zm_42deg_Heat_P Parameter: Plant Line Value: 35A19
  misc_feature: MA Experiment 108523 PARAMETER Experiment Name: Zm_42deg_Heat_P Parameter: Temperature (deg C) Value: 42 vs. 22
  misc_feature: MA Experiment 108523 PARAMETER Experiment Name: Zm_42deg_Heat_P Parameter: Timepoint (hr) Value: 6
  misc_feature: MA Experiment 108523 PARAMETER Experiment Name: Zm_42deg_Heat_P Parameter: Tissue Value: Aerial
  misc_feature: MA Experiment ID: 108528 Result: Up-regulated in Transcription
  misc_feature: MA Experiment 108528 PARAMETER Experiment Name: Zm_Imbibed_Seeds_P Parameter: Age (day) Value: 5 vs. 2
  misc_feature: MA Experiment 108528 PARAMETER Experiment Name: Zm_Imbibed_Seeds_P Parameter: Organism Value: Zea mays
  misc_feature: MA Experiment 108528 PARAMETER Experiment Name: Zm_Imbibed_Seeds_P Parameter: Plant Line Value: 35A19
  misc_feature: MA Experiment 108528 PARAMETER Experiment Name: Zm_Imbibed_Seeds_P Parameter: Tissue Value: Aerial vs. Embryo
  misc_feature: MA Experiment ID: 108530 Result: Up-regulated in Transcription
  misc_feature: MA Experiment 108530 PARAMETER Experiment Name: Zm_Imbibed_Seeds_P Parameter: Age (day) Value: 6 vs. 2
  misc_feature: MA Experiment 108530 PARAMETER Experiment Name: Zm_Imbibed_Seeds_P Parameter: Organism Value: Zea mays
  misc_feature: MA Experiment 108530 PARAMETER Experiment Name: Zm_Imbibed_Seeds_P Parameter: Plant Line Value: 35A19
  misc_feature: MA Experiment 108530 PARAMETER Experiment Name: Zm_Imbibed_Seeds_P Parameter: Tissue Value: Aerial vs. Embryo
  misc_feature: MA Experiment ID: 108536 Result: Down-regulated in Transcription
  misc_feature: MA Experiment 108536 PARAMETER Experiment Name: Zm_Meristem_P Parameter: Age (day) Value: 8
  misc_feature: MA Experiment 108536 PARAMETER Experiment Name: Zm_Meristem_P Parameter: Organism Value: Zea mays
  misc_feature: MA Experiment 108536 PARAMETER Experiment Name: Zm_Meristem_P Parameter: Plant Line Value: 35A19
  misc_feature: MA Experiment 108536 PARAMETER Experiment Name: Zm_Meristem_P Parameter: Tissue Value: Shoot Meristem vs. Above Shoot Meristem
  misc_feature: MA Experiment ID: 108545 Result: Up-regulated in Transcription
  misc_feature: MA Experiment 108545 PARAMETER Experiment Name: Zm_Imbibed_Seeds_P Parameter: Age (day) Value: 3 vs. 2
  misc_feature: MA Experiment 108545 PARAMETER Experiment Name: Zm_Imbibed_Seeds_P Parameter: Organism Value: Zea mays
  misc_feature: MA Experiment 108545 PARAMETER Experiment Name: Zm_Imbibed_Seeds_P Parameter: Plant Line Value: 35A19
  misc_feature: MA Experiment 108545 PARAMETER Experiment Name: Zm_Imbibed_Seeds_P Parameter: Tissue Value: Aerial vs. Embryo
  misc_feature: MA Experiment ID: 108547 Result: Up-regulated in Transcription
  misc_feature: MA Experiment 108547 PARAMETER Experiment Name: Zm_Imbibed_Seeds_P Parameter: Age (day) Value: 4 vs. 2
  misc_feature: MA Experiment 108547 PARAMETER Experiment Name: Zm_Imbibed_Seeds_P Parameter: Organism Value: Zea mays
  misc_feature: MA Experiment 108547 PARAMETER Experiment Name: Zm_Imbibed_Seeds_P Parameter: Plant Line Value: 35A19
  misc_feature: MA Experiment 108547 PARAMETER Experiment Name: Zm_Imbibed_Seeds_P Parameter: Tissue Value: Aerial vs. Embryo
  misc_feature: MA Experiment ID: 108687 Result: Down-regulated in Transcription
  misc_feature: MA Experiment 108687 PARAMETER Experiment Name: Zm_Embryos-Flowers__P Parameter: Tissue Value: Embryo vs. Aerial+
  misc_feature: MA Experiment ID: 20000479 Result: Down-regulated in Transcription
  misc_feature: MA Experiment 20000479 PARAMETER Experiment Name: Zm_Drought_P Parameter: Age (day) Value: 10
  misc_feature: MA Experiment 20000479 PARAMETER Experiment Name: Zm_Drought_P Parameter: Organism Value: Zea mays
  misc_feature: MA Experiment 20000479 PARAMETER Experiment Name: Zm_Drought_P Parameter: Plant Line Value: 35A19
  misc_feature: MA Experiment 20000479 PARAMETER Experiment Name: Zm_Drought_P Parameter: Timepoint (hr) Value: 48
  misc_feature: MA Experiment 20000479 PARAMETER Experiment Name: Zm_Drought_P Parameter: Tissue Value: Aerial
  misc_feature: MA Experiment 20000479 PARAMETER Experiment Name: Zm_Drought_P Parameter: Treatment Value: Drought vs. No Drought
  misc_feature: MA Experiment ID: 20000480 Result: Down-regulated in Transcription
  misc_feature: MA Experiment 20000480 PARAMETER Experiment Name: Zm_Drought_P Parameter: Age (day) Value: 11
  misc_feature: MA Experiment 20000480 PARAMETER Experiment Name: Zm_Drought_P Parameter: Organism Value: Zea mays
  misc_feature: MA Experiment 20000480 PARAMETER Experiment Name: Zm_Drought_P Parameter: Plant Line Value: 35A19
  misc_feature: MA Experiment 20000480 PARAMETER Experiment Name: Zm_Drought_P Parameter: Timepoint (hr) Value: 72
  misc_feature: MA Experiment 20000480 PARAMETER Experiment Name: Zm_Drought_P Parameter: Tissue Value: Aerial
  misc_feature: MA Experiment 20000480 PARAMETER Experiment Name: Zm_Drought_P Parameter: Treatment Value: Drought vs. No Drought
  misc_feature: MA Experiment ID: 20000534 Result: Down-regulated in Transcription
  misc_feature: MA Experiment 20000534 PARAMETER Experiment Name: Zm_Hybrid_Pollen_P Parameter: Age (day) Value: 8
  misc_feature: MA Experiment 20000534 PARAMETER Experiment Name: Zm_Hybrid_Pollen_P Parameter: Organism Value: Zea mays
  misc_feature: MA Experiment 20000534 PARAMETER Experiment Name: Zm_Hybrid_Pollen_P Parameter: Plant Line Value: 35A19
  misc_feature: MA Experiment 20000534 PARAMETER Experiment Name: Zm_Hybrid_Pollen_P Parameter: Tissue Value: Pollen vs. Aerial
  misc_feature: MA Experiment ID: 20000535 Result: Down-regulated in Transcription
  misc_feature: MA Experiment 20000535 PARAMETER Experiment Name: Zm_Hybrid_Seed_Dev_P Parameter: DAP Value: 30 vs. 12
  misc_feature: MA Experiment 20000535 PARAMETER Experiment Name: Zm_Hybrid_Seed_Dev_P Parameter: Organism Value: Zea mays
  misc_feature: MA Experiment 20000535 PARAMETER Experiment Name: Zm_Hybrid_Seed_Dev_P Parameter: Plant Line Value: 35A19
  misc_feature: MA Experiment 20000535 PARAMETER Experiment Name: Zm_Hybrid_Seed_Dev_P Parameter: Tissue Value: Embryo vs. Unfert Floret
  misc_feature: MA Experiment ID: 20000626 Result: Down-regulated in Transcription
  misc_feature: MA Experiment 20000626 PARAMETER Experiment Name: Zm_Herbicide-Treatments_P Parameter: Timepoint (hr) Value: 12
  misc_feature: MA Experiment 20000626 PARAMETER Experiment Name: Zm_Herbicide-Treatments_P Parameter: Tissue Value: Aerial
  misc_feature: MA Experiment 20000626 PARAMETER Experiment Name: Zm_Herbicide-Treatments_P Parameter: Treatment Value: Roundup vs. No Treatment
acacagctagcaggccggcctgcgtatttcggcactgctagcacaatcacttcacagccatgccgcttgttctgctagtgctgctgctgctcttgtcctgttcttctccagttgccctgctagcagcagcgcatgaacatgacgagtacacactcgtggcgaagagctcgctgaaacccaaagctacgtgcaccggatacagggtgtctccaccccagaacatcacgtgggttccattgaacgcccctcacgggccgtgctcgccattgccgggctcggcggcgccgtccttggccgcgctgctcctccacgaccagctccgcgtcgacggcatcgagaggaggctctctgacaatccccatgatagtaagttggttccggctggcggagaggatttccaaacgaacggcaatttacttcaagtcaactacggcaattcaggacagcctatgagctccgaggcccagcagagcggcgtggttaatgcgtcggctgccggcggcggaagcagatccaagctgcccggagtgatccagacggtggttctggactcggcgagcgacgtgccgtgggtgcagtgcgtgccgtgccccatcccgccgtgccacccccaggtggacagcttctacgacccgagcaggtctcccagctctgcccccttctcgtgcagctccccgacctgcacggctctcggcccctacgccaatggctgcgccaacaaccagtgccagtacctggtccgctaccccgacgggtcgtccacgtcgggggcctacatcgccgacctgctcaccttggacgccggcaacgccgtgtcgggcttcaagttcgggtgcagccacgccgagcagggcagcttcgacgcccgggcagccggcatcatggcgctcggcggcgggcctgagtcgctgctgtcccagaccgcgtcccgctacgggaacgccttctcctactgcatcccggccacggctagtgactccggcttcttcaccctcggcgtgcccaggcgagcctcctccaggtacgtcgtcacgcccatggtcaggttcaggcaggcggccacgttctacggcgtgctcctccgcaccatcaccgtcggcggccagcggctcggcgtggcccccgcggtgttcgccgcgggctcggtactagactcccgcacggccatcacgcgcctgccgccgacggcgtaccaggccctgcgctccgcgttcaggagcagcatgaccatgtaccgctccgccccacccaaggggtatctggacacgtgctacgacttcactggcgtcgtcaacatcaggctgcccaagatctccctggtgttcgaccggaacgccgtgctgccgctcgacccgtcgggcatcctcttcaacgactgcctcgccttcaccncgaatgccgacgatcgcatgccgggcgtcctaggcagcntgcngcagcagaccatcgaggtgctatacgacgtcggcggcggcgccgtgggattccgccaaggcgcgtgctaagagatccatgtgaaggagacaataagctatactatatatatatatatatactatactatctagtgctaatttgcttggcaaccgagaacaaataaatcnnnnncaagacatgtaaaaggacatttgaagtatgtcaagaaatt

SEQ ID NO: 13293 - protein, 481 aa, Zea mays subsp. mays
  peptide (1)..(481): Ceres Seq. ID no. 12355442
  misc_feature (81)..(481): Pfam Name: Eukaryotic aspartyl protease Pfam Description: Eukaryotic aspartyl protease
  misc_feature (58)..(481): Homolog of NCBI NO: 34912520 NR Description: chloroplast nucleoid DNA-binding protein
  misc_feature (6)..(481): Homolog of NCBI NO: 7489168 NR Description: nucleoid DNA-binding protein cnd41, chloroplast - tobacco >gi|2541876|dbj|BAA22813.1| CND41, chloroplast nucleoid
  misc_feature (6)..(481): Homolog of NCBI NO: 24430421 NR Description: 41 kD chloroplast nucleoid DNA binding protein
  misc_feature (160)..(481): Homolog of NCBI NO: 11358588 NR Description: nucleoid DNA-binding protein cnd41-like protein -
  misc_feature (160)..(481): Homolog of NCBI NO: 22326716 NR Description: nucleoid DNA-binding protein cnd41 - like protein id: At5g10770.1, supported by cDNA: gi_18700102 thaliana] >gi|18700103|gb|AAL77663.1| AT5g10770/T30N20_40
  misc_feature (160)..(481): Homolog of NCBI NO: 15238250 NR Description: nucleoid DNA-binding protein cnd41 - like protein id: At5g10760.1, supported by cDNA: gi_18176135
  misc_feature (160)..(481): Homolog of NCBI NO: 24417232 NR Description: unknown [Arabidopsis thaliana]
  misc_feature (159)..(481): Homolog of NCBI NO: 15231010 NR Description: hypothetical protein, 5' partial; protein id:
  misc_feature (159)..(481): Homolog of NCBI NO: 28392860 NR Description: unknown protein [Arabidopsis thaliana]
  misc_feature (80)..(481): Homolog of NCBI NO: 34895664 NR Description: nucleoid DNA-binding protein cnd41-like protein
  misc_feature (445)..(445): Xaa is any aa, unknown or other
  misc_feature (458)..(458): Xaa is any aa, unknown or other
  misc_feature (459)..(459): Xaa is any aa, unknown or other
MPLVLLVLLLLLSCSSPVALLAAAHEHDEYTLVAKSSLKPKATCTGYRVSPPQNITWVPLNAPHGPCSPLPGSAAPSLAALLLHDQLRVDGIERRLSDNPHDSKLVPAGGEDFQTNGNLLQVNYGNSGQPMSSEAQQSGVVNASAAGGGSRSKLPGVIQTVVLDSASDVPWVQCVPCPIPPCHPQVDSFYDPSRSPSSAPFSCSSPTCTALGPYANGCANNQCQYLVRYPDGSSTSGAYIADLLTLDAGNAVSGFKFGCSHAEQGSFDARAAGIMALGGGPESLLSQTASRYGNAFSYCIPATASDSGFFTLGVPRRASSRYVVTPMVRFRQAATFYGVLLRTITVGGQRLGVAPAVFAAGSVLDSRTAITRLPPTAYQALRSAFRSSMTMYRSAPPKGYLDTCYDFTGVVNIRLPKISLVFDRNAVLPLDPSGILFNDCLAFTXNADDRMPGVLGSXXQQTIEVLYDVGGGAVGFRQGAC

SEQ ID NO: 13294 - protein, 351 aa, Zea mays subsp. mays
  peptide (1)..(351): Ceres Seq. ID no. 12355443
  misc_feature (1)..(351): Pfam Name: Eukaryotic aspartyl protease Pfam Description: Eukaryotic aspartyl protease
  misc_feature (1)..(351): Homolog of NCBI NO: 34912520 NR Description: chloroplast nucleoid DNA-binding protein
  misc_feature (1)..(351): Homolog of NCBI NO: 7489168 NR Description: nucleoid DNA-binding protein cnd41, chloroplast - tobacco >gi|2541876|dbj|BAA22813.1| CND41, chloroplast nucleoid
  misc_feature (1)..(351): Homolog of NCBI NO: 24430421 NR Description: 41 kD chloroplast nucleoid DNA binding protein
  misc_feature (30)..(351): Homolog of NCBI NO: 11358588 NR Description: nucleoid DNA-binding protein cnd41-like protein -
  misc_feature (30)..(351): Homolog of NCBI NO: 22326716 NR Description: nucleoid DNA-binding protein cnd41 - like protein id: At5g10770.1, supported by cDNA: gi_18700102 thaliana] >gi|18700103|gb|AAL77663.1| AT5g10770/T30N20_40
  misc_feature (30)..(351): Homolog of NCBI NO: 15238250 NR Description: nucleoid DNA-binding protein cnd41 - like protein id: At5g10760.1, supported by cDNA: gi_18176135
  misc_feature (30)..(351): Homolog of NCBI NO: 24417232 NR Description: unknown [Arabidopsis thaliana]
  misc_feature (29)..(351): Homolog of NCBI NO: 15231010 NR Description: hypothetical protein, 5' partial; protein id:
  misc_feature (29)..(351): Homolog of NCBI NO: 28392860 NR Description: unknown protein [Arabidopsis thaliana]
  misc_feature (1)..(351): Homolog of NCBI NO: 34895664 NR Description: nucleoid DNA-binding protein cnd41-like protein
  misc_feature (315)..(315): Xaa is any aa, unknown or other
  misc_feature (328)..(328): Xaa is any aa, unknown or other
  misc_feature (329)..(329): Xaa is any aa, unknown or other
MSSEAQQSGVVNASAAGGGSRSKLPGVIQTVVLDSASDVPWVQCVPCPIPPCHPQVDSFYDPSRSPSSAPFSCSSPTCTALGPYANGCANNQCQYLVRYPDGSSTSGAYIADLLTLDAGNAVSGFKFGCSHAEQGSFDARAAGIMALGGGPESLLSQTASRYGNAFSYCIPATASDSGFFTLGVPRRASSRYVVTPMVRFRQAATFYGVLLRTITVGGQRLGVAPAVFAAGSVLDSRTAITRLPPTAYQALRSAFRSSMTMYRSAPPKGYLDTCYDFTGVVNIRLPKISLVFDRNAVLPLDPSGILFNDCLAFTXNADDRMPGVLGSXXQQTIEVLYDVGGGAVGFRQGAC

SEQ ID NO: 13295 - DNA, 1238 bp, Zea mays subsp. mays
  misc_feature (1)..(1238): Ceres Seq. ID no. 13498318
  misc_feature: MA Experiment ID: 108536 Result: Up-regulated in Transcription
  misc_feature: MA Experiment 108536 PARAMETER Experiment Name: Zm_Meristem_P Parameter: Age (day) Value: 8
  misc_feature: MA Experiment 108536 PARAMETER Experiment Name: Zm_Meristem_P Parameter: Organism Value: Zea mays
  misc_feature: MA Experiment 108536 PARAMETER Experiment Name: Zm_Meristem_P Parameter: Plant Line Value: 35A19
  misc_feature: MA Experiment 108536 PARAMETER Experiment Name: Zm_Meristem_P Parameter: Tissue Value: Shoot Meristem vs. Above Shoot Meristem
  misc_feature: MA Experiment ID: 20000480 Result: Down-regulated in Transcription
  misc_feature: MA Experiment 20000480 PARAMETER Experiment Name: Zm_Drought_P Parameter: Age (day) Value: 11
  misc_feature: MA Experiment 20000480 PARAMETER Experiment Name: Zm_Drought_P Parameter: Organism Value: Zea mays
  misc_feature: MA Experiment 20000480 PARAMETER Experiment Name: Zm_Drought_P Parameter: Plant Line Value: 35A19
  misc_feature: MA Experiment 20000480 PARAMETER Experiment Name: Zm_Drought_P Parameter: Timepoint (hr) Value: 72
  misc_feature: MA Experiment 20000480 PARAMETER Experiment Name: Zm_Drought_P Parameter: Tissue Value: Aerial
  misc_feature: MA Experiment 20000480 PARAMETER Experiment Name: Zm_Drought_P Parameter: Treatment Value: Drought vs. No Drought
  misc_feature: MA Experiment ID: 20000492 Result: Up-regulated in Transcription
  misc_feature: MA Experiment 20000492 PARAMETER Experiment Name: Zm_Hybrid_Seed_Dev_P Parameter: DAP Value: 12
  misc_feature: MA Experiment 20000492 PARAMETER Experiment Name: Zm_Hybrid_Seed_Dev_P Parameter: Organism Value: Zea mays
  misc_feature: MA Experiment 20000492 PARAMETER Experiment Name: Zm_Hybrid_Seed_Dev_P Parameter: Plant Line Value: 35A19
  misc_feature: MA Experiment 20000492 PARAMETER Experiment Name: Zm_Hybrid_Seed_Dev_P Parameter: Tissue Value: Fert Kernel vs. Unfert Floret
  misc_feature: MA Experiment ID: 20000626 Result: Up-regulated in Transcription
  misc_feature: MA Experiment 20000626 PARAMETER Experiment Name: Zm_Herbicide-Treatments_P Parameter: Timepoint (hr) Value: 12
  misc_feature: MA Experiment 20000626 PARAMETER Experiment Name: Zm_Herbicide-Treatments_P Parameter: Tissue Value: Aerial
  misc_feature: MA Experiment 20000626 PARAMETER Experiment Name: Zm_Herbicide-Treatments_P Parameter: Treatment Value: Roundup vs. No Treatment
acgacacccaacggcagctgcagcacagcagaggaaggcaggaaggaagaagatatcagaccagtgtgaagccaagccagcgcgtctctctctctctctctctggtcgcttggtcggtccatcggaggatcagctcggcggtggccatggcaatggcgcagcaagcgagcctcccctgctcgactgccaccacatggagagagctcacgaacacgagctggagggacgacgactacaggcggatggtgatggcgtacctgatcgaggcggtgtacctgctggagctggagcggcaggagcgccgggacgcggcggcggtggcgcagcagtggtggaagccgttccacttccgcctggcgcacgagctggtggacgaccgcgacggctccgtgttcggcgccgtcttcgagcgcgaccaccacggcgccaggccggggccggggccgagcccgagcggcgcgcccagcgccgtcatcgcgttccggggcacgctgctgcgcgcgcccaccatccgccgcgacgtcgaggacgagctccgcctgctggcacgcaacagcctgcggggctccgccaggctggcgcgcgccgcgcaggcgctgcgcgccaccatcgaccgcttcggctccgagaacgtctgcgtctgcggccactccctgggcgccggcttcgcgcgccaggtcgtccggacgctcgtggcctcctcctcctcctcctcctcctcgccgcggcaaccgcgccagcaggccgccgccttcgccgccgcgacgctcgagtcccacctcttcaacgcgccctacctgtcgctgcccatgggcgtcaggagcgtggtcaggacggcggactgcctggtcaaggcgctccgctccggcgtcgccaccgtcggcaagtggcacggcaaggcgctccggaacgtggcctacgccagctgcgtcctcggatacaccaggctcgagagcaccaggaagttgtgaggatcgatcggatcgaatgcctccgccacctcgcgtcctcctcgatgctgcctctggcttcaacggttgaaccgtcctgccagtgccagccaaactgtatctatgctcgatcaccttgtagtaggaagtactcggaaattaattcaattctagcaggagacgaataaagcatctgaccggaggatgcaaggccttgcgtgcatatgctttgctttgcttttgtacaatctttttaaatgtgaattacagtagcnctaagttgatctc

SEQ ID NO: 13296 - protein, 378 aa, Zea mays subsp. mays
  peptide (1)..(378): Ceres Seq. ID no. 13498319
  misc_feature (65)..(314): Homolog of NCBI NO: 23104902 NR Description: hypothetical protein [Azotobacter vinelandii]
RHPTAAAAQQRKAGRKKISDQCEAKPARLSLSLSGRLVGPSEDQLGGGHGNGAASEPPLLDCHHMERAHEHELEGRRLQADGDGVPDRGGVPAGAGAAGAPGRGGGGAAVVEAVPLPPGARAGGRPRRLRVRRRLRARPPRRQAGAGAEPERRAQRRHRVPGHAAARAHHPPRRRGRAPPAGTQQPAGLRQAGARRAGAARHHRPLRLRERLRLRPLPGRRLRAPGRPDARGLLLLLLLLAAATAPAGRRLRRRDARVPPLQRALPVAAHGRQERGQDGGLPGQGAPLRRRHRRQVARQGAPERGLRQLRPRIHQAREHQEVVRIDRIECLRHLASSSMLPLASTVEPSCQCQPNCIYARSPCSRKYSEINSILAGDE

SEQ ID NO: 13297 - protein, 322 aa, Zea mays subsp. mays
  peptide (1)..(322): Ceres Seq. ID no. 13498320
  misc_feature (70)..(322): Homolog of NCBI NO: 34901136 NR Description: contains EST AU161031(C53313)~similar to Oryza
  misc_feature (61)..(230): Homolog of NCBI NO: 34910916 NR Description: OSJNBb0063G05.3 [Oryza sativa (japonica
  misc_feature (52)..(230): Homolog of NCBI NO: 15241306 NR Description: hypothetical protein [Arabidopsis thaliana] gb|AAD29063.1~gene_id:K3K7.3~similar to unknown protein
  misc_feature (65)..(270): Homolog of NCBI NO: 34909578 NR Description: P0046E05.21 [Oryza sativa (japonica
  misc_feature (157)..(230): Homolog of NCBI NO: 34904536 NR Description: B1066G12.13 [Oryza sativa (japonica
  misc_feature (64)..(118): Homolog of NCBI NO: 34904536 NR Description: B1066G12.13 [Oryza sativa (japonica
  misc_feature (68)..(230): Homolog of NCBI NO: 18396010 NR Description: lipase (class 3) family [Arabidopsis thaliana]
  misc_feature (68)..(299): Homolog of NCBI NO: 10177082 NR Description: gene_id:MOP9.4~pir||T04290~similar to unknown
  misc_feature (68)..(299): Homolog of NCBI NO: 30689345 NR Description: expressed protein [Arabidopsis thaliana] unknown protein [Arabidopsis thaliana]
  misc_feature (68)..(230): Homolog of NCBI NO: 18413406 NR Description: lipase (class 3) family [Arabidopsis thaliana]
DTQRQLQHSRGRQEGRRYQTSVKPSQRVSLSLSLVAWSVHRRISSAVAMAMAQQASLPCSTATTWRELTNTSWRDDDYRRMVMAYLIEAVYLLELERQERRDAAAVAQQWWKPFHFRLAHELVDDRDGSVFGAVFERDHHGARPGPGPSPSGAPSAVIAFRGTLLRAPTIRRDVEDELRLLARNSLRGSARLARAAQALRATIDRFGSENVCVCGHSLGAGFARQVVRTLVASSSSSSSSPRQPRQQAAAFAAATLESHLFNAPYLSLPMGVRSVVRTADCLVKALRSGVATVGKWHGKALRNVAYASCVLGYTRLESTRKL

SEQ ID NO: 13298 - protein, 314 aa, Zea mays subsp. mays
  peptide (1)..(314): Ceres Seq. ID no. 13498321
  misc_feature (1)..(250): Homolog of NCBI NO: 23104902 NR Description: hypothetical protein [Azotobacter vinelandii]
MERAHEHELEGRRLQADGDGVPDRGGVPAGAGAAGAPGRGGGGAAVVEAVPLPPGARAGGRPRRLRVRRRLRARPPRRQAGAGAEPERRAQRRHRVPGHAAARAHHPPRRRGRAPPAGTQQPAGLRQAGARRAGAARHHRPLRLRERLRLRPLPGRRLRAPGRPDARGLLLLLLLLAAATAPAGRRLRRRDARVPPLQRALPVAAHGRQERGQDGGLPGQGAPLRRRHRRQVARQGAPERGLRQLRPRIHQAREHQEVVRIDRIECLRHLASSSMLPLASTVEPSCQCQPNCIYARSPCSRKYSEINSILAGDE

SEQ ID NO: 13299 - protein, 274 aa, Zea mays subsp. mays
  peptide (1)..(274): Ceres Seq. ID no. 13498322
  misc_feature (22)..(274): Homolog of NCBI NO: 34901136 NR Description: contains EST AU161031(C53313)~similar to Oryza
  misc_feature (13)..(182): Homolog of NCBI NO: 34910916 NR Description: OSJNBb0063G05.3 [Oryza sativa (japonica
  misc_feature (4)..(182): Homolog of NCBI NO: 15241306 NR Description: hypothetical protein [Arabidopsis thaliana] gb|AAD29063.1~gene_id:K3K7.3~similar to unknown protein
  misc_feature (17)..(222): Homolog of NCBI NO: 34909578 NR Description: P0046E05.21 [Oryza sativa (japonica
  misc_feature (109)..(182): Homolog of NCBI NO: 34904536 NR Description: B1066G12.13 [Oryza sativa (japonica
  misc_feature (16)..(70): Homolog of NCBI NO: 34904536 NR Description: B1066G12.13 [Oryza sativa (japonica
  misc_feature (20)..(182): Homolog of NCBI NO: 18396010 NR Description: lipase (class 3) family [Arabidopsis thaliana]
  misc_feature (20)..(251): Homolog of NCBI NO: 10177082 NR Description: gene_id:MOP9.4~pir||T04290~similar to unknown
  misc_feature (20)..(251): Homolog of NCBI NO: 30689345 NR Description: expressed protein [Arabidopsis thaliana] unknown protein [Arabidopsis thaliana]
  misc_feature (20)..(182): Homolog of NCBI NO: 18413406 NR Description: lipase (class 3) family [Arabidopsis thaliana]
MAMAQQASLPCSTATTWRELTNTSWRDDDYRRMVMAYLIEAVYLLELERQERRDAAAVAQQWWKPFHFRLAHELVDDRDGSVFGAVFERDHHGARPGPGPSPSGAPSAVIAFRGTLLRAPTIRRDVEDELRLLARNSLRGSARLARAAQALRATIDRFGSENVCVCGHSLGAGFARQVVRTLVASSSSSSSSPRQPRQQAAAFAAATLESHLFNAPYLSLPMGVRSVVRTADCLVKALRSGVATVGKWHGKALRNVAYASCVLGYTRLESTRKL

SEQ ID NO: 13300 - DNA, 1422 bp, Zea mays subsp. mays
  misc_feature (1)..(1422): Ceres Seq. ID no. 12365071
  misc_feature: MA Experiment ID: 20000492 Result: Down-regulated in Transcription
  misc_feature: MA Experiment 20000492 PARAMETER Experiment Name: Zm_Hybrid_Seed_Dev_P Parameter: DAP Value: 12
  misc_feature: MA Experiment 20000492 PARAMETER Experiment Name: Zm_Hybrid_Seed_Dev_P Parameter: Organism Value: Zea mays
  misc_feature: MA Experiment 20000492 PARAMETER Experiment Name: Zm_Hybrid_Seed_Dev_P Parameter: Plant Line Value: 35A19
  misc_feature: MA Experiment 20000492 PARAMETER Experiment Name: Zm_Hybrid_Seed_Dev_P Parameter: Tissue Value: Fert Kernel vs. Unfert Floret
  misc_feature: MA Experiment ID: 20000535 Result: Down-regulated in Transcription
  misc_feature: MA Experiment 20000535 PARAMETER Experiment Name: Zm_Hybrid_Seed_Dev_P Parameter: DAP Value: 30 vs. 12
  misc_feature: MA Experiment 20000535 PARAMETER Experiment Name: Zm_Hybrid_Seed_Dev_P Parameter: Organism Value: Zea mays
  misc_feature: MA Experiment 20000535 PARAMETER Experiment Name: Zm_Hybrid_Seed_Dev_P Parameter: Plant Line Value: 35A19
  misc_feature: MA Experiment 20000535 PARAMETER Experiment Name: Zm_Hybrid_Seed_Dev_P Parameter: Tissue Value: Embryo vs. Unfert Floret
atctttaccactagtcgccgtgccgtcccctccccttctctctctcctctctccccacgccacgcatcgcctcgtcggaacggaaggcggcagcgctgcgagcaagggagggagggagcggggatgaggatgctgtcgaaggcgtgctcgattgtggcctcctccctcccgcgctgctcctcctccgccgccgcccccacgatgagggggcagccgtccttgctgccaagcgtgcggaagcaatggcccgcgaagccactgctgtatggaatcggcaccctgttggtcatgccactgaggacactgtatggagtgggtcgtgtttttggcgcaggacggtttctctgcaacatgaccaacgtctcttcgtcgctgcaaattgagcttgtatcatgccttcgagataactatgcgtatatcctgcatgatgttgatactggaacagttggagtagtggatccttctgaggctatgcctattataaatgcattggaaaagagaaaccagaacttgacttatatactgaacacccatcatcactatgatcatactggtggaaacttggaattgaaggcaaaatatggtgcaaaggtaattggttctgagaaggataaggacagaatacctggcattgacatcacgcttaaggagggtgacacatggatgttcgctggccatcaagttcttgtactggaaactcctggacatacaacaggtcatgtgtgctattatttcgctggttctggagctatatttacaggtgacaccttgttcaatctatcatgcggaaagctttttgaagggactccacagcagatgtatgcctcactccagaaaattacagctctacccgatgatacaaaagtatactgtgggcatgaatataccttgagtaatgcaaagtttgccttgagtgtagaaccgggaaataaagcattgcaggaatatactgcaaatgcagctgagctgcgtaataagaatatacccacggtgccaacaacaattggaagggagaaggaatgcaatcctttcttgcggacctccaatccagaaattaagagaacactgtccgttccagatcatttcgatgaagatcgggtgcttggagttgtccgtcgagcaaaagataacttctgactaacaaaaggaaatgctcgtgacgtatgacccatatcttgttaaagttcagacagagaacctaagtcacaataaacataggaggaaatgaaggtatatatgtttgagctagattttgaaatgcttcggcaaaattatgtcgagtgtatgtagcttgggcagtgcagtgcttgtctatagcaaccaatgattcttttgaccactacaaataagcgtgttctgctatcatctactctctgtaaaaaaaacgccacgtagccgtttcatagtcgatcttcagttctt

SEQ ID NO: 13301 - protein, 378 aa, Zea mays subsp. mays
  peptide (1)..(378): Ceres Seq. ID no. 12365072
  misc_feature (135)..(293): Pfam Name: Metallo-beta-lactamase superfamily Pfam Description: Metallo-beta-lactamase superfamily
  misc_feature (42)..(378): Homolog of NCBI NO: 16209608 NR Description: glyoxalase II [Oryza sativa]
  misc_feature (42)..(378): Homolog of NCBI NO: 21070362 NR Description: glyoxalase II [Pennisetum glaucum]
  misc_feature (44)..(378): Homolog of NCBI NO: 28143946 NR Description: glyoxalase II [Brassica juncea]
  misc_feature (42)..(378): Homolog of NCBI NO: 18390616 NR Description: glyoxalase II, putative (hydroxyacylglutathione protein id: At1g06130.1, supported by cDNA: 17756. [Arabidopsis >gi|21553879|gb|AAM62972.1| glyoxalase II isozyme, putative
  misc_feature (42)..(378): Homolog of NCBI NO: 30679573 NR Description: glyoxalase II, putative (hydroxyacylglutathione [Arabidopsis thaliana] >gi|20466237|gb|AAM20436.1| glyoxalase II putative [Arabidopsis thaliana] >gi|22136310|gb|AAM91233.1|
  misc_feature (71)..(378): Homolog of NCBI NO: 25406895 NR Description: hypothetical protein [imported] - Arabidopsis >gi|8810475|gb|AAF80136.1|AC024174_18 Contains similarity to II isozyme from Arabidopsis thaliana gb|U90927 and is a
  misc_feature (42)..(378): Homolog of NCBI NO: 30684920 NR Description: glyoxalase II, putative (hydroxyacylglutathione
  misc_feature (42)..(378): Homolog of NCBI NO: 15224661 NR Description: glyoxalase II, putative (hydroxyacylglutathione protein id: At2g31350.1, supported by cDNA: gi_18176313, by cDNA: gi_20465674 [Arabidopsis thaliana]
  misc_feature (42)..(378): Homolog of NCBI NO: 18406237 NR Description: glyoxalase II (hydroxyacylglutathione protein id: At2g43430.1, supported by cDNA: gi_17380663, by cDNA: gi_20259002, supported by cDNA: gi_2570339 [Arabidopsis
  misc_feature (42)..(378): Homolog of NCBI NO: 2570340 NR Description: glyoxalase II mitochondrial isozyme [Arabidopsis
IFTTSRRAVPSPSLSPLSPRHASPRRNGRRQRCEQGREGAGMRMLSKACSIVASSLPRCSSSAAAPTMRGQPSLLPSVRKQWPAKPLLYGIGTLLVMPLRTLYGVGRVFGAGRFLCNMTNVSSSLQIELVSCLRDNYAYILHDVDTGTVGVVDPSEAMPIINALEKRNQNLTYILNTHHHYDHTGGNLELKAKYGAKVIGSEKDKDRIPGIDITLKEGDTWMFAGHQVLVLETPGHTTGHVCYYFAGSGAIFTGDTLFNLSCGKLFEGTPQQMYASLQKITALPDDTKVYCGHEYTLSNAKFALSVEPGNKALQEYTANAAELRNKNIPTVPTTIGREKECNPFLRTSNPEIKRTLSVPDHFDEDRVLGVVRRAKDNF

SEQ ID NO: 13302 - protein, 337 aa, Zea mays subsp. mays
  peptide (1)..(337): Ceres Seq. ID no. 12365073
  misc_feature (94)..(252): Pfam Name: Metallo-beta-lactamase superfamily Pfam Description: Metallo-beta-lactamase superfamily
  misc_feature (1)..(337): Homolog of NCBI NO: 18406237 NR Description: glyoxalase II (hydroxyacylglutathione protein id: At2g43430.1, supported by cDNA: gi_17380663, by cDNA: gi_20259002, supported by cDNA: gi_2570339 [Arabidopsis
  misc_feature (1)..(337): Homolog of NCBI NO: 16209608 NR Description: glyoxalase II [Oryza sativa]
  misc_feature (3)..(337): Homolog of NCBI NO: 28143946 NR Description: glyoxalase II [Brassica juncea]
  misc_feature (1)..(337): Homolog of NCBI NO: 30679573 NR Description: glyoxalase II, putative (hydroxyacylglutathione [Arabidopsis thaliana] >gi|20466237|gb|AAM20436.1| glyoxalase II putative [Arabidopsis thaliana] >gi|22136310|gb|AAM91233.1|
  misc_feature (1)..(337): Homolog of NCBI NO: 30684920 NR Description: glyoxalase II, putative (hydroxyacylglutathione
  misc_feature (1)..(337): Homolog of NCBI NO: 15224661 NR Description: glyoxalase II, putative (hydroxyacylglutathione protein id: At2g31350.1, supported by cDNA: gi_18176313, by cDNA: gi_20465674 [Arabidopsis thaliana]
  misc_feature (30)..(337): Homolog of NCBI NO: 25406895 NR Description: hypothetical protein [imported] - Arabidopsis >gi|8810475|gb|AAF80136.1|AC024174_18 Contains similarity to II isozyme from Arabidopsis thaliana gb|U90927 and is a
  misc_feature (1)..(337): Homolog of NCBI NO: 18390616 NR Description: glyoxalase II, putative (hydroxyacylglutathione protein id: At1g06130.1, supported by cDNA: 17756. [Arabidopsis >gi|21553879|gb|AAM62972.1| glyoxalase II isozyme, putative
  misc_feature (1)..(337): Homolog of NCBI NO: 21070362 NR Description: glyoxalase II [Pennisetum glaucum]
  misc_feature (1)..(337): Homolog of NCBI NO: 2570340 NR Description: glyoxalase II mitochondrial isozyme [Arabidopsis
MRMLSKACSIVASSLPRCSSSAAAPTMRGQPSLLPSVRKQWPAKPLLYGIGTLLVMPLRTLYGVGRVFGAGRFLCNMTNVSSSLQIELVSCLRDNYAYILHDVDTGTVGVVDPSEAMPIINALEKRNQNLTYILNTHHHYDHTGGNLELKAKYGAKVIGSEKDKDRIPGIDITLKEGDTWMFAGHQVLVLETPGHTTGHVCYYFAGSGAIFTGDTLFNLSCGKLFEGTPQQMYASLQKITALPDDTKVYCGHEYTLSNAKFALSVEPGNKALQEYTANAAELRNKNIPTVPTTIGREKECNPFLRTSNPEIKRTLSVPDHFDEDRVLGVVRRAKDNF

SEQ ID NO: 13303 - protein, 335 aa, Zea mays subsp. mays
  peptide (1)..(335): Ceres Seq. ID no. 12365074
  misc_feature (92)..(250): Pfam Name: Metallo-beta-lactamase superfamily Pfam Description: Metallo-beta-lactamase superfamily
  misc_feature (1)..(335): Homolog of NCBI NO: 16209608 NR Description: glyoxalase II [Oryza sativa]
  misc_feature (1)..(335): Homolog of NCBI NO: 21070362 NR Description: glyoxalase II [Pennisetum glaucum]
  misc_feature (1)..(335): Homolog of NCBI NO: 28143946 NR Description: glyoxalase II [Brassica juncea]
  misc_feature (1)..(335): Homolog of NCBI NO: 18390616 NR Description: glyoxalase II, putative (hydroxyacylglutathione protein id: At1g06130.1, supported by cDNA: 17756. [Arabidopsis >gi|21553879|gb|AAM62972.1| glyoxalase II isozyme, putative
  misc_feature (1)..(335): Homolog of NCBI NO: 30679573 NR Description: glyoxalase II, putative (hydroxyacylglutathione [Arabidopsis thaliana] >gi|20466237|gb|AAM20436.1| glyoxalase II putative [Arabidopsis thaliana] >gi|22136310|gb|AAM91233.1|
  misc_feature (28)..(335): Homolog of NCBI NO: 25406895 NR Description: hypothetical protein [imported] - Arabidopsis >gi|8810475|gb|AAF80136.1|AC024174_18 Contains similarity to II isozyme from Arabidopsis thaliana gb|U90927 and is a
  misc_feature (1)..(335): Homolog of NCBI NO: 30684920 NR Description: glyoxalase II, putative (hydroxyacylglutathione
  misc_feature (1)..(335): Homolog of NCBI NO: 15224661 NR Description: glyoxalase II, putative (hydroxyacylglutathione protein id: At2g31350.1, supported by cDNA: gi_18176313, by cDNA: gi_20465674 [Arabidopsis thaliana]
  misc_feature (1)..(335): Homolog of NCBI NO: 18406237 NR Description: glyoxalase II (hydroxyacylglutathione protein id: At2g43430.1, supported by cDNA: gi_17380663, by cDNA: gi_20259002, supported by cDNA: gi_2570339 [Arabidopsis
  misc_feature (1)..(335): Homolog of NCBI NO: 2570340 NR Description: glyoxalase II mitochondrial isozyme [Arabidopsis
MLSKACSIVASSLPRCSSSAAAPTMRGQPSLLPSVRKQWPAKPLLYGIGTLLVMPLRTLYGVGRVFGAGRFLCNMTNVSSSLQIELVSCLRDNYAYILHDVDTGTVGVVDPSEAMPIINALEKRNQNLTYILNTHHHYDHTGGNLELKAKYGAKVIGSEKDKDRIPGIDITLKEGDTWMFAGHQVLVLETPGHTTGHVCYYFAGSGAIFTGDTLFNLSCGKLFEGTPQQMYASLQKITALPDDTKVYCGHEYTLSNAKFALSVEPGNKALQEYTANAAELRNKNIPTVPTTIGREKECNPFLRTSNPEIKRTLSVPDHFDEDRVLGVVRRAKDNF

SEQ ID NO: 13304 - DNA, 980 bp, Zea mays subsp. mays
  misc_feature (1)..(980): Ceres Seq. ID no. 12378326
  misc_feature: MA Experiment ID: 108528 Result: Up-regulated in Transcription
  misc_feature: MA Experiment 108528 PARAMETER Experiment Name: Zm_Imbibed_Seeds_P Parameter: Age (day) Value: 5 vs. 2
  misc_feature: MA Experiment 108528 PARAMETER Experiment Name: Zm_Imbibed_Seeds_P Parameter: Organism Value: Zea mays
  misc_feature: MA Experiment 108528 PARAMETER Experiment Name: Zm_Imbibed_Seeds_P Parameter: Plant Line Value: 35A19
  misc_feature: MA Experiment 108528 PARAMETER Experiment Name: Zm_Imbibed_Seeds_P Parameter: Tissue Value: Aerial vs. Embryo
  misc_feature: MA Experiment ID: 108530 Result: Up-regulated in Transcription
  misc_feature: MA Experiment 108530 PARAMETER Experiment Name: Zm_Imbibed_Seeds_P Parameter: Age (day) Value: 6 vs. 2
  misc_feature: MA Experiment 108530 PARAMETER Experiment Name: Zm_Imbibed_Seeds_P Parameter: Organism Value: Zea mays
  misc_feature: MA Experiment 108530 PARAMETER Experiment Name: Zm_Imbibed_Seeds_P Parameter: Plant Line Value: 35A19
  misc_feature: MA Experiment 108530 PARAMETER Experiment Name: Zm_Imbibed_Seeds_P Parameter: Tissue Value: Aerial vs. Embryo
  misc_feature: MA Experiment ID: 108535 Result: Down-regulated in Transcription
  misc_feature: MA Experiment 108535 PARAMETER Experiment Name: Zm_Meristem_P Parameter: Age (day) Value: 8
  misc_feature: MA Experiment 108535 PARAMETER Experiment Name: Zm_Meristem_P Parameter: Organism Value: Zea mays
  misc_feature: MA Experiment 108535 PARAMETER Experiment Name: Zm_Meristem_P Parameter: Plant Line Value: 35A19
  misc_feature: MA Experiment 108535 PARAMETER Experiment Name: Zm_Meristem_P Parameter: Tissue Value: Root Meristem vs. Above Root Meristem
  misc_feature: MA Experiment ID: 108543 Result: Down-regulated in Transcription
  misc_feature: MA Experiment ID: 108597 Result: Down-regulated in Transcription
  misc_feature: MA Experiment 108597 PARAMETER Experiment Name: Zm_100uM_ABA_P Parameter: Age (day) Value: 9
  misc_feature: MA Experiment 108597 PARAMETER Experiment Name: Zm_100uM_ABA_P Parameter: Organism Value: Zea mays
  misc_feature: MA Experiment 108597 PARAMETER Experiment Name: Zm_100uM_ABA_P Parameter: Plant Line Value: 35A19
  misc_feature: MA Experiment 108597 PARAMETER Experiment Name: Zm_100uM_ABA_P Parameter: Timepoint (hr) Value: 24
  misc_feature: MA Experiment 108597 PARAMETER Experiment Name: Zm_100uM_ABA_P Parameter: Tissue Value: Aerial
  misc_feature: MA Experiment 108597 PARAMETER Experiment Name: Zm_100uM_ABA_P Parameter: Treatment Value: 100uM ABA vs. No Treatment
  misc_feature: MA Experiment ID: 108687 Result: Down-regulated in Transcription
  misc_feature: MA Experiment 108687 PARAMETER Experiment Name: Zm_Embryos-Flowers__P Parameter: Tissue Value: Embryo vs. Aerial+
  misc_feature: MA Experiment ID: 108688 Result: Down-regulated in Transcription
  misc_feature: MA Experiment 108688 PARAMETER Experiment Name: Zm_Embryos-Flowers__P Parameter: Tissue Value: Immature Flowers vs. Aerial+
  misc_feature: MA Experiment ID: 20000108 Result: Down-regulated in Transcription
  misc_feature: MA Experiment 20000108 PARAMETER Experiment Name: Zm_Root-Tips_P Parameter: Age (day) Value: 12
  misc_feature: MA Experiment 20000108 PARAMETER Experiment Name: Zm_Root-Tips_P Parameter: Organism Value: Zea mays
  misc_feature: MA Experiment 20000108 PARAMETER Experiment Name: Zm_Root-Tips_P Parameter: Tissue Value: Root tips vs. Root mid region    35
  misc_feature: MA Experiment 20000108 PARAMETER Experiment Name: Zm_Root-Tips_P Parameter: Tissue Value: Root tips vs. Root mid region   Sequence Listing-Misc Features (4)
  misc_feature: MA Experiment ID: 20000478 Result: Down-regulated in Transcription
  misc_feature: MA Experiment 20000478 PARAMETER Experiment Name: Zm_5mM_SA_P Parameter: Age (day) Value: 11
  misc_feature: MA Experiment 20000478 PARAMETER Experiment Name: Zm_5mM_SA_P Parameter: Organism Value: Zea mays
  misc_feature: MA Experiment 20000478 PARAMETER Experiment Name: Zm_5mM_SA_P Parameter: Plant Line Value: 35A19
  misc_feature: MA Experiment 20000478 PARAMETER Experiment Name: Zm_5mM_SA_P Parameter: Timepoint (hr) Value: 72
  misc_feature: MA Experiment 20000478 PARAMETER Experiment Name: Zm_5mM_SA_P Parameter: Tissue Value: Aerial
  misc_feature: MA Experiment 20000478 PARAMETER Experiment Name: Zm_5mM_SA_P Parameter: Treatment Value: 5mM SA vs. No Treatment
  misc_feature: MA Experiment ID: 20001612 Result: Up-regulated in Transcription
  misc_feature: MA Experiment 20001612 PARAMETER Experiment Name: Zm_50ppm_KNO3_L-to-H_P Parameter: Age (day) Value: 19
  misc_feature: MA Experiment 20001612 PARAMETER Experiment Name: Zm_50ppm_KNO3_L-to-H_P Parameter: Organism Value: Zea mays
  misc_feature: MA Experiment 20001612 PARAMETER Experiment Name: Zm_50ppm_KNO3_L-to-H_P Parameter: Plant Line Value: 35A19
  misc_feature: MA Experiment 20001612 PARAMETER Experiment Name: Zm_50ppm_KNO3_L-to-H_P Parameter: Timepoint (hr) Value: 8
  misc_feature: MA Experiment 20001612 PARAMETER Experiment Name: Zm_50ppm_KNO3_L-to-H_P Parameter: Tissue Value: Roots
  misc_feature: MA Experiment 20001612 PARAMETER Experiment Name: Zm_50ppm_KNO3_L-to-H_P Parameter: Treatment Value: 50ppm KNO3 vs. 50ppm KCl
aaaaaatagccttatagccacatcccggccagccgcagcaagtgcccagaaggccagaaccagaaccaggtagcccgtgcaacctcatatcatcccctgccacgcacctccgtccgccgcgccatggaatcgaggaggagggccgtgcccaccgtgacggcggttgcggtggcgacgctgctgctgctgctgatgtcgtcgggcgtgggcggcgacttcgcggcggaccgggcggagtgctcggagcagctggcgggggctggcgacgtgcctgacgtacgtgcaggagcaggcgacggcgacggcgccgacgcccgactgctgcgcgggcctgaaggcggtgctgcagagcagccgcaagtgcctgtgcgtgctggtcaaggaccgggacgaccccaacctaggcctcaagctcaacgtcgacaaggcgctcggcctccccgccgtctgccacgcgcccgccaacatctccgactgccccaggctgctggacctgccggccggctccaaggacgcgcaggtgttcgagcagtacgcgaagcagcaggcggcggcggcggcgcagggcggcggcgcacccaccagtggacgcagcagcgcggcggcgagcacgaccgcgggcgcgcagaagagcggagcctcagccgccggtcggtggttgggagtggggagggtcggtggtgctggtggcggcgcacgcgcggtggcgccgctcgccgtgcctttcctgctcctgctcgggtagataataataataactttacgcgcgcggccaacggccggagtcccggcggtttggttggcgccgcgcgttgccgacttgtgtgcttcgggtgcgtgcgtgtgtggtggggtacttttcacactatattggaaaaagaagctattatatatctttgactgaaaaaaagtgtcgttgtataattatctttttttcgtgtccgtgtatgcaacccctcctctcatagacccatagcgcc

SEQ ID NO: 13305 - protein, 258 aa, Zea mays subsp. mays
  peptide (1)..(258): Ceres Seq. ID no. 12378327
  misc_feature (1)..(62): Homolog of NCBI NO: 34394084 NR Description: lipid transfer protein-like [Oryza sativa
MESRRRAVPTVTAVAVATLLLLLMSSGVGGDFAADRAECSEQLAGAGDVPDVRAGAGDGDGADARLLRGPEGGAAEQPQVPVRAGQGPGRPQPRPQAQRRQGARPPRRLPRARQHLRLPQAAGPAGRLQGRAGVRAVREAAGGGGGAGRRRTHQWTQQRGGEHDRGRAEERSLSRRSVVGSGEGRWCWWRRTRGGAARRAFPAPARVDNNNNFTRAANGRSPGGLVGAARCRLVCFGCVRVWWGTFHTILEKEAIIYL

SEQ ID NO: 13306 - protein, 235 aa, Zea mays subsp. mays
  peptide (1)..(235): Ceres Seq. ID no. 12378328
  misc_feature (1)..(39): Homolog of NCBI NO: 34394084 NR Description: lipid transfer protein-like [Oryza sativa
MSSGVGGDFAADRAECSEQLAGAGDVPDVRAGAGDGDGADARLLRGPEGGAAEQPQVPVRAGQGPGRPQPRPQAQRRQGARPPRRLPRARQHLRLPQAAGPAGRLQGRAGVRAVREAAGGGGGAGRRRTHQWTQQRGGEHDRGRAEERSLSRRSVVGSGEGRWCWWRRTRGGAARRAFPAPARVDNNNNFTRAANGRSPGGLVGAARCRLVCFGCVRVWWGTFHTILEKEAIIYL

SEQ ID NO: 13307 - DNA, 1156 bp, Zea mays subsp. mays
  misc_feature (1)..(1156): Ceres Seq. ID no. 12355771
  misc_feature: MA Experiment ID: 108535 Result: Down-regulated in Transcription
  misc_feature: MA Experiment 108535 PARAMETER Experiment Name: Zm_Meristem_P Parameter: Age (day) Value: 8
  misc_feature: MA Experiment 108535 PARAMETER Experiment Name: Zm_Meristem_P Parameter: Organism Value: Zea mays
  misc_feature: MA Experiment 108535 PARAMETER Experiment Name: Zm_Meristem_P Parameter: Plant Line Value: 35A19
  misc_feature: MA Experiment 108535 PARAMETER Experiment Name: Zm_Meristem_P Parameter: Tissue Value: Root Meristem vs. Above Root Meristem
  misc_feature: MA Experiment ID: 108543 Result: Up-regulated in Transcription
  misc_feature: MA Experiment ID: 20000477 Result: Down-regulated in Transcription
  misc_feature: MA Experiment 20000477 PARAMETER Experiment Name: Zm_5mM_SA_P Parameter: Age (day) Value: 10
  misc_feature: MA Experiment 20000477 PARAMETER Experiment Name: Zm_5mM_SA_P Parameter: Organism Value: Zea mays
  misc_feature: MA Experiment 20000477 PARAMETER Experiment Name: Zm_5mM_SA_P Parameter: Plant Line Value: 35A19
  misc_feature: MA Experiment 20000477 PARAMETER Experiment Name: Zm_5mM_SA_P Parameter: Timepoint (hr) Value: 48
  misc_feature: MA Experiment 20000477 PARAMETER Experiment Name: Zm_5mM_SA_P Parameter: Tissue Value: Aerial
  misc_feature: MA Experiment 20000477 PARAMETER Experiment Name: Zm_5mM_SA_P Parameter: Treatment Value: 5mM SA vs. No Treatment
  misc_feature: MA Experiment ID: 20000492 Result: Down-regulated in Transcription
  misc_feature: MA Experiment 20000492 PARAMETER Experiment Name: Zm_Hybrid_Seed_Dev_P Parameter: DAP Value: 12
  misc_feature: MA Experiment 20000492 PARAMETER Experiment Name: Zm_Hybrid_Seed_Dev_P Parameter: Organism Value: Zea mays
  misc_feature: MA Experiment 20000492 PARAMETER Experiment Name: Zm_Hybrid_Seed_Dev_P Parameter: Plant Line Value: 35A19
  misc_feature: MA Experiment 20000492 PARAMETER Experiment Name: Zm_Hybrid_Seed_Dev_P Parameter: Tissue Value: Fert Kernel vs. Unfert Floret
  misc_feature: MA Experiment ID: 20000535 Result: Down-regulated in Transcription
  misc_feature: MA Experiment 20000535 PARAMETER Experiment Name: Zm_Hybrid_Seed_Dev_P Parameter: DAP Value: 30 vs. 12
  misc_feature: MA Experiment 20000535 PARAMETER Experiment Name: Zm_Hybrid_Seed_Dev_P Parameter: Organism Value: Zea mays
  misc_feature: MA Experiment 20000535 PARAMETER Experiment Name: Zm_Hybrid_Seed_Dev_P Parameter: Plant Line Value: 35A19
  misc_feature: MA Experiment 20000535 PARAMETER Experiment Name: Zm_Hybrid_Seed_Dev_P Parameter: Tissue Value: Embryo vs. Unfert Floret
acgaaaacaagcacagagagagagagaaccccagcgggcaaacgcctccctccccctgcctccaggccccagatccggccatccgggtagctccagaccttctccaatggcggtcaaggtctacgtcgtgttttactccacctacgggcacgttgccaagcttgctgaggagatgaagaaaggcgccgcttcagttgaaggcgtggaggtcaaagtatggcaggtcagtgtctgtcagcaacggtgcaatcttcgagttagctagaaccaatgtgttgtgtgagtctggaatggtcaccgccaaattcccatcggtttcactttcacacgcgaaggtcccggagattctgtccgaggaggtgctcggcaagatgggcgcgccacccaagaccgacgcgccggtcatcaccccgcaggagctggcggaggccgacggcgtcctcttcgggttccccacgcggttcggcatgatggcggcgcagatgaaggccttcttcgacgcgaccggcgggctgtggcgcgagcagagcctggccggcaagcccgccggcctcttcttcagcaccggctcccagggtggcggccaggagaccacgccgtgagcagccgtctcctctccttttttcacaacatgtttccttccccttgcagcaccaaccgatcgaatcgcagaagcagtgggtaacgtttcccccttggcgtggcggccaggctgacggcggtgacgcagctgacgcaccacgggatggtgttcgtgcctgtggggtacacgttcggcgccaagatattcgacatggagagcgtgcacggcggcagcccgtacggcgcgggcacgttcgccggggacgggtcgcggtggccgacggaactggagctggagcacgccttccaccagggcaagtacttcgccggcatcgccaagaggctcaagggcggctccgcctgatatcgctcgcaccctcctatacgtatacataattattatagggaacatatctggtgcatatataaatttagtgtacatggtgcatatattaaatcagcatcactcattttagatataatgtctctagttgttggtatattttgctaagaacaccctccgacgtggtgaagtatagcggtggaaaatattatttataaattgcaatgatcg

SEQ ID NO: 13308 - protein, 103 aa, Zea mays subsp. mays
  peptide (1)..(103): Ceres Seq. ID no. 12355772
  misc_feature (15)..(103): Homolog of NCBI NO: 34910128 NR Description: putative 1,4-benzoquinone reductase [Oryza sativa
  misc_feature (15)..(103): Homolog of NCBI NO: 38636776 NR Description: putative quinone-oxidoreductase QR2 [Oryza sativa
  misc_feature (15)..(103): Homolog of NCBI NO: 21068664 NR Description: putative quinone oxidoreductase [Cicer arietinum]
  misc_feature (15)..(103): Homolog of NCBI NO: 5031275 NR Description: unknown [Prunus armeniaca]
  misc_feature (15)..(103): Homolog of NCBI NO: 15239652 NR Description: quinone reductase, putative; protein id:
  misc_feature (15)..(103): Homolog of NCBI NO: 30687535 NR Description: quinone reductase family [Arabidopsis thaliana]
  misc_feature (15)..(103): Homolog of NCBI NO: 12484052 NR Description: quinone-oxidoreductase QR2 [Triphysaria
  misc_feature (15)..(103): Homolog of NCBI NO: 7445353 NR Description: hypothetical protein M4I22.80 - Arabidopsis >gi|3269288|emb|CAA19721.1| putative protein [Arabidopsis >gi|7269580|emb|CAB79582.1| putative protein [Arabidopsis
  misc_feature (15)..(103): Homolog of NCBI NO: 2564066 NR Description: LEDI-3 protein [Lithospermum erythrorhizon]
  misc_feature (15)..(103): Homolog of NCBI NO: 37724581 NR Description: putative quinone reductase [Vitis vinifera]
MVTAKFPSVSLSHAKVPEILSEEVLGKMGAPPKTDAPVITPQELAEADGVLFGFPTRFGMMAAQMKAFFDATGGLWREQSLAGKPAGLFFSTGSQGGGQETTP

SEQ ID NO: 13309 - protein, 87 aa, Zea mays subsp. mays
  peptide (1)..(87): Ceres Seq. ID no. 12355773
  misc_feature (36)..(75): Homolog of NCBI NO: 34910128 NR Description: putative 1,4-benzoquinone reductase [Oryza sativa
  misc_feature (36)..(75): Homolog of NCBI NO: 38636776 NR Description: putative quinone-oxidoreductase QR2 [Oryza sativa
  misc_feature (39)..(75): Homolog of NCBI NO: 21068664 NR Description: putative quinone oxidoreductase [Cicer arietinum]
  misc_feature (36)..(76): Homolog of NCBI NO: 5031275 NR Description: unknown [Prunus armeniaca]
  misc_feature (36)..(75): Homolog of NCBI NO: 15239652 NR Description: quinone reductase, putative; protein id:
  misc_feature (36)..(75): Homolog of NCBI NO: 30687535 NR Description: quinone reductase family [Arabidopsis thaliana]
  misc_feature (36)..(75): Homolog of NCBI NO: 12484052 NR Description: quinone-oxidoreductase QR2 [Triphysaria
  misc_feature (36)..(75): Homolog of NCBI NO: 7445353 NR Description: hypothetical protein M4I22.80 - Arabidopsis >gi|3269288|emb|CAA19721.1| putative protein [Arabidopsis >gi|7269580|emb|CAB79582.1| putative protein [Arabidopsis
  misc_feature (36)..(76): Homolog of NCBI NO: 2564066 NR Description: LEDI-3 protein [Lithospermum erythrorhizon]
  misc_feature (34)..(75): Homolog of NCBI NO: 15234512 NR Description: quinone reductase family; protein id: supported by cDNA: 35084., supported by cDNA: gi_15529267
RKQAQREREPQRANASLPLPPGPRSGHPGSSRPSPMAVKVYVVFYSTYGHVAKLAEEMKKGAASVEGVEVKVWQVSVCQQRCNLRVS

SEQ ID NO: 13310 - protein, 76 aa, Zea mays subsp. mays
  peptide (1)..(76): Ceres Seq. ID no. 12355774
  misc_feature (1)..(76): Homolog of NCBI NO: 34910128 NR Description: putative 1,4-benzoquinone reductase [Oryza sativa
  misc_feature (1)..(76): Homolog of NCBI NO: 38636776 NR Description: putative quinone-oxidoreductase QR2 [Oryza sativa
  misc_feature (1)..(76): Homolog of NCBI NO: 21068664 NR Description: putative quinone oxidoreductase [Cicer arietinum]
  misc_feature (1)..(76): Homolog of NCBI NO: 5031275 NR Description: unknown [Prunus armeniaca]
  misc_feature (1)..(76): Homolog of NCBI NO: 15239652 NR Description: quinone reductase, putative; protein id:
  misc_feature (1)..(76): Homolog of NCBI NO: 30687535 NR Description: quinone reductase family [Arabidopsis thaliana]
  misc_feature (1)..(76): Homolog of NCBI NO: 12484052 NR Description: quinone-oxidoreductase QR2 [Triphysaria
  misc_feature (1)..(76): Homolog of NCBI NO: 7445353 NR Description: hypothetical protein M4I22.80 - Arabidopsis >gi|3269288|emb|CAA19721.1| putative protein [Arabidopsis >gi|7269580|emb|CAB79582.1| putative protein [Arabidopsis
  misc_feature (1)..(76): Homolog of NCBI NO: 2564066 NR Description: LEDI-3 protein [Lithospermum erythrorhizon]
  misc_feature (1)..(76): Homolog of NCBI NO: 37724581 NR Description: putative quinone reductase [Vitis vinifera]
MGAPPKTDAPVITPQELAEADGVLFGFPTRFGMMAAQMKAFFDATGGLWREQSLAGKPAGLFFSTGSQGGGQETTP

SEQ ID NO: 13311 - DNA, 1647 bp, Zea mays subsp. mays
  misc_feature (1)..(1647): Ceres Seq. ID no. 12411310
  misc_feature: MA Experiment ID: 108522 Result: Down-regulated in Transcription
  misc_feature: MA Experiment 108522 PARAMETER Experiment Name: Zm_42deg_Heat_P Parameter: Age (day) Value: 8
  misc_feature: MA Experiment 108522 PARAMETER Experiment Name: Zm_42deg_Heat_P Parameter: Organism Value: Zea mays
  misc_feature: MA Experiment 108522 PARAMETER Experiment Name: Zm_42deg_Heat_P Parameter: Plant Line Value: 35A19
  misc_feature: MA Experiment 108522 PARAMETER Experiment Name: Zm_42deg_Heat_P Parameter: Temperature (deg C) Value: 42 vs. 22
  misc_feature: MA Experiment 108522 PARAMETER Experiment Name: Zm_42deg_Heat_P Parameter: Timepoint (hr) Value: 1
  misc_feature: MA Experiment 108522 PARAMETER Experiment Name: Zm_42deg_Heat_P Parameter: Tissue Value: Aerial
  misc_feature: MA Experiment ID: 108527 Result: Down-regulated in Transcription
  misc_feature: MA Experiment 108527 PARAMETER Experiment Name: Zm_5mM_NO_P Parameter: Age (day) Value: 8
  misc_feature: MA Experiment 108527 PARAMETER Experiment Name: Zm_5mM_NO_P Parameter: Organism Value: Zea mays
  misc_feature: MA Experiment 108527 PARAMETER Experiment Name: Zm_5mM_NO_P Parameter: Plant Line Value: 35A19
  misc_feature: MA Experiment 108527 PARAMETER Experiment Name: Zm_5mM_NO_P Parameter: Timepoint (hr) Value: 6
  misc_feature: MA Experiment 108527 PARAMETER Experiment Name: Zm_5mM_NO_P Parameter: Tissue Value: Aerial
  misc_feature: MA Experiment 108527 PARAMETER Experiment Name: Zm_5mM_NO_P Parameter: Treatment Value: 5mM NO vs. No Treatment
  misc_feature: MA Experiment ID: 108535 Result: Down-regulated in Transcription
  misc_feature: MA Experiment 108535 PARAMETER Experiment Name: Zm_Meristem_P Parameter: Age (day) Value: 8
  misc_feature: MA Experiment 108535 PARAMETER Experiment Name: Zm_Meristem_P Parameter: Organism Value: Zea mays
  misc_feature: MA Experiment 108535 PARAMETER Experiment Name: Zm_Meristem_P Parameter: Plant Line Value: 35A19
  misc_feature: MA Experiment 108535 PARAMETER Experiment Name: Zm_Meristem_P Parameter: Tissue Value: Root Meristem vs. Above Root Meristem
aaaaacacctgtggcagcggccgcgctgcttgcctcgccttgctctcggttcgtggggcatggcggcttcgccggcttgtgctccggggctcatctccggccccaccctccctcccctgcccgttgccttccgctgctactgggcccaaaagccctcctccgcgtcgacctcctccaggcgcccgtgccgcaggcggttcgttcccgttgcagctgcctccacccgcacctcctctgcggctgctcggggcctcgacgccgacgacttccgccacccgctcgacaagcagaacactcttctgctgagagcaattccagggctcaacgacgtgggcaaagctttgctaggacccgtctcggagcaagttatggtactccagaacattggaacatcagttctcgtctccccgaaccagcttccagatctccaccaactgctggttgaggctgcgaagctcttgaacaccgaagctcctgacttgtacataaggcagaatcctgttccaaatgcctacaccttagcaatcaacggcaaaaaaccattcattgtcgttcacacaagccttgtggagctgcttactccaagggaattgcaggctgttttggctcatgagctgggtcacctcaagtgcgatcatggtgtttggctcacttttgccaatatactcacaatgggagcatacactgtccctggttttggcatggttgctggcttcctggaagagcagctatacagatggctacgagctgcagagctgacttgtgacagggcagctcttcttgtggtgcaagatccgaaggtagtcatctctgttctgatgaaattggccggaggatgcccatctcttgccgacaagctaaatgtggatgccttcctggagcaagctcgttcgtacgacaaggctgcatcgaacccagttgggtggtacatccggaatgcacaaaccagagagctttcacaccctttgcctgtgatgcgagccagagagatcgatgagtggtcaagaagccaggagtacaaaaccgtaatgcaaaaaatgcttaagatggggctgaacagagtatagttagtgatgacacatacgaagaggtctgtacacggaatccatcatgtttctttgcaaggatttagctttagatcatgggcctgtttggttcagcttttttctaaccagcttttctgaaaatctggctgtggggagaatctgagtatcattacgattacatatgaaggaagataaagttgttcatagggctcaggatctagaaagtgacagattcctactattacaacgactgaaccgattatgtgtttatgttgattttggatggtttttgtcctcaacgaattttatagaagttggctgaaaagctgagcgtttggcagtctgcagcagcttttggtggtcagaagctaccagaagccgaaacaaacaggccccatgactgtcctttcctgtatatctgatcatgaatttgtgattttctcctgggtggctgggcaccgttttttttcaggactgtagagtctgtatatggagaatgtatgtatatggaagggaatgtctgtatatggagaaggctggtgtttctgaaaaaaaaacagatacaaacatagacatactgtatatatttgcagttgaattt

SEQ ID NO: 13312 - protein, 354 aa, Zea mays subsp. mays
  peptide (1)..(354): Ceres Seq. ID no. 12411311
  misc_feature (21)..(352): Homolog of NCBI NO: 34905986 NR Description: P0518C01.3 [Oryza sativa (japonica
  misc_feature (82)..(345): Homolog of NCBI NO: 18405231 NR Description: expressed protein; protein id: At3g27110.1, by cDNA: 156849., supported by cDNA: gi_15010605 [Arabidopsis >gi|9279635|dbj|BAB01093.1|
  misc_feature (82)..(345): Homolog of NCBI NO: 21553677 NR Description: unknown [Arabidopsis thaliana]
  misc_feature (83)..(344): Homolog of NCBI NO: 17227669 NR Description: hypothetical protein [Nostoc sp. PCC 7120]
  misc_feature (83)..(344): Homolog of NCBI NO: 16330161 NR Description: hypothetical protein [Synechocystis sp. PCC 6803]
  misc_feature (79)..(346): Homolog of NCBI NO: 22298181 NR Description: ORF_ID:tll0639~hypothetical protein
  misc_feature (83)..(343): Homolog of NCBI NO: 37523123 NR Description: hypothetical protein glr3554 [Gloeobacter
  misc_feature (125)..(348): Homolog of NCBI NO: 23042718 NR Description: hypothetical protein [Trichodesmium erythraeum
  misc_feature (83)..(243): Homolog of NCBI NO: 23124774 NR Description: hypothetical protein [Nostoc punctiforme]
  misc_feature (82)..(343): Homolog of NCBI NO: 23017259 NR Description: hypothetical protein [Thermobifida fusca]
KHLWQRPRCLPRLALGSWGMAASPACAPGLISGPTLPPLPVAFRCYWAQKPSSASTSSRRPCRRRFVPVAAASTRTSSAAARGLDADDFRHPLDKQNTLLLRAIPGLNDVGKALLGPVSEQVMVLQNIGTSVLVSPNQLPDLHQLLVEAAKLLNTEAPDLYIRQNPVPNAYTLAINGKKPFIVVHTSLVELLTPRELQAVLAHELGHLKCDHGVWLTFANILTMGAYTVPGFGMVAGFLEEQLYRWLRAAELTCDRAALLVVQDPKVVISVLMKLAGGCPSLADKLNVDAFLEQARSYDKAASNPVGWYIRNAQTRELSHPLPVMRAREIDEWSRSQEYKTVMQKMLKMGLNRV

SEQ ID NO: 13313 - protein, 335 aa, Zea mays subsp. mays
  peptide (1)..(335): Ceres Seq. ID no. 12411312
  misc_feature (2)..(333): Homolog of NCBI NO: 34905986 NR Description: P0518C01.3 [Oryza sativa (japonica
  misc_feature (63)..(326): Homolog of NCBI NO: 18405231 NR Description: expressed protein; protein id: At3g27110.1, by cDNA: 156849., supported by cDNA: gi_15010605 [Arabidopsis >gi|9279635|dbj|BAB01093.1|
  misc_feature (63)..(326): Homolog of NCBI NO: 21553677 NR Description: unknown [Arabidopsis thaliana]
  misc_feature (64)..(325): Homolog of NCBI NO: 17227669 NR Description: hypothetical protein [Nostoc sp. PCC 7120]
  misc_feature (64)..(325): Homolog of NCBI NO: 16330161 NR Description: hypothetical protein [Synechocystis sp. PCC 6803]
  misc_feature (60)..(327): Homolog of NCBI NO: 22298181 NR Description: ORF_ID:tll0639~hypothetical protein
  misc_feature (64)..(324): Homolog of NCBI NO: 37523123 NR Description: hypothetical protein glr3554 [Gloeobacter
  misc_feature (106)..(329): Homolog of NCBI NO: 23042718 NR Description: hypothetical protein [Trichodesmium erythraeum
  misc_feature (64)..(224): Homolog of NCBI NO: 23124774 NR Description: hypothetical protein [Nostoc punctiforme]
  misc_feature (63)..(324): Homolog of NCBI NO: 23017259 NR Description: hypothetical protein [Thermobifida fusca]
MAASPACAPGLISGPTLPPLPVAFRCYWAQKPSSASTSSRRPCRRRFVPVAAASTRTSSAAARGLDADDFRHPLDKQNTLLLRAIPGLNDVGKALLGPVSEQVMVLQNIGTSVLVSPNQLPDLHQLLVEAAKLLNTEAPDLYIRQNPVPNAYTLAINGKKPFIVVHTSLVELLTPRELQAVLAHELGHLKCDHGVWLTFANILTMGAYTVPGFGMVAGFLEEQLYRWLRAAELTCDRAALLVVQDPKVVISVLMKLAGGCPSLADKLNVDAFLEQARSYDKAASNPVGWYIRNAQTRELSHPLPVMRAREIDEWSRSQEYKTVMQKMLKMGLNRV

SEQ ID NO: 13314 - protein, 232 aa, Zea mays subsp. mays
  peptide (1)..(232): Ceres Seq. ID no. 12411313
  misc_feature (1)..(230): Homolog of NCBI NO: 34905986 NR Description: P0518C01.3 [Oryza sativa (japonica
  misc_feature (1)..(223): Homolog of NCBI NO: 18405231 NR Description: expressed protein; protein id: At3g27110.1, by cDNA: 156849., supported by cDNA: gi_15010605 [Arabidopsis >gi|9279635|dbj|BAB01093.1|
  misc_feature (1)..(223): Homolog of NCBI NO: 21553677 NR Description: unknown [Arabidopsis thaliana]
  misc_feature (1)..(222): Homolog of NCBI NO: 17227669 NR Description: hypothetical protein [Nostoc sp. PCC 7120]
  misc_feature (1)..(222): Homolog of NCBI NO: 16330161 NR Description: hypothetical protein [Synechocystis sp. PCC 6803]
  misc_feature (1)..(224): Homolog of NCBI NO: 22298181 NR Description: ORF_ID:tll0639~hypothetical protein
  misc_feature (1)..(221): Homolog of NCBI NO: 37523123 NR Description: hypothetical protein glr3554 [Gloeobacter
  misc_feature (3)..(226): Homolog of NCBI NO: 23042718 NR Description: hypothetical protein [Trichodesmium erythraeum
  misc_feature (1)..(121): Homolog of NCBI NO: 23124774 NR Description: hypothetical protein [Nostoc punctiforme]
  misc_feature (1)..(221): Homolog of NCBI NO: 23017259 NR Description: hypothetical protein [Thermobifida fusca]
MVLQNIGTSVLVSPNQLPDLHQLLVEAAKLLNTEAPDLYIRQNPVPNAYTLAINGKKPFIVVHTSLVELLTPRELQAVLAHELGHLKCDHGVWLTFANILTMGAYTVPGFGMVAGFLEEQLYRWLRAAELTCDRAALLVVQDPKVVISVLMKLAGGCPSLADKLNVDAFLEQARSYDKAASNPVGWYIRNAQTRELSHPLPVMRAREIDEWSRSQEYKTVMQKMLKMGLNRV

SEQ ID NO: 13315 - DNA, 1306 bp, Zea mays subsp. mays
  misc_feature (1)..(1306): Ceres Seq. ID no. 12405880
  misc_feature: MA Experiment ID: 108544 Result: Up-regulated in Transcription
  misc_feature: MA Experiment ID: 108556 Result: Up-regulated in Transcription
  misc_feature: MA Experiment 108556 PARAMETER Experiment Name: Zm_Drought_P Parameter: Age (day) Value: 9
  misc_feature: MA Experiment 108556 PARAMETER Experiment Name: Zm_Drought_P Parameter: Organism Value: Zea mays
  misc_feature: MA Experiment 108556 PARAMETER Experiment Name: Zm_Drought_P Parameter: Plant Line Value: 35A19
  misc_feature: MA Experiment 108556 PARAMETER Experiment Name: Zm_Drought_P Parameter: Timepoint (hr) Value: 24
  misc_feature: MA Experiment 108556 PARAMETER Experiment Name: Zm_Drought_P Parameter: Tissue Value: Aerial
  misc_feature: MA Experiment 108556 PARAMETER Experiment Name: Zm_Drought_P Parameter: Treatment Value: Drought vs. No Drought
  misc_feature: MA Experiment ID: 20000478 Result: Up-regulated in Transcription
  misc_feature: MA Experiment 20000478 PARAMETER Experiment Name: Zm_5mM_SA_P Parameter: Age (day) Value: 11
  misc_feature: MA Experiment 20000478 PARAMETER Experiment Name: Zm_5mM_SA_P Parameter: Organism Value: Zea mays
  misc_feature: MA Experiment 20000478 PARAMETER Experiment Name: Zm_5mM_SA_P Parameter: Plant Line Value: 35A19
  misc_feature: MA Experiment 20000478 PARAMETER Experiment Name: Zm_5mM_SA_P Parameter: Timepoint (hr) Value: 72
  misc_feature: MA Experiment 20000478 PARAMETER Experiment Name: Zm_5mM_SA_P Parameter: Tissue Value: Aerial
  misc_feature: MA Experiment 20000478 PARAMETER Experiment Name: Zm_5mM_SA_P Parameter: Treatment Value: 5mM SA vs. No Treatment
acccaaccccaccttcattgattgattacagcccgttcatccttccttcccccgtcgaatcccaccttccttcccccgcccgttaagcagccgagtcagcagcaatggcggccgtgctgaggagagccgtggcgcagtgcttcgcgtcgtcgtcgtcgtcgtcgccggcgacgttcgggctccggcggttcctgcaggagcagccggcgttccgccccgccgtgccgcccgaccgcttcatgcccctggccgaccggatccgggacctcggggtcggcgtcgcattcccgcggatcaacctcgacggcctcgtgccgcccgcgccggcgccggcgccggccaagcgggagccggacgcggcgctgcccgcggcgagcctcacggtggaggaggcgcgcaaggtgctgcgcgccacacagatggaggcggcccgcgcgcggattcgggagtccggcgccggcgccgtgccgtacgccgacttcctgcgcctctgctgcgacgccgccggcccggacgcgggcccctccgtcgcgcgcgcgctcgacgagtccggatccgtcatcgtgctcggaaagaccgtcttcctcaggcccgacatggtcgtgaaggcaatcgagaacgcgatccccgtgcggcacgccgccgccgccgccgccgcggagatcgaccccgcgagggaggaggagctgagggccatggaggcggagaaggcggagatcgaccgcgcggcggcggcgcgggtgcggcgggagctgtggtgcgggctgacgtacctggtgatccagacggccgggttcatgcggctcaccttctgggagctgtcgtgggacgtgatggagcccatctgcttctacgtcacgtccatgtacttcatggccggctacgccttcttcctccgcaccaagaaggagccgtcgttcgaaggcttcttcgagagccggttcgcggccaagcagaagcgcgtgatgcgcgcccggggcttcgacctccgcaggtacgaggagctccggagagcctgcggcgtggcggcgccgccgctccaggcccggaccccctgcgcgagccgggcgcggcgcgggagagcggccattgccactcctactgccattgccattgatcttggcctcgctcggttcattcctttctttttttctttgttgttcatgcccatttggtggggatgatgattcgtgtatccatctgatgcgcgcgcggatgcaaaaaaaaaagaagcatactgaattgaggtttaaacttggaaccagggcgtccaaatgatgcataagccatgtccgactgttcgtcc

SEQ ID NO: 13316 - protein, 359 aa, Zea mays subsp. mays
  peptide (1)..(359): Ceres Seq. ID no. 12405881
  misc_feature (129)..(307): Pfam Name: Protein of unknown function, DUF607 Pfam Description: Protein of unknown function, DUF607
  misc_feature (1)..(318): Homolog of NCBI NO: 37535778 NR Description: unknown protein [Oryza sativa (japonica
  misc_feature (8)..(309): Homolog of NCBI NO: 20330769 NR Description: Hypothetical protein [Oryza sativa (japonica
  misc_feature (27)..(303): Homolog of NCBI NO: 15240047 NR Description: putative protein; protein id: At5g66650.1, by cDNA: gi_14596230 [Arabidopsis thaliana] contains similarity to unknown
  misc_feature (91)..(303): Homolog of NCBI NO: 15224063 NR Description: hypothetical protein; protein id: At2g23790.1
  misc_feature (91)..(303): Homolog of NCBI NO: 24496456 NR Description: hypothetical protein [Arabidopsis thaliana]
  misc_feature (27)..(303): Homolog of NCBI NO: 14596231 NR Description: Unknown protein [Arabidopsis thaliana]
  misc_feature (48)..(303): Homolog of NCBI NO: 15234535 NR Description: putative protein; protein id: At4g36820.1
  misc_feature (77)..(301): Homolog of NCBI NO: 15239011 NR Description: unknown protein; protein id: At5g42610.1 thaliana] >gi|10177139|dbj|BAB10499.1| gene_id:MFO20.2~unknown
  misc_feature (70)..(305): Homolog of NCBI NO: 34909244 NR Description: B1148D12.10 [Oryza sativa (japonica
  misc_feature (92)..(303): Homolog of NCBI NO: 18391039 NR Description: Expressed protein; protein id: At1g09575.1,
MAAVLRRAVAQCFASSSSSSPATFGLRRFLQEQPAFRPAVPPDRFMPLADRIRDLGVGVAFPRINLDGLVPPAPAPAPAKREPDAALPAASLTVEEARKVLRATQMEAARARIRESGAGAVPYADFLRLCCDAAGPDAGPSVARALDESGSVIVLGKTVFLRPDMVVKAIENAIPVRHAAAAAAAEIDPAREEELRAMEAEKAEIDRAAAARVRRELWCGLTYLVIQTAGFMRLTFWELSWDVMEPICFYVTSMYFMAGYAFFLRTKKEPSFEGFFESRFAAKQKRVMRARGFDLRRYEELRRACGVAAPPLQARTPCASRARRGRAAIATPTAIAIDLGLARFIPFFFSLLFMPIWWG

SEQ ID NO: 13317 - protein, 314 aa, Zea mays subsp. mays
  peptide (1)..(314): Ceres Seq. ID no. 12405882
  misc_feature (84)..(262): Pfam Name: Protein of unknown function, DUF607 Pfam Description: Protein of unknown function, DUF607
  misc_feature (1)..(273): Homolog of NCBI NO: 37535778 NR Description: unknown protein [Oryza sativa (japonica
  misc_feature (1)..(264): Homolog of NCBI NO: 20330769 NR Description: Hypothetical protein [Oryza sativa (japonica
  misc_feature (1)..(258): Homolog of NCBI NO: 15240047 NR Description: putative protein; protein id: At5g66650.1, by cDNA: gi_14596230 [Arabidopsis thaliana] contains similarity to unknown
  misc_feature (46)..(258): Homolog of NCBI NO: 15224063 NR Description: hypothetical protein; protein id: At2g23790.1
  misc_feature (46)..(258): Homolog of NCBI NO: 24496456 NR Description: hypothetical protein [Arabidopsis thaliana]
  misc_feature (1)..(258): Homolog of NCBI NO: 14596231 NR Description: Unknown protein [Arabidopsis thaliana]
  misc_feature (3)..(258): Homolog of NCBI NO: 15234535 NR Description: putative protein; protein id: At4g36820.1
  misc_feature (32)..(256): Homolog of NCBI NO: 15239011 NR Description: unknown protein; protein id: At5g42610.1 thaliana] >gi|10177139|dbj|BAB10499.1| gene_id:MFO20.2~unknown
  misc_feature (25)..(260): Homolog of NCBI NO: 34909244 NR Description: B1148D12.10 [Oryza sativa (japonica
  misc_feature (47)..(258): Homolog of NCBI NO: 18391039 NR Description: Expressed protein; protein id: At1g09575.1,
MPLADRIRDLGVGVAFPRINLDGLVPPAPAPAPAKREPDAALPAASLTVEEARKVLRATQMEAARARIRESGAGAVPYADFLRLCCDAAGPDAGPSVARALDESGSVIVLGKTVFLRPDMVVKAIENAIPVRHAAAAAAAEIDPAREEELRAMEAEKAEIDRAAAARVRRELWCGLTYLVIQTAGFMRLTFWELSWDVMEPICFYVTSMYFMAGYAFFLRTKKEPSFEGFFESRFAAKQKRVMRARGFDLRRYEELRRACGVAAPPLQARTPCASRARRGRAAIATPTAIAIDLGLARFIPFFFSLLFMPIWWG

SEQ ID NO: 13318 - protein, 254 aa, Zea mays subsp. mays
  peptide (1)..(254): Ceres Seq. ID no. 12405883
  misc_feature (24)..(202): Pfam Name: Protein of unknown function, DUF607 Pfam Description: Protein of unknown function, DUF607
  misc_feature (1)..(213): Homolog of NCBI NO: 37535778 NR Description: unknown protein [Oryza sativa (japonica
  misc_feature (1)..(204): Homolog of NCBI NO: 20330769 NR Description: Hypothetical protein [Oryza sativa (japonica
  misc_feature (1)..(198): Homolog of NCBI NO: 15240047 NR Description: putative protein; protein id: At5g66650.1, by cDNA: gi_14596230 [Arabidopsis thaliana] contains similarity to unknown
  misc_feature (1)..(198): Homolog of NCBI NO: 15224063 NR Description: hypothetical protein; protein id: At2g23790.1
  misc_feature (1)..(198): Homolog of NCBI NO: 24496456 NR Description: hypothetical protein [Arabidopsis thaliana]
  misc_feature (1)..(198): Homolog of NCBI NO: 14596231 NR Description: Unknown protein [Arabidopsis thaliana]
  misc_feature (1)..(198): Homolog of NCBI NO: 15234535 NR Description: putative protein; protein id: At4g36820.1
  misc_feature (1)..(196): Homolog of NCBI NO: 15239011 NR Description: unknown protein; protein id: At5g42610.1 thaliana] >gi|10177139|dbj|BAB10499.1| gene_id:MFO20.2~unknown
  misc_feature (1)..(200): Homolog of NCBI NO: 34909244 NR Description: B1148D12.10 [Oryza sativa (japonica
  misc_feature (1)..(198): Homolog of NCBI NO: 18391039 NR Description: Expressed protein; protein id: At1g09575.1,
MEAARARIRESGAGAVPYADFLRLCCDAAGPDAGPSVARALDESGSVIVLGKTVFLRPDMVVKAIENAIPVRHAAAAAAAEIDPAREEELRAMEAEKAEIDRAAAARVRRELWCGLTYLVIQTAGFMRLTFWELSWDVMEPICFYVTSMYFMAGYAFFLRTKKEPSFEGFFESRFAAKQKRVMRARGFDLRRYEELRRACGVAAPPLQARTPCASRARRGRAAIATPTAIAIDLGLARFIPFFFSLLFMPIWWG

SEQ ID NO: 13319 - DNA, 1482 bp, Zea mays subsp. mays
  misc_feature (1)..(1482): Ceres Seq. ID no. 12366791
  misc_feature: MA Experiment ID: 108597 Result: Down-regulated in Transcription
  misc_feature: MA Experiment 108597 PARAMETER Experiment Name: Zm_100uM_ABA_P Parameter: Age (day) Value: 9
  misc_feature: MA Experiment 108597 PARAMETER Experiment Name: Zm_100uM_ABA_P Parameter: Organism Value: Zea mays
  misc_feature: MA Experiment 108597 PARAMETER Experiment Name: Zm_100uM_ABA_P Parameter: Plant Line Value: 35A19
  misc_feature: MA Experiment 108597 PARAMETER Experiment Name: Zm_100uM_ABA_P Parameter: Timepoint (hr) Value: 24
  misc_feature: MA Experiment 108597 PARAMETER Experiment Name: Zm_100uM_ABA_P Parameter: Tissue Value: Aerial
  misc_feature: MA Experiment 108597 PARAMETER Experiment Name: Zm_100uM_ABA_P Parameter: Treatment Value: 100uM ABA vs. No Treatment
  misc_feature: MA Experiment ID: 20000477 Result: Down-regulated in Transcription
  misc_feature: MA Experiment 20000477 PARAMETER Experiment Name: Zm_5mM_SA_P Parameter: Age (day) Value: 10
  misc_feature: MA Experiment 20000477 PARAMETER Experiment Name: Zm_5mM_SA_P Parameter: Organism Value: Zea mays
  misc_feature: MA Experiment 20000477 PARAMETER Experiment Name: Zm_5mM_SA_P Parameter: Plant Line Value: 35A19
  misc_feature: MA Experiment 20000477 PARAMETER Experiment Name: Zm_5mM_SA_P Parameter: Timepoint (hr) Value: 48
  misc_feature: MA Experiment 20000477 PARAMETER Experiment Name: Zm_5mM_SA_P Parameter: Tissue Value: Aerial
  misc_feature: MA Experiment 20000477 PARAMETER Experiment Name: Zm_5mM_SA_P Parameter: Treatment Value: 5mM SA vs. No Treatment
  misc_feature: MA Experiment ID: 20000478 Result: Down-regulated in Transcription
  misc_feature: MA Experiment 20000478 PARAMETER Experiment Name: Zm_5mM_SA_P Parameter: Age (day) Value: 11
  misc_feature: MA Experiment 20000478 PARAMETER Experiment Name: Zm_5mM_SA_P Parameter: Organism Value: Zea mays
  misc_feature: MA Experiment 20000478 PARAMETER Experiment Name: Zm_5mM_SA_P Parameter: Plant Line Value: 35A19
  misc_feature: MA Experiment 20000478 PARAMETER Experiment Name: Zm_5mM_SA_P Parameter: Timepoint (hr) Value: 72
  misc_feature: MA Experiment 20000478 PARAMETER Experiment Name: Zm_5mM_SA_P Parameter: Tissue Value: Aerial
  misc_feature: MA Experiment 20000478 PARAMETER Experiment Name: Zm_5mM_SA_P Parameter: Treatment Value: 5mM SA vs. No Treatment
  misc_feature: MA Experiment ID: 20000479 Result: Down-regulated in Transcription
  misc_feature: MA Experiment 20000479 PARAMETER Experiment Name: Zm_Drought_P Parameter: Age (day) Value: 10
  misc_feature: MA Experiment 20000479 PARAMETER Experiment Name: Zm_Drought_P Parameter: Organism Value: Zea mays
  misc_feature: MA Experiment 20000479 PARAMETER Experiment Name: Zm_Drought_P Parameter: Plant Line Value: 35A19
  misc_feature: MA Experiment 20000479 PARAMETER Experiment Name: Zm_Drought_P Parameter: Timepoint (hr) Value: 48
  misc_feature: MA Experiment 20000479 PARAMETER Experiment Name: Zm_Drought_P Parameter: Tissue Value: Aerial
  misc_feature: MA Experiment 20000479 PARAMETER Experiment Name: Zm_Drought_P Parameter: Treatment Value: Drought vs. No Drought
  misc_feature: MA Experiment ID: 20000480 Result: Down-regulated in Transcription
  misc_feature: MA Experiment 20000480 PARAMETER Experiment Name: Zm_Drought_P Parameter: Age (day) Value: 11
  misc_feature: MA Experiment 20000480 PARAMETER Experiment Name: Zm_Drought_P Parameter: Organism Value: Zea mays
  misc_feature: MA Experiment 20000480 PARAMETER Experiment Name: Zm_Drought_P Parameter: Plant Line Value: 35A19
  misc_feature: MA Experiment 20000480 PARAMETER Experiment Name: Zm_Drought_P Parameter: Timepoint (hr) Value: 72
  misc_feature: MA Experiment 20000480 PARAMETER Experiment Name: Zm_Drought_P Parameter: Tissue Value: Aerial
  misc_feature: MA Experiment 20000480 PARAMETER Experiment Name: Zm_Drought_P Parameter: Treatment Value: Drought vs. No Drought
  misc_feature: MA Experiment ID: 20000534 Result: Down-regulated in Transcription
  misc_feature: MA Experiment 20000534 PARAMETER Experiment Name: Zm_Hybrid_Pollen_P Parameter: Age (day) Value: 8
  misc_feature: MA Experiment 20000534 PARAMETER Experiment Name: Zm_Hybrid_Pollen_P Parameter: Organism Value: Zea mays
  misc_feature: MA Experiment 20000534 PARAMETER Experiment Name: Zm_Hybrid_Pollen_P Parameter: Plant Line Value: 35A19
  misc_feature: MA Experiment 20000534 PARAMETER Experiment Name: Zm_Hybrid_Pollen_P Parameter: Tissue Value: Pollen vs. Aerial
  misc_feature: MA Experiment ID: 20000630 Result: Down-regulated in Transcription
  misc_feature: MA Experiment 20000630 PARAMETER Experiment Name: Zm_Herbicide-Treatments_P Parameter: Timepoint (hr) Value: 4
  misc_feature: MA Experiment 20000630 PARAMETER Experiment Name: Zm_Herbicide-Treatments_P Parameter: Tissue Value: Aerial
  misc_feature: MA Experiment 20000630 PARAMETER Experiment Name: Zm_Herbicide-Treatments_P Parameter: Treatment Value: Roundup vs. No Treatment
cagtaggtggaccattctgtcgtgctcacccaatgccaatggagtcggttgcggtcgtggcggtgccgttcccggcgcagggccaccttaacgcgctgctgcacctgtcgctgcagctggcggcgcgcggggtacccgtacactacgcggcgcccatggagcacgtccgccaggcccggtcgcgcgttcaaggctggggcgacgacaccctctgccgcgtacacttccacgagctctccgtctccgcgtacgcctccccgccgccagaccctgccgccgaatcggccttcccctcgcacctcgtgcccatgtgggaggccttcaccaccgacgcgcccgccccgctcgcggcgctcctcggcgggatctccgcctcctgccgccgcttcgtcgtcctgtacgacatcgccaacgggttcgccgccgaagaggccgcgcggctgcccaacggcgaggggttcgggctggtgtgcaccgcggtgtcgtgcatcgtcgggcggacggacgccggcagccggctcgtgcgtgagcgcgggctcgacttcttccccgtcaactcctttgtgacggaggagtttctggctaccgtcggcaagcgggcgagatgggcgcagtccataccgtgcagcgtcggcatcctcgccaacacctgccgcgcgctcgagggtgagttcatcgatattttcgcgcagcagcttgccgccgccggcaagaacctctttgtcgtcggccccttgaacccactactgctgccggacgcgaggtcgcccaagcatggaattagcaaggagcgccacgagtgcctggactggctcgacctgcagccgccggcatcggtggtctacgtgtcgttgggttctacgtcgtcgctgcgagacgagcaagtcgaggagctcgcatctgcgctgcgcgacagcaagcagcggttcatctgggtgctgcgcgacgccgaccgggccaacatattcgcggaccacggcgagagcccccggcacgccaagttcctgcccgagttcgctgaacacacccaggacagggggctggtgatcaccgggtgggcgccgcagctggagatcctggcgcacggcgccacggcggcgttcctgagccactgcggctggaactcgatcatggagagcatgggacacgggaagcccatcctcgcctggcccatgcactccgaccagccatgggacgctgagctcgtatgcaagcaccacaaggcgggcatcctgatccgcccgatggagaagcaaagggaggtgatttcggcagcggccatacaggaggcaatcgagaagatgatggtctctgatgaaggctacaagatccaacagcgcgcaatggcgctgggccaagctatccgtgcgtcagcagcagtaggcggtgggtcagagaacaaggacctggataagttcattgcccacatctcaaggtgatttggggatttctggttggtttgggaaatgtcaagcatatttc

SEQ ID NO: 13320 - protein, 478 aa, Zea mays subsp. mays
  peptide (1)..(478): Ceres Seq. ID no. 12366792
  misc_feature (12)..(478): Homolog of NCBI NO: 38345403 NR Description: OSJNBa0017B10.9 [Oryza sativa (japonica
  misc_feature (12)..(478): Homolog of NCBI NO: 38345407 NR Description: OSJNBa0017B10.13 [Oryza sativa (japonica
  misc_feature (13)..(478): Homolog of NCBI NO: 14091010 NR Description: cis-zeatin O-glucosyltransferase [Zea mays]
  misc_feature (13)..(478): Homolog of NCBI NO: 18568243 NR Description: putative cis-zeatin O-glucosyltransferase [Zea
  misc_feature (13)..(478): Homolog of NCBI NO: 19743738 NR Description: cis-zeatin O-glucosyltransferase 2 [Zea mays]
  misc_feature (13)..(478): Homolog of NCBI NO: 38345594 NR Description: OSJNBb0012E24.12 [Oryza sativa (japonica
  misc_feature (13)..(478): Homolog of NCBI NO: 38345593 NR Description: OSJNBb0012E24.11 [Oryza sativa (japonica
  misc_feature (15)..(478): Homolog of NCBI NO: 34899110 NR Description: putative cis-zeatin O-glucosyltransferase [Oryza
  misc_feature (13)..(383): Homolog of NCBI NO: 38345592 NR Description: OSJNBb0012E24.10 [Oryza sativa (japonica
  misc_feature (16)..(478): Homolog of NCBI NO: 20067056 NR Description: putative glucosyltransferase [Phaseolus lunatus]
VGGPFCRAHPMPMESVAVVAVPFPAQGHLNALLHLSLQLAARGVPVHYAAPMEHVRQARSRVQGWGDDTLCRVHFHELSVSAYASPPPDPAAESAFPSHLVPMWEAFTTDAPAPLAALLGGISASCRRFVVLYDIANGFAAEEAARLPNGEGFGLVCTAVSCIVGRTDAGSRLVRERGLDFFPVNSFVTEEFLATVGKRARWAQSIPCSVGILANTCRALEGEFIDIFAQQLAAAGKNLFVVGPLNPLLLPDARSPKHGISKERHECLDWLDLQPPASVVYVSLGSTSSLRDEQVEELASALRDSKQRFIWVLRDADRANIFADHGESPRHAKFLPEFAEHTQDRGLVITGWAPQLEILAHGATAAFLSHCGWNSIMESMGHGKPILAWPMHSDQPWDAELVCKHHKAGILIRPMEKQREVISAAAIQEAIEKMMVSDEGYKIQQRAMALGQAIRASAAVGGGSENKDLDKFIAHISR

SEQ ID NO: 13321 - protein, 468 aa, Zea mays subsp. mays
  peptide (1)..(468): Ceres Seq. ID no. 12366793
  misc_feature (2)..(468): Homolog of NCBI NO: 38345403 NR Description: OSJNBa0017B10.9 [Oryza sativa (japonica
  misc_feature (2)..(468): Homolog of NCBI NO: 38345407 NR Description: OSJNBa0017B10.13 [Oryza sativa (japonica
  misc_feature (3)..(468): Homolog of NCBI NO: 14091010 NR Description: cis-zeatin O-glucosyltransferase [Zea mays]
  misc_feature (3)..(468): Homolog of NCBI NO: 18568243 NR Description: putative cis-zeatin O-glucosyltransferase [Zea
  misc_feature (3)..(468): Homolog of NCBI NO: 19743738 NR Description: cis-zeatin O-glucosyltransferase 2 [Zea mays]
  misc_feature (3)..(468): Homolog of NCBI NO: 38345594 NR Description: OSJNBb0012E24.12 [Oryza sativa (japonica
  misc_feature (3)..(468): Homolog of NCBI NO: 38345593 NR Description: OSJNBb0012E24.11 [Oryza sativa (japonica
  misc_feature (5)..(468): Homolog of NCBI NO: 34899110 NR Description: putative cis-zeatin O-glucosyltransferase [Oryza
  misc_feature (3)..(373): Homolog of NCBI NO: 38345592 NR Description: OSJNBb0012E24.10 [Oryza sativa (japonica
  misc_feature (6)..(468): Homolog of NCBI NO: 20067056 NR Description: putative glucosyltransferase [Phaseolus lunatus]
MPMESVAVVAVPFPAQGHLNALLHLSLQLAARGVPVHYAAPMEHVRQARSRVQGWGDDTLCRVHFHELSVSAYASPPPDPAAESAFPSHLVPMWEAFTTDAPAPLAALLGGISASCRRFVVLYDIANGFAAEEAARLPNGEGFGLVCTAVSCIVGRTDAGSRLVRERGLDFFPVNSFVTEEFLATVGKRARWAQSIPCSVGILANTCRALEGEFIDIFAQQLAAAGKNLFVVGPLNPLLLPDARSPKHGISKERHECLDWLDLQPPASVVYVSLGSTSSLRDEQVEELASALRDSKQRFIWVLRDADRANIFADHGESPRHAKFLPEFAEHTQDRGLVITGWAPQLEILAHGATAAFLSHCGWNSIMESMGHGKPILAWPMHSDQPWDAELVCKHHKAGILIRPMEKQREVISAAAIQEAIEKMMVSDEGYKIQQRAMALGQAIRASAAVGGGSENKDLDKFIAHISR

SEQ ID NO: 13322 - protein, 466 aa, Zea mays subsp. mays
  peptide (1)..(466): Ceres Seq. ID no. 12366794
  misc_feature (1)..(466): Homolog of NCBI NO: 38345407 NR Description: OSJNBa0017B10.13 [Oryza sativa (japonica
  misc_feature (1)..(466): Homolog of NCBI NO: 14091010 NR Description: cis-zeatin O-glucosyltransferase [Zea mays]
  misc_feature (1)..(466): Homolog of NCBI NO: 18568243 NR Description: putative cis-zeatin O-glucosyltransferase [Zea
  misc_feature (1)..(466): Homolog of NCBI NO: 19743738 NR Description: cis-zeatin O-glucosyltransferase 2 [Zea mays]
  misc_feature (1)..(466): Homolog of NCBI NO: 38345594 NR Description: OSJNBb0012E24.12 [Oryza sativa (japonica
  misc_feature (1)..(466): Homolog of NCBI NO: 38345593 NR Description: OSJNBb0012E24.11 [Oryza sativa (japonica
  misc_feature (3)..(466): Homolog of NCBI NO: 34899110 NR Description: putative cis-zeatin O-glucosyltransferase [Oryza
  misc_feature (1)..(371): Homolog of NCBI NO: 38345592 NR Description: OSJNBb0012E24.10 [Oryza sativa (japonica
  misc_feature (4)..(466): Homolog of NCBI NO: 20067056 NR Description: putative glucosyltransferase [Phaseolus lunatus]
  misc_feature (1)..(466): Homolog of NCBI NO: 38345403 NR Description: OSJNBa0017B10.9 [Oryza sativa (japonica
MESVAVVAVPFPAQGHLNALLHLSLQLAARGVPVHYAAPMEHVRQARSRVQGWGDDTLCRVHFHELSVSAYASPPPDPAAESAFPSHLVPMWEAFTTDAPAPLAALLGGISASCRRFVVLYDIANGFAAEEAARLPNGEGFGLVCTAVSCIVGRTDAGSRLVRERGLDFFPVNSFVTEEFLATVGKRARWAQSIPCSVGILANTCRALEGEFIDIFAQQLAAAGKNLFVVGPLNPLLLPDARSPKHGISKERHECLDWLDLQPPASVVYVSLGSTSSLRDEQVEELASALRDSKQRFIWVLRDADRANIFADHGESPRHAKFLPEFAEHTQDRGLVITGWAPQLEILAHGATAAFLSHCGWNSIMESMGHGKPILAWPMHSDQPWDAELVCKHHKAGILIRPMEKQREVISAAAIQEAIEKMMVSDEGYKIQQRAMALGQAIRASAAVGGGSENKDLDKFIAHISR

SEQ ID NO: 13323 - DNA, 1299 bp, Zea mays subsp. mays
  misc_feature (1)..(1299): Ceres Seq. ID no. 12407378
  misc_feature: MA Experiment ID: 108504 Result: Down-regulated in Transcription
  misc_feature: MA Experiment 108504 PARAMETER Experiment Name: Zm_Drought_P Parameter: Age (day) Value: 8
  misc_feature: MA Experiment 108504 PARAMETER Experiment Name: Zm_Drought_P Parameter: Organism Value: Zea mays
  misc_feature: MA Experiment 108504 PARAMETER Experiment Name: Zm_Drought_P Parameter: Plant Line Value: 35A19
  misc_feature: MA Experiment 108504 PARAMETER Experiment Name: Zm_Drought_P Parameter: Timepoint (hr) Value: 12
  misc_feature: MA Experiment 108504 PARAMETER Experiment Name: Zm_Drought_P Parameter: Tissue Value: Aerial
  misc_feature: MA Experiment 108504 PARAMETER Experiment Name: Zm_Drought_P Parameter: Treatment Value: Drought vs. No Drought
  misc_feature: MA Experiment ID: 108527 Result: Down-regulated in Transcription
  misc_feature: MA Experiment 108527 PARAMETER Experiment Name: Zm_5mM_NO_P Parameter: Age (day) Value: 8
  misc_feature: MA Experiment 108527 PARAMETER Experiment Name: Zm_5mM_NO_P Parameter: Organism Value: Zea mays
  misc_feature: MA Experiment 108527 PARAMETER Experiment Name: Zm_5mM_NO_P Parameter: Plant Line Value: 35A19
  misc_feature: MA Experiment 108527 PARAMETER Experiment Name: Zm_5mM_NO_P Parameter: Timepoint (hr) Value: 6
  misc_feature: MA Experiment 108527 PARAMETER Experiment Name: Zm_5mM_NO_P Parameter: Tissue Value: Aerial
  misc_feature: MA Experiment 108527 PARAMETER Experiment Name: Zm_5mM_NO_P Parameter: Treatment Value: 5mM NO vs. No Treatment
  misc_feature: MA Experiment ID: 108535 Result: Down-regulated in Transcription
  misc_feature: MA Experiment 108535 PARAMETER Experiment Name: Zm_Meristem_P Parameter: Age (day) Value: 8
  misc_feature: MA Experiment 108535 PARAMETER Experiment Name: Zm_Meristem_P Parameter: Organism Value: Zea mays
  misc_feature: MA Experiment 108535 PARAMETER Experiment Name: Zm_Meristem_P Parameter: Plant Line Value: 35A19
  misc_feature: MA Experiment 108535 PARAMETER Experiment Name: Zm_Meristem_P Parameter: Tissue Value: Root Meristem vs. Above Root Meristem
  misc_feature: MA Experiment ID: 108536 Result: Up-regulated in Transcription
  misc_feature: MA Experiment 108536 PARAMETER Experiment Name: Zm_Meristem_P Parameter: Age (day) Value: 8
  misc_feature: MA Experiment 108536 PARAMETER Experiment Name: Zm_Meristem_P Parameter: Organism Value: Zea mays
  misc_feature: MA Experiment 108536 PARAMETER Experiment Name: Zm_Meristem_P Parameter: Plant Line Value: 35A19
  misc_feature: MA Experiment 108536 PARAMETER Experiment Name: Zm_Meristem_P Parameter: Tissue Value: Shoot Meristem vs. Above Shoot Meristem
  misc_feature: MA Experiment ID: 108540 Result: Down-regulated in Transcription
  misc_feature: MA Experiment 108540 PARAMETER Experiment Name: Zm_20percent_PEG_P Parameter: Age (day) Value: 8
  misc_feature: MA Experiment 108540 PARAMETER Experiment Name: Zm_20percent_PEG_P Parameter: Organism Value: Zea mays
  misc_feature: MA Experiment 108540 PARAMETER Experiment Name: Zm_20percent_PEG_P Parameter: Plant Line Value: 35A19
  misc_feature: MA Experiment 108540 PARAMETER Experiment Name: Zm_20percent_PEG_P Parameter: Timepoint (hr) Value: 6
  misc_feature: MA Experiment 108540 PARAMETER Experiment Name: Zm_20percent_PEG_P Parameter: Tissue Value: Aerial
  misc_feature: MA Experiment 108540 PARAMETER Experiment Name: Zm_20percent_PEG_P Parameter: Treatment Value: 20percent PEG vs. No Treatment
  misc_feature: MA Experiment ID: 108556 Result: Down-regulated in Transcription
  misc_feature: MA Experiment 108556 PARAMETER Experiment Name: Zm_Drought_P Parameter: Age (day) Value: 9
  misc_feature: MA Experiment 108556 PARAMETER Experiment Name: Zm_Drought_P Parameter: Organism Value: Zea mays
  misc_feature: MA Experiment 108556 PARAMETER Experiment Name: Zm_Drought_P Parameter: Plant Line Value: 35A19
  misc_feature: MA Experiment 108556 PARAMETER Experiment Name: Zm_Drought_P Parameter: Timepoint (hr) Value: 24
  misc_feature: MA Experiment 108556 PARAMETER Experiment Name: Zm_Drought_P Parameter: Tissue Value: Aerial
  misc_feature: MA Experiment 108556 PARAMETER Experiment Name: Zm_Drought_P Parameter: Treatment Value: Drought vs. No Drought
  misc_feature: MA Experiment ID: 108559 Result: Down-regulated in Transcription
  misc_feature: MA Experiment 108559 PARAMETER Experiment Name: Zm_5mM_NO_P Parameter: Age (day) Value: 8
  misc_feature: MA Experiment 108559 PARAMETER Experiment Name: Zm_5mM_NO_P Parameter: Organism Value: Zea mays
  misc_feature: MA Experiment 108559 PARAMETER Experiment Name: Zm_5mM_NO_P Parameter: Plant Line Value: 35A19
  misc_feature: MA Experiment 108559 PARAMETER Experiment Name: Zm_5mM_NO_P Parameter: Timepoint (hr) Value: 12
  misc_feature: MA Experiment 108559 PARAMETER Experiment Name: Zm_5mM_NO_P Parameter: Tissue Value: Aerial
  misc_feature: MA Experiment 108559 PARAMETER Experiment Name: Zm_5mM_NO_P Parameter: Treatment Value: 5mM NO vs. No Treatment
  misc_feature: MA Experiment ID: 108597 Result: Down-regulated in Transcription
  misc_feature: MA Experiment 108597 PARAMETER Experiment Name: Zm_100uM_ABA_P Parameter: Age (day) Value: 9
  misc_feature: MA Experiment 108597 PARAMETER Experiment Name: Zm_100uM_ABA_P Parameter: Organism Value: Zea mays
  misc_feature: MA Experiment 108597 PARAMETER Experiment Name: Zm_100uM_ABA_P Parameter: Plant Line Value: 35A19
  misc_feature: MA Experiment 108597 PARAMETER Experiment Name: Zm_100uM_ABA_P Parameter: Timepoint (hr) Value: 24
  misc_feature: MA Experiment 108597 PARAMETER Experiment Name: Zm_100uM_ABA_P Parameter: Tissue Value: Aerial
  misc_feature: MA Experiment 108597 PARAMETER Experiment Name: Zm_100uM_ABA_P Parameter: Treatment Value: 100uM ABA vs. No Treatment
  misc_feature: MA Experiment ID: 108689 Result: Down-regulated in Transcription
  misc_feature: MA Experiment 108689 PARAMETER Experiment Name: Zm_Drought_Roots_P Parameter: Age (day) Value: 9
  misc_feature: MA Experiment 108689 PARAMETER Experiment Name: Zm_Drought_Roots_P Parameter: Organism Value: Zea mays
  misc_feature: MA Experiment 108689 PARAMETER Experiment Name: Zm_Drought_Roots_P Parameter: Plant Line Value: 35A19
  misc_feature: MA Experiment 108689 PARAMETER Experiment Name: Zm_Drought_Roots_P Parameter: Timepoint (hr) Value: 24
  misc_feature: MA Experiment 108689 PARAMETER Experiment Name: Zm_Drought_Roots_P Parameter: Tissue Value: Roots
  misc_feature: MA Experiment 108689 PARAMETER Experiment Name: Zm_Drought_Roots_P Parameter: Treatment Value: Drought vs. No Drought
  misc_feature: MA Experiment ID: 20000477 Result: Down-regulated in Transcription
  misc_feature: MA Experiment 20000477 PARAMETER Experiment Name: Zm_5mM_SA_P Parameter: Age (day) Value: 10
  misc_feature: MA Experiment 20000477 PARAMETER Experiment Name: Zm_5mM_SA_P Parameter: Organism Value: Zea mays
  misc_feature: MA Experiment 20000477 PARAMETER Experiment Name: Zm_5mM_SA_P Parameter: Plant Line Value: 35A19
  misc_feature: MA Experiment 20000477 PARAMETER Experiment Name: Zm_5mM_SA_P Parameter: Timepoint (hr) Value: 48
  misc_feature: MA Experiment 20000477 PARAMETER Experiment Name: Zm_5mM_SA_P Parameter: Tissue Value: Aerial
  misc_feature: MA Experiment 20000477 PARAMETER Experiment Name: Zm_5mM_SA_P Parameter: Treatment Value: 5mM SA vs. No Treatment
  misc_feature: MA Experiment ID: 20000478 Result: Down-regulated in Transcription
  misc_feature: MA Experiment 20000478 PARAMETER Experiment Name: Zm_5mM_SA_P Parameter: Age (day) Value: 11
  misc_feature: MA Experiment 20000478 PARAMETER Experiment Name: Zm_5mM_SA_P Parameter: Organism Value: Zea mays
  misc_feature: MA Experiment 20000478 PARAMETER Experiment Name: Zm_5mM_SA_P Parameter: Plant Line Value: 35A19
  misc_feature: MA Experiment 20000478 PARAMETER Experiment Name: Zm_5mM_SA_P Parameter: Timepoint (hr) Value: 72
  misc_feature: MA Experiment 20000478 PARAMETER Experiment Name: Zm_5mM_SA_P Parameter: Tissue Value: Aerial
  misc_feature: MA Experiment 20000478 PARAMETER Experiment Name: Zm_5mM_SA_P Parameter: Treatment Value: 5mM SA vs. No Treatment
  misc_feature: MA Experiment ID: 20000479 Result: Down-regulated in Transcription
  misc_feature: MA Experiment 20000479 PARAMETER Experiment Name: Zm_Drought_P Parameter: Age (day) Value: 10
  misc_feature: MA Experiment 20000479 PARAMETER Experiment Name: Zm_Drought_P Parameter: Organism Value: Zea mays
  misc_feature: MA Experiment 20000479 PARAMETER Experiment Name: Zm_Drought_P Parameter: Plant Line Value: 35A19
  misc_feature: MA Experiment 20000479 PARAMETER Experiment Name: Zm_Drought_P Parameter: Timepoint (hr) Value: 48
  misc_feature: MA Experiment 20000479 PARAMETER Experiment Name: Zm_Drought_P Parameter: Tissue Value: Aerial
  misc_feature: MA Experiment 20000479 PARAMETER Experiment Name: Zm_Drought_P Parameter: Treatment Value: Drought vs. No Drought
  misc_feature: MA Experiment ID: 20000480 Result: Down-regulated in Transcription
  misc_feature: MA Experiment 20000480 PARAMETER Experiment Name: Zm_Drought_P Parameter: Age (day) Value: 11
  misc_feature: MA Experiment 20000480 PARAMETER Experiment Name: Zm_Drought_P Parameter: Organism Value: Zea mays
  misc_feature: MA Experiment 20000480 PARAMETER Experiment Name: Zm_Drought_P Parameter: Plant Line Value: 35A19
  misc_feature: MA Experiment 20000480 PARAMETER Experiment Name: Zm_Drought_P Parameter: Timepoint (hr) Value: 72
  misc_feature: MA Experiment 20000480 PARAMETER Experiment Name: Zm_Drought_P Parameter: Tissue Value: Aerial
  misc_feature: MA Experiment 20000480 PARAMETER Experiment Name: Zm_Drought_P Parameter: Treatment Value: Drought vs. No Drought
gcacgagaccattacctagaacatcctaatcgaaaaccccattgtttccatccgcaccggagggcggtcccgatacaagcaacggcaacgcctcccctctcctccacctccccacctatattgattctgattcatccacccagcaggcagcagctacagcaagatggtgcacccgatcgcggaggccgacgagcggagccccttcggccgcctgacgccggacgagttctacgcgcgccacggcgtgacccactccgnctcgtccttcgtcaacccgcgggggctccgcatcttcacccagcgctgggtgcccagtggggacgcccccgtcctgggcgccgtcgccgtcgtgcacggcttcaccggagagtctagctggacaatccagctcnccgccgtccacctcgccgccgcgggcttcgccgtcgccgcgctcgaccaccagggccacggcttctccgagggcctccagggccacctccccgacatcaaccccgtgctcgacgactgcgacgccgccttcgcgcccttccgcgccgactacccgccgccgctcccctgcttcctctacggggagtcgctcggcggcgccatcgcgctgctgctccacctgcggaacagggacctgtggcgggacggggccgtgctcaacggcgccatgtgcggggtcagcccgaggttcaagccgccgtggccgctcgagcacctgctcgccgcagccgccgccgtcgtccccacctggcgcgtcgccttcacgcggggcaacatccccgagcgctccttcaaggtggactggaagcgggcgctcgcgctcgcctccccgcgccgnaccacggcgccgcccagggcggncacggcgctcgagctcctccgcgtctgccgcgagctgcagcggcgattcgaggaggtgcagctgccgctcctcgtcgtgcacggcgccgaggacaccgtctgcgacccggcctgcgtcgaggagctctgcaggcgcgccgggagcaaggacaagacgcttcgcatctacccagggatgtggcaccagattgtcggcgagcccgaggagaacgtggagaaggtgttcgacgatatcatagactggctcaaggcacgcgccaccgctacagccgcgggcgcgcaccacggcgagcagtagtttgggcacgcctcctgcgtgcgtgcgtgccatggccaggcttgccttcaaccgcgcgtggtccattcaccatcccagattctatcctaggttccttccagctatattcgagtacggatccagcaataaacttgtgctgtctgctgatt

SEQ ID NO: 13324 - protein, 328 aa, Zea mays subsp. mays
  peptide (1)..(328): Ceres Seq. ID no. 12407379
  misc_feature (86)..(304): Pfam Name: alpha/beta hydrolase fold Pfam Description: alpha/beta hydrolase fold
  misc_feature (1)..(328): Homolog of NCBI NO: 34894634 NR Description: P0028G04.16 [Oryza sativa (japonica
  misc_feature (2)..(326): Homolog of NCBI NO: 15239709 NR Description: phospholipase - like protein; protein id: supported by cDNA: 253499., supported by cDNA: gi_17380667 thaliana] >gi|17380668|gb|AAL36164.1| putative phospholipase
  misc_feature (2)..(316): Homolog of NCBI NO: 15242179 NR Description: lysophospholipase -like protein; protein id:
  misc_feature (18)..(323): Homolog of NCBI NO: 34899776 NR Description: putative lysophospholipase isolog [Oryza sativa
  misc_feature (14)..(315): Homolog of NCBI NO: 15220284 NR Description: lysophospholipase isolog; protein id: At1g11090.1
  misc_feature (34)..(322): Homolog of NCBI NO: 7487948 NR Description: lysophospholipase homolog F12L6.8 - Arabidopsis >gi|3355471|gb|AAC27833.1| putative phospholipase [Arabidopsis >gi|13877687|gb|AAK43921.1|AF370602_1 putative phospholipase
  misc_feature (34)..(322): Homolog of NCBI NO: 30687883 NR Description: esterase/lipase/thioesterase family [Arabidopsis >gi|19423964|gb|AAL87258.1| putative phospholipase [Arabidopsis >gi|21689759|gb|AAM67523.1| putative phospholipase [Arabidopsis
  misc_feature (34)..(316): Homolog of NCBI NO: 7487947 NR Description: lysophospholipase homolog F12L6.7 - Arabidopsis
  misc_feature (37)..(316): Homolog of NCBI NO: 34894592 NR Description: phospholipase-like protein [Oryza sativa
  misc_feature (37)..(315): Homolog of NCBI NO: 15223941 NR Description: lysophospholipase isolog, putative; protein id: supported by cDNA: 105948. [Arabidopsis thaliana]
  misc_feature (32)..(32): Xaa is any aa, unknown or other
  misc_feature (77)..(77): Xaa is any aa, unknown or other
  misc_feature (222)..(222): Xaa is any aa, unknown or other
  misc_feature (230)..(230): Xaa is any aa, unknown or other
MVHPIAEADERSPFGRLTPDEFYARHGVTHSXSSFVNPRGLRIFTQRWVPSGDAPVLGAVAVVHGFTGESSWTIQLXAVHLAAAGFAVAALDHQGHGFSEGLQGHLPDINPVLDDCDAAFAPFRADYPPPLPCFLYGESLGGAIALLLHLRNRDLWRDGAVLNGAMCGVSPRFKPPWPLEHLLAAAAAVVPTWRVAFTRGNIPERSFKVDWKRALALASPRXTTAPPRAXTALELLRVCRELQRRFEEVQLPLLVVHGAEDTVCDPACVEELCRRAGSKDKTLRIYPGMWHQIVGEPEENVEKVFDDIIDWLKARATATAAGAHHGEQ

SEQ ID NO: 13325 - DNA, 1614 bp, Zea mays subsp. mays
  misc_feature (1)..(1614): Ceres Seq. ID no. 12368767
  misc_feature: MA Experiment ID: 108535 Result: Down-regulated in Transcription
  misc_feature: MA Experiment 108535 PARAMETER Experiment Name: Zm_Meristem_P Parameter: Age (day) Value: 8
  misc_feature: MA Experiment 108535 PARAMETER Experiment Name: Zm_Meristem_P Parameter: Organism Value: Zea mays
  misc_feature: MA Experiment 108535 PARAMETER Experiment Name: Zm_Meristem_P Parameter: Plant Line Value: 35A19
  misc_feature: MA Experiment 108535 PARAMETER Experiment Name: Zm_Meristem_P Parameter: Tissue Value: Root Meristem vs. Above Root Meristem
  misc_feature: MA Experiment ID: 108543 Result: Up-regulated in Transcription
  misc_feature: MA Experiment ID: 108556 Result: Up-regulated in Transcription
  misc_feature: MA Experiment 108556 PARAMETER Experiment Name: Zm_Drought_P Parameter: Age (day) Value: 9
  misc_feature: MA Experiment 108556 PARAMETER Experiment Name: Zm_Drought_P Parameter: Organism Value: Zea mays
  misc_feature: MA Experiment 108556 PARAMETER Experiment Name: Zm_Drought_P Parameter: Plant Line Value: 35A19
  misc_feature: MA Experiment 108556 PARAMETER Experiment Name: Zm_Drought_P Parameter: Timepoint (hr) Value: 24
  misc_feature: MA Experiment 108556 PARAMETER Experiment Name: Zm_Drought_P Parameter: Tissue Value: Aerial
  misc_feature: MA Experiment 108556 PARAMETER Experiment Name: Zm_Drought_P Parameter: Treatment Value: Drought vs. No Drought
  misc_feature: MA Experiment ID: 108689 Result: Up-regulated in Transcription
  misc_feature: MA Experiment 108689 PARAMETER Experiment Name: Zm_Drought_Roots_P Parameter: Age (day) Value: 9
  misc_feature: MA Experiment 108689 PARAMETER Experiment Name: Zm_Drought_Roots_P Parameter: Organism Value: Zea mays
  misc_feature: MA Experiment 108689 PARAMETER Experiment Name: Zm_Drought_Roots_P Parameter: Plant Line Value: 35A19
  misc_feature: MA Experiment 108689 PARAMETER Experiment Name: Zm_Drought_Roots_P Parameter: Timepoint (hr) Value: 24
  misc_feature: MA Experiment 108689 PARAMETER Experiment Name: Zm_Drought_Roots_P Parameter: Tissue Value: Roots
  misc_feature: MA Experiment 108689 PARAMETER Experiment Name: Zm_Drought_Roots_P Parameter: Treatment Value: Drought vs. No Drought
  misc_feature: MA Experiment ID: 20000479 Result: Up-regulated in Transcription
  misc_feature: MA Experiment 20000479 PARAMETER Experiment Name: Zm_Drought_P Parameter: Age (day) Value: 10
  misc_feature: MA Experiment 20000479 PARAMETER Experiment Name: Zm_Drought_P Parameter: Organism Value: Zea mays
  misc_feature: MA Experiment 20000479 PARAMETER Experiment Name: Zm_Drought_P Parameter: Plant Line Value: 35A19
  misc_feature: MA Experiment 20000479 PARAMETER Experiment Name: Zm_Drought_P Parameter: Timepoint (hr) Value: 48
  misc_feature: MA Experiment 20000479 PARAMETER Experiment Name: Zm_Drought_P Parameter: Tissue Value: Aerial
  misc_feature: MA Experiment 20000479 PARAMETER Experiment Name: Zm_Drought_P Parameter: Treatment Value: Drought vs. No Drought
acggatggttcccaggctcccagcacagaatccacctccgccgtcaccaccgagcaacgcgcgccggcgcccttctatttcttccagcccctgctccgccgccgccgctctcctccccgcacccccgccctgtttcgccatcggcccatcgcggcacctgcccgtgccacctgaggctgggaactccaaagaggaacagcgtccatggaggctggaggcgcaggaagtggtttgaatggggcggtgcaggcaaaggggactggggctgatggtggctctgccaaaccgctgccgccttgctgcgtcaaggccagagccgccgcgccggagtccgaggccaggtgccacgccaccgtcgtttcaggatggttcactgaaccgcgatcgcgctgtggcaaagccagcaaagttcagtattacaataacccgatgtggccaggagaggccaattctttgaaagtggagaagatcttgtaccaggggaaatcgccataccaagaagtcttagtcttcgagtcgtcgacctatggtaaagtccttgtgcttgatggtattgttcagttgactgacaaggatgaatgtgcataccaggaaatgattactcacctgccactttgctcaattccatcccctaaaaaagttttggttattggtggtggtgatggaggtgtacttcgagaggtatccaggcatagttcagtggagtccattgacatatgtgagattgatcagctggttattgatgtgtgcaaagatttcttcccacacttgtctgttggatttcaagatcctcgtgttcaacttcatgtcggcgatgctgtggagttcttgagaaatgctcctgaggggacatatgatgctatcattgttgattcgtcagatccaatagggcctgctcaggaacttgtagagaagcctttttttgatacgattgctagagctttgaggcctggaggcgttctttgtaatcaagctgagagtatgtggttacatacacatttggttcaggatatgctttcaatttgccgtgaaactttcaagggttctgtacgctatgcatggacaagtgtcccaacatacccgagtggggtgattggatttttactatgtgccaaagaaggtccattggtgaactttctgactcctataaatccaattgaaaagctggaaggagctacaaaagctggaagggagatcagattttataactcagagatgcatagggcagcatttgttctcccgacctttgcaaggagagagctagaagcatattgcgtttccactgaaacagagcaagcggaggaaacaccggcggcaccactgaagttgactcttgcatccaggagtgaaattttcgctacatcctagctagaccaggactcgcgatgtaccacaagatatcaagaaaccattccttccttcctggtgccgtacctccagtatcgccattggttcatagtcttactatcacatgctatgagacgcataatgaggcatcatgtcagtaattcagtatccaaacaatgagatgagattggcatgctaagaaaggacgagctgatattacaatgtactcccttcaccatgtcagtaatttattgtccaaacaattag

SEQ ID NO: 13326 - protein, 387 aa, Zea mays subsp. mays
  peptide (1)..(387): Ceres Seq. ID no. 12368768
  misc_feature (54)..(311): Pfam Name: Spermine/spermidine synthase Pfam Description: Spermine/spermidine synthase
  misc_feature (1)..(383): Homolog of NCBI NO: 33354149 NR Description: aminopropyl transferase [Oryza sativa (japonica
  misc_feature (1)..(359): Homolog of NCBI NO: 18423473 NR Description: spermidine synthase; protein id: At5g53120.1, by cDNA: 33021., supported by cDNA: gi_14532777, supported by gi_15983393, supported by cDNA: gi_19310734 [Arabidopsis
  misc_feature (1)..(359): Homolog of NCBI NO: 15983394 NR Description: AT5g53120/MFH8_5 [Arabidopsis thaliana]
  misc_feature (18)..(359): Homolog of NCBI NO: 21592832 NR Description: spermidine synthase [Arabidopsis thaliana]
  misc_feature (17)..(353): Homolog of NCBI NO: 33150481 NR Description: putative spermine synthase [Lycopersicon
  misc_feature (1)..(359): Homolog of NCBI NO: 9757993 NR Description: spermidine synthase [Arabidopsis thaliana]
  misc_feature (74)..(355): Homolog of NCBI NO: 6094330 NR Description: Spermidine synthase 2 (Putrescine
  misc_feature (38)..(351): Homolog of NCBI NO: 12229998 NR Description: Spermidine synthase 1 (Putrescine
  misc_feature (74)..(355): Homolog of NCBI NO: 6094327 NR Description: Spermidine synthase 1 (Putrescine
  misc_feature (74)..(355): Homolog of NCBI NO: 6094335 NR Description: Spermidine synthase (Putrescine (SPDSY) >gi|3242659|dbj|BAA29033.1| spermidine synthase [Coffea
MEAGGAGSGLNGAVQAKGTGADGGSAKPLPPCCVKARAAAPESEARCHATVVSGWFTEPRSRCGKASKVQYYNNPMWPGEANSLKVEKILYQGKSPYQEVLVFESSTYGKVLVLDGIVQLTDKDECAYQEMITHLPLCSIPSPKKVLVIGGGDGGVLREVSRHSSVESIDICEIDQLVIDVCKDFFPHLSVGFQDPRVQLHVGDAVEFLRNAPEGTYDAIIVDSSDPIGPAQELVEKPFFDTIARALRPGGVLCNQAESMWLHTHLVQDMLSICRETFKGSVRYAWTSVPTYPSGVIGFLLCAKEGPLVNFLTPINPIEKLEGATKAGREIRFYNSEMHRAAFVLPTFARRELEAYCVSTETEQAEETPAAPLKLTLASRSEIFATS

SEQ ID NO: 13327 - protein, 312 aa, Zea mays subsp. mays
  peptide (1)..(312): Ceres Seq. ID no. 12368769
  misc_feature (1)..(236): Pfam Name: Spermine/spermidine synthase Pfam Description: Spermine/spermidine synthase
  misc_feature (1)..(308): Homolog of NCBI NO: 33354149 NR Description: aminopropyl transferase [Oryza sativa (japonica
  misc_feature (1)..(284): Homolog of NCBI NO: 18423473 NR Description: spermidine synthase; protein id: At5g53120.1, by cDNA: 33021., supported by cDNA: gi_14532777, supported by gi_15983393, supported by cDNA: gi_19310734 [Arabidopsis
  misc_feature (1)..(284): Homolog of NCBI NO: 15983394 NR Description: AT5g53120/MFH8_5 [Arabidopsis thaliana]
  misc_feature (1)..(284): Homolog of NCBI NO: 21592832 NR Description: spermidine synthase [Arabidopsis thaliana]
  misc_feature (1)..(278): Homolog of NCBI NO: 33150481 NR Description: putative spermine synthase [Lycopersicon
  misc_feature (1)..(284): Homolog of NCBI NO: 9757993 NR Description: spermidine synthase [Arabidopsis thaliana]
  misc_feature (1)..(280): Homolog of NCBI NO: 6094330 NR Description: Spermidine synthase 2 (Putrescine
  misc_feature (1)..(276): Homolog of NCBI NO: 12229998 NR Description: Spermidine synthase 1 (Putrescine
  misc_feature (1)..(280): Homolog of NCBI NO: 6094327 NR Description: Spermidine synthase 1 (Putrescine
  misc_feature (1)..(280): Homolog of NCBI NO: 6094335 NR Description: Spermidine synthase (Putrescine (SPDSY) >gi|3242659|dbj|BAA29033.1| spermidine synthase [Coffea
MWPGEANSLKVEKILYQGKSPYQEVLVFESSTYGKVLVLDGIVQLTDKDECAYQEMITHLPLCSIPSPKKVLVIGGGDGGVLREVSRHSSVESIDICEIDQLVIDVCKDFFPHLSVGFQDPRVQLHVGDAVEFLRNAPEGTYDAIIVDSSDPIGPAQELVEKPFFDTIARALRPGGVLCNQAESMWLHTHLVQDMLSICRETFKGSVRYAWTSVPTYPSGVIGFLLCAKEGPLVNFLTPINPIEKLEGATKAGREIRFYNSEMHRAAFVLPTFARRELEAYCVSTETEQAEETPAAPLKLTLASRSEIFATS

SEQ ID NO: 13328 - protein, 257 aa, Zea mays subsp. mays
  peptide (1)..(257): Ceres Seq. ID no. 12368770
  misc_feature (1)..(181): Pfam Name: Spermine/spermidine synthase Pfam Description: Spermine/spermidine synthase
  misc_feature (1)..(253): Homolog of NCBI NO: 33354149 NR Description: aminopropyl transferase [Oryza sativa (japonica
  misc_feature (1)..(229): Homolog of NCBI NO: 18423473 NR Description: spermidine synthase; protein id: At5g53120.1, by cDNA: 33021., supported by cDNA: gi_14532777, supported by gi_15983393, supported by cDNA: gi_19310734 [Arabidopsis
  misc_feature (1)..(229): Homolog of NCBI NO: 15983394 NR Description: AT5g53120/MFH8_5 [Arabidopsis thaliana]
  misc_feature (1)..(229): Homolog of NCBI NO: 21592832 NR Description: spermidine synthase [Arabidopsis thaliana]
  misc_feature (1)..(223): Homolog of NCBI NO: 33150481 NR Description: putative spermine synthase [Lycopersicon
  misc_feature (1)..(229): Homolog of NCBI NO: 9757993 NR Description: spermidine synthase [Arabidopsis thaliana]
  misc_feature (1)..(225): Homolog of NCBI NO: 6094330 NR Description: Spermidine synthase 2 (Putrescine
  misc_feature (1)..(221): Homolog of NCBI NO: 12229998 NR Description: Spermidine synthase 1 (Putrescine
  misc_feature (1)..(225): Homolog of NCBI NO: 6094327 NR Description: Spermidine synthase 1 (Putrescine
  misc_feature (1)..(225): Homolog of NCBI NO: 6094335 NR Description: Spermidine synthase (Putrescine (SPDSY) >gi|3242659|dbj|BAA29033.1| spermidine synthase [Coffea
MITHLPLCSIPSPKKVLVIGGGDGGVLREVSRHSSVESIDICEIDQLVIDVCKDFFPHLSVGFQDPRVQLHVGDAVEFLRNAPEGTYDAIIVDSSDPIGPAQELVEKPFFDTIARALRPGGVLCNQAESMWLHTHLVQDMLSICRETFKGSVRYAWTSVPTYPSGVIGFLLCAKEGPLVNFLTPINPIEKLEGATKAGREIRFYNSEMHRAAFVLPTFARRELEAYCVSTETEQAEETPAAPLKLTLASRSEIFATS

SEQ ID NO: 13329 - DNA, 1364 bp, Zea mays subsp. mays
  misc_feature (1)..(1364): Ceres Seq. ID no. 12351866
  misc_feature: MA Experiment ID: 20000492 Result: Down-regulated in Transcription
  misc_feature: MA Experiment 20000492 PARAMETER Experiment Name: Zm_Hybrid_Seed_Dev_P Parameter: DAP Value: 12
  misc_feature: MA Experiment 20000492 PARAMETER Experiment Name: Zm_Hybrid_Seed_Dev_P Parameter: Organism Value: Zea mays
  misc_feature: MA Experiment 20000492 PARAMETER Experiment Name: Zm_Hybrid_Seed_Dev_P Parameter: Plant Line Value: 35A19
  misc_feature: MA Experiment 20000492 PARAMETER Experiment Name: Zm_Hybrid_Seed_Dev_P Parameter: Tissue Value: Fert Kernel vs. Unfert Floret
  misc_feature: MA Experiment ID: 20000535 Result: Down-regulated in Transcription
  misc_feature: MA Experiment 20000535 PARAMETER Experiment Name: Zm_Hybrid_Seed_Dev_P Parameter: DAP Value: 30 vs. 12
  misc_feature: MA Experiment 20000535 PARAMETER Experiment Name: Zm_Hybrid_Seed_Dev_P Parameter: Organism Value: Zea mays
  misc_feature: MA Experiment 20000535 PARAMETER Experiment Name: Zm_Hybrid_Seed_Dev_P Parameter: Plant Line Value: 35A19
  misc_feature: MA Experiment 20000535 PARAMETER Experiment Name: Zm_Hybrid_Seed_Dev_P Parameter: Tissue Value: Embryo vs. Unfert Floret
gtgtctctcgcgtcgcgcccggccgtcgcctcccctccctccctgcaccgaccgatccctcccctgatcccctcttcacatcctaccacctctttaaagctacccagctacctgcctgcctcgcctcaacctcgccggcggccgcagccgcatagaccggaagagaaaggaagcagagatcggaggcaggcgaagatggggcgcggcaaggtgcagctgaagcggatagagaacaagataaaccggcaggtgaccttctccaagcgccggaacgggctgctgaagaaggcgcacgagatctccgtcctctgcgacgccgaggtcgccgtcatcgtcttctcccccaagggcaagctctacgagtacgcctccgactcccgcatggacaaaattctagaacgttatgagcgatattcctatgctgaaaaggctcttatttcagctgaatctgaaagtgagggaaattggtgccacgaatacaggaaactgaaggccaaaattgagaccatacaaagatgccacaagcacctgatgggagaggatctagagtctttgaatccaaaagagctccaacaactagagcagcagctggagagctcactgaagcacatcagatcaagaaagagccaccttatggccgagtcaatttctgagctacagaagaaggagaggtcactgcaggaggagaacaagattctacagaaggaactttcagagaggcagaaggcggtcgctagccggcagcagcagcagcagcaggtgcagtgggaccagcagacacaggtccaggtccagacaagctcatcgtcttcttccttcatgatgaggcaggatcagcagggactgccacctccacaaaacatctgcttcccgccgttgagcatcggagagagaggcgaagaggtggctgcggcggcgcagcagcagctgcctcctccggggcaggcgcaaccacagctccgcatcgcaggtctgccgccatggatgctgagccacctcaatgcataaggagggcgagcaaatggcgtgcgaagtgattgattgctcaccgttgattgaacgctagcctaagttcatggcggcagcaaactaagctaaaactattgttatgtttgcaaggaagggtagggtaacccgctgtgtaatctttgtccagctagcatgtaccaactgagatgcatgcatgcttattattgtccaattacccgtgaatctagcggtgcttttggtgagaggccggccggacgggtgcagtttacttcaaatatggtttgtgattttgtgtaaatagtattaactaggagtcctatggtaagtaaattaattaatgggaggatgcatgaataaaacctctcttgtgctgc

SEQ ID NO: 13330 - protein, 335 aa, Zea mays subsp. mays
  peptide (1)..(335): Ceres Seq. ID no. 12351867
  misc_feature (140)..(239): Pfam Name: K-box region Pfam Description: K-box region
  misc_feature (66)..(335): Homolog of NCBI NO: 12002141 NR Description: MADS box protein 3 [Zea mays]
  misc_feature (66)..(335): Homolog of NCBI NO: 7446509 NR Description: MADS box protein - maize
  misc_feature (66)..(335): Homolog of NCBI NO: 5295984 NR Description: MADS box-like protein [Oryza sativa (japonica
  misc_feature (66)..(335): Homolog of NCBI NO: 6606072 NR Description: MADS15 protein [Oryza sativa]
  misc_feature (66)..(335): Homolog of NCBI NO: 28630955 NR Description: MADS2 [Lolium perenne]
  misc_feature (66)..(335): Homolog of NCBI NO: 33146447 NR Description: MADS box-like protein [Oryza sativa (japonica
  misc_feature (70)..(254): Homolog of NCBI NO: 7489647 NR Description: MADS box protein - sorghum (fragment)
  misc_feature (66)..(335): Homolog of NCBI NO: 4204234 NR Description: MADS-box protein 2 [Lolium temulentum]
  misc_feature (66)..(335): Homolog of NCBI NO: 9367313 NR Description: MADS-box protein 8 [Hordeum vulgare subsp.
  misc_feature (66)..(335): Homolog of NCBI NO: 15824795 NR Description: MADS-box protein FDRMADS3 [Oryza sativa]
VSLASRPAVASPPSLHRPIPPLIPSSHPTTSLKLPSYLPASPQPRRRPQPHRPEEKGSRDRRQAKMGRGKVQLKRIENKINRQVTFSKRRNGLLKKAHEISVLCDAEVAVIVFSPKGKLYEYASDSRMDKILERYERYSYAEKALISAESESEGNWCHEYRKLKAKIETIQRCHKHLMGEDLESLNPKELQQLEQQLESSLKHIRSRKSHLMAESISELQKKERSLQEENKILQKELSERQKAVASRQQQQQQVQWDQQTQVQVQTSSSSSSFMMRQDQQGLPPPQNICFPPLSIGERGEEVAAAAQQQLPPPGQAQPQLRIAGLPPWMLSHLNA

SEQ ID NO: 13331 - protein, 270 aa, Zea mays subsp. mays
  peptide (1)..(270): Ceres Seq. ID no. 12351868
  misc_feature (75)..(174): Pfam Name: K-box region Pfam Description: K-box region
  misc_feature (1)..(270): Homolog of NCBI NO: 12002141 NR Description: MADS box protein 3 [Zea mays]
  misc_feature (1)..(270): Homolog of NCBI NO: 7446509 NR Description: MADS box protein - maize
  misc_feature (1)..(270): Homolog of NCBI NO: 5295984 NR Description: MADS box-like protein [Oryza sativa (japonica
  misc_feature (1)..(270): Homolog of NCBI NO: 6606072 NR Description: MADS15 protein [Oryza sativa]
  misc_feature (1)..(270): Homolog of NCBI NO: 28630955 NR Description: MADS2 [Lolium perenne]
  misc_feature (1)..(270): Homolog of NCBI NO: 33146447 NR Description: MADS box-like protein [Oryza sativa (japonica
  misc_feature (5)..(189): Homolog of NCBI NO: 7489647 NR Description: MADS box protein - sorghum (fragment)
  misc_feature (1)..(270): Homolog of NCBI NO: 4204234 NR Description: MADS-box protein 2 [Lolium temulentum]
  misc_feature (1)..(270): Homolog of NCBI NO: 9367313 NR Description: MADS-box protein 8 [Hordeum vulgare subsp.
  misc_feature (1)..(270): Homolog of NCBI NO: 15824795 NR Description: MADS-box protein FDRMADS3 [Oryza sativa]
MGRGKVQLKRIENKINRQVTFSKRRNGLLKKAHEISVLCDAEVAVIVFSPKGKLYEYASDSRMDKILERYERYSYAEKALISAESESEGNWCHEYRKLKAKIETIQRCHKHLMGEDLESLNPKELQQLEQQLESSLKHIRSRKSHLMAESISELQKKERSLQEENKILQKELSERQKAVASRQQQQQQVQWDQQTQVQVQTSSSSSSFMMRQDQQGLPPPQNICFPPLSIGERGEEVAAAAQQQLPPPGQAQPQLRIAGLPPWMLSHLNA

SEQ ID NO: 13332 - protein, 208 aa, Zea mays subsp. mays
  peptide (1)..(208): Ceres Seq. ID no. 12351869
  misc_feature (13)..(112): Pfam Name: K-box region Pfam Description: K-box region
  misc_feature (1)..(208): Homolog of NCBI NO: 12002141 NR Description: MADS box protein 3 [Zea mays]
  misc_feature (1)..(208): Homolog of NCBI NO: 7446509 NR Description: MADS box protein - maize
  misc_feature (1)..(208): Homolog of NCBI NO: 5295984 NR Description: MADS box-like protein [Oryza sativa (japonica
  misc_feature (1)..(208): Homolog of NCBI NO: 6606072 NR Description: MADS15 protein [Oryza sativa]
  misc_feature (1)..(208): Homolog of NCBI NO: 28630955 NR Description: MADS2 [Lolium perenne]
  misc_feature (1)..(208): Homolog of NCBI NO: 33146447 NR Description: MADS box-like protein [Oryza sativa (japonica
  misc_feature (1)..(127): Homolog of NCBI NO: 7489647 NR Description: MADS box protein - sorghum (fragment)
  misc_feature (1)..(208): Homolog of NCBI NO: 4204234 NR Description: MADS-box protein 2 [Lolium temulentum]
  misc_feature (1)..(208): Homolog of NCBI NO: 9367313 NR Description: MADS-box protein 8 [Hordeum vulgare subsp.
  misc_feature (1)..(208): Homolog of NCBI NO: 15824795 NR Description: MADS-box protein FDRMADS3 [Oryza sativa]
MDKILERYERYSYAEKALISAESESEGNWCHEYRKLKAKIETIQRCHKHLMGEDLESLNPKELQQLEQQLESSLKHIRSRKSHLMAESISELQKKERSLQEENKILQKELSERQKAVASRQQQQQQVQWDQQTQVQVQTSSSSSSFMMRQDQQGLPPPQNICFPPLSIGERGEEVAAAAQQQLPPPGQAQPQLRIAGLPPWMLSHLNA

SEQ ID NO: 13333 - DNA, 1697 bp, Zea mays subsp. mays
  misc_feature (1)..(1697): Ceres Seq. ID no. 12341336
  misc_feature: MA Experiment ID: 108535 Result: Up-regulated in Transcription
  misc_feature: MA Experiment 108535 PARAMETER Experiment Name: Zm_Meristem_P Parameter: Age (day) Value: 8
  misc_feature: MA Experiment 108535 PARAMETER Experiment Name: Zm_Meristem_P Parameter: Organism Value: Zea mays
  misc_feature: MA Experiment 108535 PARAMETER Experiment Name: Zm_Meristem_P Parameter: Plant Line Value: 35A19
  misc_feature: MA Experiment 108535 PARAMETER Experiment Name: Zm_Meristem_P Parameter: Tissue Value: Root Meristem vs. Above Root Meristem
acaaaccgagcggcggccgccgcctcccttttcgtctctgactttttctacaagctcattcttcctcccccgatctcgggagcagccgaagcatgtcctggcggtggactctcgcgcgccgcgtcgccacgctggccgcgatcggtggcggcggtgcccaggcgcagaggctcctgtccacctcgtcagccggcggtggcactggcctcctgggtcggcactacatacccctcgcctcccagattcggagcaaggtagttggttgcagaggagctgctcttgtgagctccagatggttgcatgaggcccaataccaggttcgccaggacggggcttccagggctcaggaacagcaagatccatttgaattagtcgccgatgagctatcacttcttgcaaataggttacgatccatggtggctgctgaggtccccaaactggcatcagcagctgagtactttttcaaggtgggagcagagggaaaaagattccgacctacggttttgttgctcatggcatcagctctgaaatttcctttgtcagagtcaacagaaggaagagttctcagtatattggcagataaactccgcacaaggcaacagaacattgctgagataactgaaatgattcatgtcgcaagccttctgcatgatgatgttcttgatgatgctgatactaggcgtggtgtcagttcattgaatctcatcatggggaacaagctttctgtgctggctggtgatttccttctgtctagagcatgtgtggcccttgcagcacttgggaacacagaggtggtttctctaatggcaactgctgtagaacatctagttactggtgaaactatgcagatctcaacaagcagagagcaacggcgaagcatggagtactacctgcagaagacatactacaaaacggcatcattgatatcaaatagttgcaaggctgttgctattcttgcagggcacacaactgaggtctcggtgcttgcatatgaatatggtcgaaacctgggtctagccttccagttaattgatgatgttcttgatttcaccggcacctctgcatcccttgggaagggttcattgtctgatattcgccacggaattattactgccccgatgctatatgcgatggaggaattcccacaactgcaagaagttgttgaccggggttttgataatcctgcaaatgttgaaattgcccttgactatctccagaagagccgtgggattgaaaagacaaaagagcttgcacgagaacatgctgatcgtgcagtcaaggctatagaatctctacctgatagcgacgacgaggatgttctgacttcaaggcgtgctcttattgatatcacagaaagagtcatcacacggacaaaataggaaggtgttcggcgtccataaggtgaatggagagctgaacctcgcctttggcctagtgtttcacttggattttcttttttgtatacttcggttcattgcattcttttcgcagccaaaaccccaagttttgtgtatcattgctgaaatttaggattaagaaatggccctgcatttctgggaagcttctagaggttttggctgcatgtggcaacaaaatatatgtcaccgattgcaatggcaccagatatcgtgtagccatataagtgtgggagcattgtacccaatatacactcccgtaaagactaagatagtactacc

SEQ ID NO: 13334 - protein, 428 aa, Zea mays subsp. mays
  peptide (1)..(428): Ceres Seq. ID no. 12341337
  misc_feature (115)..(388): Pfam Name: Polyprenyl synthetase Pfam Description: Polyprenyl synthetase
  misc_feature (54)..(428): Homolog of NCBI NO: 12055493 NR Description: geranyl diphosphat synthase [Quercus robur]
  misc_feature (54)..(428): Homolog of NCBI NO: 27261729 NR Description: geranylgeranyl diphosphate synthase [Citrus
  misc_feature (58)..(428): Homolog of NCBI NO: 20260214 NR Description: putative trans-prenyltransferase [Arabidopsis
  misc_feature (58)..(428): Homolog of NCBI NO: 11322965 NR Description: geranyl diphosphate synthase [Arabidopsis
  misc_feature (108)..(428): Homolog of NCBI NO: 11322972 NR Description: geranyl diphosphate synthase [Citrus sinensis]
  misc_feature (108)..(428): Homolog of NCBI NO: 30686146 NR Description: geranyl diphosphate synthase
  misc_feature (141)..(428): Homolog of NCBI NO: 25314274 NR Description: probable trans-prenyltransferase [imported] -
  misc_feature (158)..(428): Homolog of NCBI NO: 32421275 NR Description: hypothetical protein [Neurospora crassa]
  misc_feature (89)..(144): Homolog of NCBI NO: 32421275 NR Description: hypothetical protein [Neurospora crassa]
  misc_feature (135)..(428): Homolog of NCBI NO: 40744019 NR Description: hypothetical protein AN2767.2 [Aspergillus
MSWRWTLARRVATLAAIGGGGAQAQRLLSTSSAGGGTGLLGRHYIPLASQIRSKVVGCRGAALVSSRWLHEAQYQVRQDGASRAQEQQDPFELVADELSLLANRLRSMVAAEVPKLASAAEYFFKVGAEGKRFRPTVLLLMASALKFPLSESTEGRVLSILADKLRTRQQNIAEITEMIHVASLLHDDVLDDADTRRGVSSLNLIMGNKLSVLAGDFLLSRACVALAALGNTEVVSLMATAVEHLVTGETMQISTSREQRRSMEYYLQKTYYKTASLISNSCKAVAILAGHTTEVSVLAYEYGRNLGLAFQLIDDVLDFTGTSASLGKGSLSDIRHGIITAPMLYAMEEFPQLQEVVDRGFDNPANVEIALDYLQKSRGIEKTKELAREHADRAVKAIESLPDSDDEDVLTSRRALIDITERVITRTK

SEQ ID NO: 13335 - protein, 321 aa, Zea mays subsp. mays
  peptide (1)..(321): Ceres Seq. ID no. 12341338
  misc_feature (8)..(281): Pfam Name: Polyprenyl synthetase Pfam Description: Polyprenyl synthetase
  misc_feature (1)..(321): Homolog of NCBI NO: 12055493 NR Description: geranyl diphosphat synthase [Quercus robur]
  misc_feature (1)..(321): Homolog of NCBI NO: 27261729 NR Description: geranylgeranyl diphosphate synthase [Citrus
  misc_feature (1)..(321): Homolog of NCBI NO: 20260214 NR Description: putative trans-prenyltransferase [Arabidopsis
  misc_feature (1)..(321): Homolog of NCBI NO: 11322965 NR Description: geranyl diphosphate synthase [Arabidopsis
  misc_feature (1)..(321): Homolog of NCBI NO: 11322972 NR Description: geranyl diphosphate synthase [Citrus sinensis]
  misc_feature (1)..(321): Homolog of NCBI NO: 30686146 NR Description: geranyl diphosphate synthase
  misc_feature (34)..(321): Homolog of NCBI NO: 25314274 NR Description: probable trans-prenyltransferase [imported] -
  misc_feature (51)..(321): Homolog of NCBI NO: 32421275 NR Description: hypothetical protein [Neurospora crassa]
  misc_feature (1)..(37): Homolog of NCBI NO: 32421275 NR Description: hypothetical protein [Neurospora crassa]
  misc_feature (28)..(321): Homolog of NCBI NO: 40744019 NR Description: hypothetical protein AN2767.2 [Aspergillus
MVAAEVPKLASAAEYFFKVGAEGKRFRPTVLLLMASALKFPLSESTEGRVLSILADKLRTRQQNIAEITEMIHVASLLHDDVLDDADTRRGVSSLNLIMGNKLSVLAGDFLLSRACVALAALGNTEVVSLMATAVEHLVTGETMQISTSREQRRSMEYYLQKTYYKTASLISNSCKAVAILAGHTTEVSVLAYEYGRNLGLAFQLIDDVLDFTGTSASLGKGSLSDIRHGIITAPMLYAMEEFPQLQEVVDRGFDNPANVEIALDYLQKSRGIEKTKELAREHADRAVKAIESLPDSDDEDVLTSRRALIDITERVITRTK

SEQ ID NO: 13336 - protein, 288 aa, Zea mays subsp. mays
  peptide (1)..(288): Ceres Seq. ID no. 12341339
  misc_feature (1)..(248): Pfam Name: Polyprenyl synthetase Pfam Description: Polyprenyl synthetase
  misc_feature (1)..(288): Homolog of NCBI NO: 12055493 NR Description: geranyl diphosphat synthase [Quercus robur]
  misc_feature (1)..(288): Homolog of NCBI NO: 27261729 NR Description: geranylgeranyl diphosphate synthase [Citrus
  misc_feature (1)..(288): Homolog of NCBI NO: 20260214 NR Description: putative trans-prenyltransferase [Arabidopsis
  misc_feature (1)..(288): Homolog of NCBI NO: 11322965 NR Description: geranyl diphosphate synthase [Arabidopsis
  misc_feature (1)..(288): Homolog of NCBI NO: 11322972 NR Description: geranyl diphosphate synthase [Citrus sinensis]
  misc_feature (1)..(288): Homolog of NCBI NO: 30686146 NR Description: geranyl diphosphate synthase
  misc_feature (1)..(288): Homolog of NCBI NO: 25314274 NR Description: probable trans-prenyltransferase [imported] -
  misc_feature (18)..(288): Homolog of NCBI NO: 32421275 NR Description: hypothetical protein [Neurospora crassa]
  misc_feature (1)..(288): Homolog of NCBI NO: 40744019 NR Description: hypothetical protein AN2767.2 [Aspergillus
  misc_feature (1)..(19): Homolog of NCBI NO: 40744019 NR Description: hypothetical protein AN2767.2 [Aspergillus
MASALKFPLSESTEGRVLSILADKLRTRQQNIAEITEMIHVASLLHDDVLDDADTRRGVSSLNLIMGNKLSVLAGDFLLSRACVALAALGNTEVVSLMATAVEHLVTGETMQISTSREQRRSMEYYLQKTYYKTASLISNSCKAVAILAGHTTEVSVLAYEYGRNLGLAFQLIDDVLDFTGTSASLGKGSLSDIRHGIITAPMLYAMEEFPQLQEVVDRGFDNPANVEIALDYLQKSRGIEKTKELAREHADRAVKAIESLPDSDDEDVLTSRRALIDITERVITRTK

SEQ ID NO: 13337 - DNA, 1511 bp, Zea mays subsp. mays
  misc_feature (1)..(1511): Ceres Seq. ID no. 12365082
  misc_feature: MA Experiment ID: 108522 Result: Down-regulated in Transcription
  misc_feature: MA Experiment 108522 PARAMETER Experiment Name: Zm_42deg_Heat_P Parameter: Age (day) Value: 8
  misc_feature: MA Experiment 108522 PARAMETER Experiment Name: Zm_42deg_Heat_P Parameter: Organism Value: Zea mays
  misc_feature: MA Experiment 108522 PARAMETER Experiment Name: Zm_42deg_Heat_P Parameter: Plant Line Value: 35A19
  misc_feature: MA Experiment 108522 PARAMETER Experiment Name: Zm_42deg_Heat_P Parameter: Temperature (deg C) Value: 42 vs. 22
  misc_feature: MA Experiment 108522 PARAMETER Experiment Name: Zm_42deg_Heat_P Parameter: Timepoint (hr) Value: 1
  misc_feature: MA Experiment 108522 PARAMETER Experiment Name: Zm_42deg_Heat_P Parameter: Tissue Value: Aerial
  misc_feature: MA Experiment ID: 108523 Result: Down-regulated in Transcription
  misc_feature: MA Experiment 108523 PARAMETER Experiment Name: Zm_42deg_Heat_P Parameter: Age (day) Value: 8
  misc_feature: MA Experiment 108523 PARAMETER Experiment Name: Zm_42deg_Heat_P Parameter: Organism Value: Zea mays
  misc_feature: MA Experiment 108523 PARAMETER Experiment Name: Zm_42deg_Heat_P Parameter: Plant Line Value: 35A19
  misc_feature: MA Experiment 108523 PARAMETER Experiment Name: Zm_42deg_Heat_P Parameter: Temperature (deg C) Value: 42 vs. 22
  misc_feature: MA Experiment 108523 PARAMETER Experiment Name: Zm_42deg_Heat_P Parameter: Timepoint (hr) Value: 6
  misc_feature: MA Experiment 108523 PARAMETER Experiment Name: Zm_42deg_Heat_P Parameter: Tissue Value: Aerial
  misc_feature: MA Experiment ID: 108529 Result: Up-regulated in Transcription
  misc_feature: MA Experiment 108529 PARAMETER Experiment Name: Zm_Imbibed_Seeds_P Parameter: Age (day) Value: 5 vs. 2
  misc_feature: MA Experiment 108529 PARAMETER Experiment Name: Zm_Imbibed_Seeds_P Parameter: Organism Value: Zea mays
  misc_feature: MA Experiment 108529 PARAMETER Experiment Name: Zm_Imbibed_Seeds_P Parameter: Plant Line Value: 35A19
  misc_feature: MA Experiment 108529 PARAMETER Experiment Name: Zm_Imbibed_Seeds_P Parameter: Tissue Value: Roots vs. Embryo
  misc_feature: MA Experiment ID: 108530 Result: Up-regulated in Transcription
  misc_feature: MA Experiment 108530 PARAMETER Experiment Name: Zm_Imbibed_Seeds_P Parameter: Age (day) Value: 6 vs. 2
  misc_feature: MA Experiment 108530 PARAMETER Experiment Name: Zm_Imbibed_Seeds_P Parameter: Organism Value: Zea mays
  misc_feature: MA Experiment 108530 PARAMETER Experiment Name: Zm_Imbibed_Seeds_P Parameter: Plant Line Value: 35A19
  misc_feature: MA Experiment 108530 PARAMETER Experiment Name: Zm_Imbibed_Seeds_P Parameter: Tissue Value: Aerial vs. Embryo
  misc_feature: MA Experiment ID: 108532 Result: Up-regulated in Transcription
  misc_feature: MA Experiment 108532 PARAMETER Experiment Name: Zm_20uM_KNO3_H-to-L_P Parameter: Age (day) Value: 11
  misc_feature: MA Experiment 108532 PARAMETER Experiment Name: Zm_20uM_KNO3_H-to-L_P Parameter: Organism Value: Zea mays
  misc_feature: MA Experiment 108532 PARAMETER Experiment Name: Zm_20uM_KNO3_H-to-L_P Parameter: Plant Line Value: 35A19
  misc_feature: MA Experiment 108532 PARAMETER Experiment Name: Zm_20uM_KNO3_H-to-L_P Parameter: Timepoint (hr) Value: 16
  misc_feature: MA Experiment 108532 PARAMETER Experiment Name: Zm_20uM_KNO3_H-to-L_P Parameter: Tissue Value: Roots
  misc_feature: MA Experiment 108532 PARAMETER Experiment Name: Zm_20uM_KNO3_H-to-L_P Parameter: Treatment Value: 20uM KNO3 vs. 60mM KNO3
  misc_feature: MA Experiment ID: 108535 Result: Down-regulated in Transcription
  misc_feature: MA Experiment 108535 PARAMETER Experiment Name: Zm_Meristem_P Parameter: Age (day) Value: 8
  misc_feature: MA Experiment 108535 PARAMETER Experiment Name: Zm_Meristem_P Parameter: Organism Value: Zea mays
  misc_feature: MA Experiment 108535 PARAMETER Experiment Name: Zm_Meristem_P Parameter: Plant Line Value: 35A19
  misc_feature: MA Experiment 108535 PARAMETER Experiment Name: Zm_Meristem_P Parameter: Tissue Value: Root Meristem vs. Above Root Meristem
  misc_feature: MA Experiment ID: 108547 Result: Up-regulated in Transcription
  misc_feature: MA Experiment 108547 PARAMETER Experiment Name: Zm_Imbibed_Seeds_P Parameter: Age (day) Value: 4 vs. 2
  misc_feature: MA Experiment 108547 PARAMETER Experiment Name: Zm_Imbibed_Seeds_P Parameter: Organism Value: Zea mays
  misc_feature: MA Experiment 108547 PARAMETER Experiment Name: Zm_Imbibed_Seeds_P Parameter: Plant Line Value: 35A19
  misc_feature: MA Experiment 108547 PARAMETER Experiment Name: Zm_Imbibed_Seeds_P Parameter: Tissue Value: Aerial vs. Embryo
  misc_feature: MA Experiment ID: 108559 Result: Down-regulated in Transcription
  misc_feature: MA Experiment 108559 PARAMETER Experiment Name: Zm_5mM_NO_P Parameter: Age (day) Value: 8
  misc_feature: MA Experiment 108559 PARAMETER Experiment Name: Zm_5mM_NO_P Parameter: Organism Value: Zea mays
  misc_feature: MA Experiment 108559 PARAMETER Experiment Name: Zm_5mM_NO_P Parameter: Plant Line Value: 35A19
  misc_feature: MA Experiment 108559 PARAMETER Experiment Name: Zm_5mM_NO_P Parameter: Timepoint (hr) Value: 12
  misc_feature: MA Experiment 108559 PARAMETER Experiment Name: Zm_5mM_NO_P Parameter: Tissue Value: Aerial
  misc_feature: MA Experiment 108559 PARAMETER Experiment Name: Zm_5mM_NO_P Parameter: Treatment Value: 5mM NO vs. No Treatment
  misc_feature: MA Experiment ID: 20000479 Result: Up-regulated in Transcription
  misc_feature: MA Experiment 20000479 PARAMETER Experiment Name: Zm_Drought_P Parameter: Age (day) Value: 10
  misc_feature: MA Experiment 20000479 PARAMETER Experiment Name: Zm_Drought_P Parameter: Organism Value: Zea mays
  misc_feature: MA Experiment 20000479 PARAMETER Experiment Name: Zm_Drought_P Parameter: Plant Line Value: 35A19
  misc_feature: MA Experiment 20000479 PARAMETER Experiment Name: Zm_Drought_P Parameter: Timepoint (hr) Value: 48
  misc_feature: MA Experiment 20000479 PARAMETER Experiment Name: Zm_Drought_P Parameter: Tissue Value: Aerial
  misc_feature: MA Experiment 20000479 PARAMETER Experiment Name: Zm_Drought_P Parameter: Treatment Value: Drought vs. No Drought
  misc_feature: MA Experiment ID: 20000488 Result: Down-regulated in Transcription
  misc_feature: MA Experiment 20000488 PARAMETER Experiment Name: Zm_50mM_NH4NO3_L_to_H_P Parameter: Organism Value: Zea mays
  misc_feature: MA Experiment 20000488 PARAMETER Experiment Name: Zm_50mM_NH4NO3_L_to_H_P Parameter: Timepoint (hr) Value: 8
  misc_feature: MA Experiment 20000488 PARAMETER Experiment Name: Zm_50mM_NH4NO3_L_to_H_P Parameter: Tissue Value: Leaves
  misc_feature: MA Experiment 20000488 PARAMETER Experiment Name: Zm_50mM_NH4NO3_L_to_H_P Parameter: Treatment Value: 50mM NH4NO3 vs. 100mM Mannitol
  misc_feature: MA Experiment ID: 20000535 Result: Down-regulated in Transcription
  misc_feature: MA Experiment 20000535 PARAMETER Experiment Name: Zm_Hybrid_Seed_Dev_P Parameter: DAP Value: 30 vs. 12
  misc_feature: MA Experiment 20000535 PARAMETER Experiment Name: Zm_Hybrid_Seed_Dev_P Parameter: Organism Value: Zea mays
  misc_feature: MA Experiment 20000535 PARAMETER Experiment Name: Zm_Hybrid_Seed_Dev_P Parameter: Plant Line Value: 35A19
  misc_feature: MA Experiment 20000535 PARAMETER Experiment Name: Zm_Hybrid_Seed_Dev_P Parameter: Tissue Value: Embryo vs. Unfert Floret
  misc_feature: MA Experiment ID: 20000626 Result: Up-regulated in Transcription
  misc_feature: MA Experiment 20000626 PARAMETER Experiment Name: Zm_Herbicide-Treatments_P Parameter: Timepoint (hr) Value: 12
  misc_feature: MA Experiment 20000626 PARAMETER Experiment Name: Zm_Herbicide-Treatments_P Parameter: Tissue Value: Aerial
  misc_feature: MA Experiment 20000626 PARAMETER Experiment Name: Zm_Herbicide-Treatments_P Parameter: Treatment Value: Roundup vs. No Treatment
  misc_feature: MA Experiment ID: 20000627 Result: Up-regulated in Transcription
  misc_feature: MA Experiment 20000627 PARAMETER Experiment Name: Zm_Herbicide-Treatments_P Parameter: Timepoint (hr) Value: 12
  misc_feature: MA Experiment 20000627 PARAMETER Experiment Name: Zm_Herbicide-Treatments_P Parameter: Tissue Value: Aerial
  misc_feature: MA Experiment 20000627 PARAMETER Experiment Name: Zm_Herbicide-Treatments_P Parameter: Treatment Value: Finale vs. No Treatment
  misc_feature: MA Experiment ID: 20000629 Result: Up-regulated in Transcription
  misc_feature: MA Experiment 20000629 PARAMETER Experiment Name: Zm_Herbicide-Treatments_P Parameter: Timepoint (hr) Value: 12
  misc_feature: MA Experiment 20000629 PARAMETER Experiment Name: Zm_Herbicide-Treatments_P Parameter: Tissue Value: Aerial
  misc_feature: MA Experiment 20000629 PARAMETER Experiment Name: Zm_Herbicide-Treatments_P Parameter: Treatment Value: Trimec vs. No Treatment
  misc_feature: MA Experiment ID: 20000630 Result: Up-regulated in Transcription
  misc_feature: MA Experiment 20000630 PARAMETER Experiment Name: Zm_Herbicide-Treatments_P Parameter: Timepoint (hr) Value: 4
  misc_feature: MA Experiment 20000630 PARAMETER Experiment Name: Zm_Herbicide-Treatments_P Parameter: Tissue Value: Aerial
  misc_feature: MA Experiment 20000630 PARAMETER Experiment Name: Zm_Herbicide-Treatments_P Parameter: Treatment Value: Roundup vs. No Treatment
gcacgagaccattacctagaacatcctaatcgaaaagagcaaaggccaaagaacacggagaggctaaggctatccacacccacacagagtctaatcaagcttacagcccagaagcgtcacagacatggggaacgcagcagttgcaatcatatcttcagtctcggcaactgcgacggtagtagtaatgatcgccctcatcagaaggtgccgcgtcgtgaggaagaagataaagaagaaaatcgtaaagaaagtcttggaggagatcgagcggaagaaccgcgtgggggcagcctgcgacgccttggaagacgtggtgatcgagatcgttcccgtggagaagttcctcaacgagatcctgaacgagaagccgatgcgtttcagctccgagcagctggcggcctgcaccaagaactactcgtcggagctggggtccggcggctacggcgtggtctacaagggtgagctgcccaacggcctgctggtggccgtgaaggtgctcaaggtgtccatgaacaagaaggtgcaggaggcgttcatggcggagatcggcaccatcgggcggacgtaccacgtgcacctcgtccgcctctacggcttctgcttcgacgcggacaccaaggcgctggtgtacgagttcctggagaaggggtcgctcgagaagtacctctactgtgacgagggcagcacggccacgcggctggagtgggcaacgctgcacggcatcgccgtcggcacggcgaaggggatcaggtacctgcacgaggagtgccagcagcggatcgtgcactacgacatcaagccggccaacatcctgctcacggccgactacaccccgaaggtggccgacttcgggctggcacggctgggcgagcgcgagaacacgcacatgtcactgaccggcggcggccgtgggacgcccgggtacgcggcgccggagctgtggatggcgctgccggcttcggagaagtgcgacgtgtacagctttggaatggtgttgttcgagatcctagggcggcgccggaactacgacccctgccagggcgagagcaaggagtggttcccgagatgggtctgggagaggtacgcgcagggtgagatcgaggacgtcgtggcctgcgacgggatcgttggagacgcggacagagagaaggcggagatgatgtgcaaggtggcgctgtggtgcgtgcagttccagccgtcggcgcgaccgacgatgagcagcgtggtgcggatgctggagggggagatggccatcgtcccgcccgtgaaccccttccactacgtcatggaaagcagcagtgcctcgactagctcggggttgtggagcggcacataccagagcagcagagacaccactgccagagaaagtgagctgtcggctagcccagctgccaagtcgactgacgccatgattgaagatgttgagcgggcttatgcgtcagtgttggcgaaacagagcttgtagtcttgtacacattaattattgagtaaaatgcatccgcgacggtggg

SEQ ID NO: 13338 - protein, 446 aa, Zea mays subsp. mays
  peptide (1)..(446): Ceres Seq. ID no. 12365083
  misc_feature (3)..(431): Homolog of NCBI NO: 39545728 NR Description: OSJNBa0071I13.6 [Oryza sativa (japonica
  misc_feature (21)..(431): Homolog of NCBI NO: 38343972 NR Description: OSJNBb0022F16.11 [Oryza sativa (japonica
  misc_feature (1)..(415): Homolog of NCBI NO: 38343974 NR Description: OSJNBb0022F16.13 [Oryza sativa (japonica
  misc_feature (2)..(413): Homolog of NCBI NO: 38343973 NR Description: OSJNBb0022F16.12 [Oryza sativa (japonica
  misc_feature (5)..(419): Homolog of NCBI NO: 34393334 NR Description: S-receptor kinase PK3 precursor-like protein
  misc_feature (62)..(325): Homolog of NCBI NO: 33146505 NR Description: receptor-like kinase TAK33-like protein [Oryza
  misc_feature (340)..(418): Homolog of NCBI NO: 33146505 NR Description: receptor-like kinase TAK33-like protein [Oryza
  misc_feature (71)..(415): Homolog of NCBI NO: 7434406 NR Description: S-receptor kinase homolog F10M6.60 - Arabidopsis
  misc_feature (71)..(415): Homolog of NCBI NO: 22329085 NR Description: S-receptor kinase -like protein; protein id:
  misc_feature (74)..(438): Homolog of NCBI NO: 28376708 NR Description: putative receptor-like protein kinase [Oryza
MGNAAVAIISSVSATATVVVMIALIRRCRVVRKKIKKKIVKKVLEEIERKNRVGAACDALEDVVIEIVPVEKFLNEILNEKPMRFSSEQLAACTKNYSSELGSGGYGVVYKGELPNGLLVAVKVLKVSMNKKVQEAFMAEIGTIGRTYHVHLVRLYGFCFDADTKALVYEFLEKGSLEKYLYCDEGSTATRLEWATLHGIAVGTAKGIRYLHEECQQRIVHYDIKPANILLTADYTPKVADFGLARLGERENTHMSLTGGGRGTPGYAAPELWMALPASEKCDVYSFGMVLFEILGRRRNYDPCQGESKEWFPRWVWERYAQGEIEDVVACDGIVGDADREKAEMMCKVALWCVQFQPSARPTMSSVVRMLEGEMAIVPPVNPFHYVMESSSASTSSGLWSGTYQSSRDTTARESELSASPAAKSTDAMIEDVERAYASVLAKQSL

SEQ ID NO: 13339 - protein, 426 aa, Zea mays subsp. mays
  peptide (1)..(426): Ceres Seq. ID no. 12365084
  misc_feature (320)..(398): Homolog of NCBI NO: 33146505 NR Description: receptor-like kinase TAK33-like protein [Oryza
  misc_feature (51)..(395): Homolog of NCBI NO: 7434406 NR Description: S-receptor kinase homolog F10M6.60 - Arabidopsis
  misc_feature (51)..(395): Homolog of NCBI NO: 22329085 NR Description: S-receptor kinase -like protein; protein id:
  misc_feature (54)..(418): Homolog of NCBI NO: 28376708 NR Description: putative receptor-like protein kinase [Oryza
  misc_feature (1)..(411): Homolog of NCBI NO: 39545728 NR Description: OSJNBa0071I13.6 [Oryza sativa (japonica
  misc_feature (1)..(411): Homolog of NCBI NO: 38343972 NR Description: OSJNBb0022F16.11 [Oryza sativa (japonica
  misc_feature (1)..(395): Homolog of NCBI NO: 38343974 NR Description: OSJNBb0022F16.13 [Oryza sativa (japonica
  misc_feature (1)..(393): Homolog of NCBI NO: 38343973 NR Description: OSJNBb0022F16.12 [Oryza sativa (japonica
  misc_feature (1)..(399): Homolog of NCBI NO: 34393334 NR Description: S-receptor kinase PK3 precursor-like protein
  misc_feature (42)..(305): Homolog of NCBI NO: 33146505 NR Description: receptor-like kinase TAK33-like protein [Oryza
MIALIRRCRVVRKKIKKKIVKKVLEEIERKNRVGAACDALEDVVIEIVPVEKFLNEILNEKPMRFSSEQLAACTKNYSSELGSGGYGVVYKGELPNGLLVAVKVLKVSMNKKVQEAFMAEIGTIGRTYHVHLVRLYGFCFDADTKALVYEFLEKGSLEKYLYCDEGSTATRLEWATLHGIAVGTAKGIRYLHEECQQRIVHYDIKPANILLTADYTPKVADFGLARLGERENTHMSLTGGGRGTPGYAAPELWMALPASEKCDVYSFGMVLFEILGRRRNYDPCQGESKEWFPRWVWERYAQGEIEDVVACDGIVGDADREKAEMMCKVALWCVQFQPSARPTMSSVVRMLEGEMAIVPPVNPFHYVMESSSASTSSGLWSGTYQSSRDTTARESELSASPAAKSTDAMIEDVERAYASVLAKQSL

SEQ ID NO: 13340 - protein, 364 aa, Zea mays subsp. mays
  peptide (1)..(364): Ceres Seq. ID no. 12365085
  misc_feature (1)..(349): Homolog of NCBI NO: 39545728 NR Description: OSJNBa0071I13.6 [Oryza sativa (japonica
  misc_feature (1)..(349): Homolog of NCBI NO: 38343972 NR Description: OSJNBb0022F16.11 [Oryza sativa (japonica
  misc_feature (1)..(333): Homolog of NCBI NO: 38343974 NR Description: OSJNBb0022F16.13 [Oryza sativa (japonica
  misc_feature (1)..(331): Homolog of NCBI NO: 38343973 NR Description: OSJNBb0022F16.12 [Oryza sativa (japonica
  misc_feature (1)..(337): Homolog of NCBI NO: 34393334 NR Description: S-receptor kinase PK3 precursor-like protein
  misc_feature (1)..(243): Homolog of NCBI NO: 33146505 NR Description: receptor-like kinase TAK33-like protein [Oryza
  misc_feature (258)..(336): Homolog of NCBI NO: 33146505 NR Description: receptor-like kinase TAK33-like protein [Oryza
  misc_feature (1)..(333): Homolog of NCBI NO: 7434406 NR Description: S-receptor kinase homolog F10M6.60 - Arabidopsis
  misc_feature (1)..(333): Homolog of NCBI NO: 22329085 NR Description: S-receptor kinase -like protein; protein id:
  misc_feature (1)..(356): Homolog of NCBI NO: 28376708 NR Description: putative receptor-like protein kinase [Oryza
MRFSSEQLAACTKNYSSELGSGGYGVVYKGELPNGLLVAVKVLKVSMNKKVQEAFMAEIGTIGRTYHVHLVRLYGFCFDADTKALVYEFLEKGSLEKYLYCDEGSTATRLEWATLHGIAVGTAKGIRYLHEECQQRIVHYDIKPANILLTADYTPKVADFGLARLGERENTHMSLTGGGRGTPGYAAPELWMALPASEKCDVYSFGMVLFEILGRRRNYDPCQGESKEWFPRWVWERYAQGEIEDVVACDGIVGDADREKAEMMCKVALWCVQFQPSARPTMSSVVRMLEGEMAIVPPVNPFHYVMESSSASTSSGLWSGTYQSSRDTTARESELSASPAAKSTDAMIEDVERAYASVLAKQSL

SEQ ID NO: 13341 - DNA, 717 bp, Zea mays subsp. mays
  misc_feature (1)..(717): Ceres Seq. ID no. 12342442
  misc_feature: MA Experiment ID: 20000487 Result: Up-regulated in Transcription
  misc_feature: MA Experiment 20000487 PARAMETER Experiment Name: Zm_50mM_NH4NO3_L_to_H_P Parameter: Organism Value: Zea mays
  misc_feature: MA Experiment 20000487 PARAMETER Experiment Name: Zm_50mM_NH4NO3_L_to_H_P Parameter: Timepoint (hr) Value: 4
  misc_feature: MA Experiment 20000487 PARAMETER Experiment Name: Zm_50mM_NH4NO3_L_to_H_P Parameter: Tissue Value: Leaves
  misc_feature: MA Experiment 20000487 PARAMETER Experiment Name: Zm_50mM_NH4NO3_L_to_H_P Parameter: Treatment Value: 50mM NH4NO3 vs. 100mM Mannitol
ctcctcccatcccgtgcagccggcctcaccgccggcgacgggacgcggagacccgggctgccggtaccgtcagccgtgctccttcctctcttcgtcgcccccgccaaaaccttcatctgccggggctgcaccggcggcgcggggacaacaaaagctcgagatccggtgactgatctcttcgttcctcggttcactttgatattccaacaaaggtcacattgctagactcccagattggttcctaacaatgagggcacatgaacgagctgccagtttggctcttgcctgtctgagcttggctccacttctggttaacgtaaacccaaatgtgaatgtggtattgacagcatgccttactgtctatgtgggttgctaccgatctgtgaagccaactccaccttctgagaccatgtccaaggagcatgctatgcggttccctttagttggaagcgctatgcttttatcactgttccttctattcaagtttctctcaaaagatttggtcaacgctgtgctcactgcctactttttcattctaggcattgttgctctctccgcaacactgcttccttctataaaacgttttcttccaaaagagtggaatgataatctcatcgtctggcgggctccattcttccactcactctcggtggagttcacaaagtcccagattgttgcctcaatacctggatttttcttttgcttgtggtatgcgtc

SEQ ID NO: 13342 - protein, 156 aa, Zea mays subsp. mays
  peptide (1)..(156): Ceres Seq. ID no. 12342443
  misc_feature (47)..(155): Pfam Name: Signal peptide peptidase Pfam Description: Signal peptide peptidase
  misc_feature (1)..(155): Homolog of NCBI NO: 18395487 NR Description: expressed protein; protein id: At2g03120.1, by cDNA: 37655., supported by cDNA: gi_17473841 [Arabidopsis
  misc_feature (1)..(155): Homolog of NCBI NO: 21593273 NR Description: unknown [Arabidopsis thaliana]
  misc_feature (29)..(115): Homolog of NCBI NO: 34784510 NR Description: Unknown (protein for MGC:66829) [Mus musculus]
  misc_feature (29)..(115): Homolog of NCBI NO: 26332969 NR Description: unnamed protein product [Mus musculus]
  misc_feature (29)..(115): Homolog of NCBI NO: 14286280 NR Description: Similar to histocompatibility 13 [Homo sapiens]
  misc_feature (29)..(115): Homolog of NCBI NO: 22761270 NR Description: unnamed protein product [Homo sapiens]
  misc_feature (29)..(115): Homolog of NCBI NO: 18034682 NR Description: histocompatibility 13 [Mus musculus]
  misc_feature (29)..(115): Homolog of NCBI NO: 23308607 NR Description: histocompatibility (minor) 13; signal peptide
  misc_feature (29)..(115): Homolog of NCBI NO: 26389558 NR Description: unnamed protein product [Mus musculus]
  misc_feature (29)..(115): Homolog of NCBI NO: 25992191 NR Description: putative presenilin-like aspartyl protease [Mus
MRAHERAASLALACLSLAPLLVNVNPNVNVVLTACLTVYVGCYRSVKPTPPSETMSKEHAMRFPLVGSAMLLSLFLLFKFLSKDLVNAVLTAYFFILGIVALSATLLPSIKRFLPKEWNDNLIVWRAPFFHSLSVEFTKSQIVASIPGFFFCLWYA

SEQ ID NO: 13343 - protein, 102 aa, Zea mays subsp. mays
  peptide (1)..(102): Ceres Seq. ID no. 12342444
  misc_feature (1)..(101): Pfam Name: Signal peptide peptidase Pfam Description: Signal peptide peptidase
  misc_feature (1)..(101): Homolog of NCBI NO: 18395487 NR Description: expressed protein; protein id: At2g03120.1, by cDNA: 37655., supported by cDNA: gi_17473841 [Arabidopsis
  misc_feature (1)..(101): Homolog of NCBI NO: 21593273 NR Description: unknown [Arabidopsis thaliana]
  misc_feature (1)..(61): Homolog of NCBI NO: 34784510 NR Description: Unknown (protein for MGC:66829) [Mus musculus]
  misc_feature (1)..(61): Homolog of NCBI NO: 26332969 NR Description: unnamed protein product [Mus musculus]
  misc_feature (1)..(61): Homolog of NCBI NO: 14286280 NR Description: Similar to histocompatibility 13 [Homo sapiens]
  misc_feature (1)..(61): Homolog of NCBI NO: 18034682 NR Description: histocompatibility 13 [Mus musculus]
  misc_feature (1)..(61): Homolog of NCBI NO: 23308607 NR Description: histocompatibility (minor) 13; signal peptide
  misc_feature (1)..(61): Homolog of NCBI NO: 26389558 NR Description: unnamed protein product [Mus musculus]
  misc_feature (1)..(61): Homolog of NCBI NO: 25992191 NR Description: putative presenilin-like aspartyl protease [Mus
  misc_feature (1)..(61): Homolog of NCBI NO: 22761270 NR Description: unnamed protein product [Homo sapiens]
MSKEHAMRFPLVGSAMLLSLFLLFKFLSKDLVNAVLTAYFFILGIVALSATLLPSIKRFLPKEWNDNLIVWRAPFFHSLSVEFTKSQIVASIPGFFFCLWYA

SEQ ID NO: 13344 - protein, 96 aa, Zea mays subsp. mays
  peptide (1)..(96): Ceres Seq. ID no. 12342445
  misc_feature (1)..(95): Pfam Name: Signal peptide peptidase Pfam Description: Signal peptide peptidase
  misc_feature (1)..(95): Homolog of NCBI NO: 18395487 NR Description: expressed protein; protein id: At2g03120.1, by cDNA: 37655., supported by cDNA: gi_17473841 [Arabidopsis
  misc_feature (1)..(95): Homolog of NCBI NO: 21593273 NR Description: unknown [Arabidopsis thaliana]
  misc_feature (1)..(55): Homolog of NCBI NO: 34784510 NR Description: Unknown (protein for MGC:66829) [Mus musculus]
  misc_feature (1)..(55): Homolog of NCBI NO: 26332969 NR Description: unnamed protein product [Mus musculus]
  misc_feature (1)..(55): Homolog of NCBI NO: 14286280 NR Description: Similar to histocompatibility 13 [Homo sapiens]
  misc_feature (1)..(55): Homolog of NCBI NO: 18034682 NR Description: histocompatibility 13 [Mus musculus]
  misc_feature (1)..(55): Homolog of NCBI NO: 22761270 NR Description: unnamed protein product [Homo sapiens]
  misc_feature (1)..(55): Homolog of NCBI NO: 25992191 NR Description: putative presenilin-like aspartyl protease [Mus
  misc_feature (1)..(55): Homolog of NCBI NO: 26389558 NR Description: unnamed protein product [Mus musculus]
  misc_feature (1)..(55): Homolog of NCBI NO: 23308607 NR Description: histocompatibility (minor) 13; signal peptide
MRFPLVGSAMLLSLFLLFKFLSKDLVNAVLTAYFFILGIVALSATLLPSIKRFLPKEWNDNLIVWRAPFFHSLSVEFTKSQIVASIPGFFFCLWYA

SEQ ID NO: 13345 - DNA, 1277 bp, Zea mays subsp. mays
  misc_feature (1)..(1277): Ceres Seq. ID no. 12411307
  misc_feature: MA Experiment ID: 108535 Result: Up-regulated in Transcription
  misc_feature: MA Experiment 108535 PARAMETER Experiment Name: Zm_Meristem_P Parameter: Age (day) Value: 8
  misc_feature: MA Experiment 108535 PARAMETER Experiment Name: Zm_Meristem_P Parameter: Organism Value: Zea mays
  misc_feature: MA Experiment 108535 PARAMETER Experiment Name: Zm_Meristem_P Parameter: Plant Line Value: 35A19
  misc_feature: MA Experiment 108535 PARAMETER Experiment Name: Zm_Meristem_P Parameter: Tissue Value: Root Meristem vs. Above Root Meristem
ggtttgactattttgcccccgccgcgtgagttgccaaacgattcccgagtcttctgacactccttgccgccgccgccgcctgtcgccgacggcgatagatttggggatggatttgggctcgtgctacctcggtgggaacgccgacgcggtggagttctgcccgcaccgccacgttcctccacgtgctggccgccgccacctacacgctgcaggagcaggagcgcgaccgggcgggcagcatatccctcttctcagttgacgttgcctcggaggacgcgtcccggaggctccagctgctgcatactgtggagaccgccggcatcttcgatatgaagtggagccccaagtcgccgctgctcgcgcaggccgacgcccacggccgcatcgcgctccggcgcttggagcaggaggacggctcggacacaggcatcctcctcacagatgtctctgctgaagatatttcttcttcaatgtgcttatatgtggactggaaccaaactgcggagtctctgtctgttggattatcagatggctcactgtctctggtttcagtgagagaggaccggctggagatatcagaacagtggactgcacatcagttcgaagtctggacatgctattttgatcgtacaagtccacacttgctgtacagtggatcagatgactgttgtttcagttgctgggacttgagagaaagcccaccaaacattgtttttcaaaacaaaaaatctcataagatgggtgtctgttgtattacacagaatccgttggaggggaacatgctacttactgggagttatgatgaatttctcagagtttgggacatgagatttatggcaaaacctgtcaatgaaaagttgataaatctaggaggtggtgtgtggaggatgaagtatcatcctagtattgcagatgttgtattggctgcgtgcatgcacaatgggtttgccattgtaaaagtaggttctggggatgctacggtaatggaaacatattgcaagcatgagtccttagcatacggtgcagattggcagaaaagtgaagaggtggagcaaaatggaaattcttcagttgttgctacttgttcgttttatgatcgcctcctccgcgtgtggcaaccagagaacctagctgagctttaaagacttaaagcttttttgaattgaattcaagcatgactaggccatgaatctatttcctgaatgaaccagtataatttcattcaggtagttctttgaacttatgcttacatattcaagacttcaaagtcatgcatg

SEQ ID NO: 13346 - protein, 270 aa, Zea mays subsp. mays
  peptide (1)..(270): Ceres Seq. ID no. 12411308
  misc_feature (1)..(264): Homolog of NCBI NO: 15242588 NR Description: unknown protein; protein id: At5g63010.1 thaliana] >gi|9758301|dbj|BAB08844.1| gene_id:MJH22.7~unknown
  misc_feature (1)..(193): Homolog of NCBI NO: 26450621 NR Description: unknown protein [Arabidopsis thaliana]
  misc_feature (1)..(261): Homolog of NCBI NO: 18858115 NR Description: CG3184-PA [Drosophila melanogaster]
  misc_feature (1)..(234): Homolog of NCBI NO: 34853114 NR Description: similar to RIKEN cDNA 2810443J12 [Rattus
  misc_feature (243)..(265): Homolog of NCBI NO: 34853114 NR Description: similar to RIKEN cDNA 2810443J12 [Rattus
  misc_feature (1)..(234): Homolog of NCBI NO: 24308452 NR Description: hypothetical protein BC017335 [Homo sapiens] Unknown (protein for MGC:29782) [Homo sapiens]
  misc_feature (1)..(234): Homolog of NCBI NO: 21313066 NR Description: RIKEN cDNA 2810443J12 [Mus musculus] unnamed protein product [Mus musculus]
  misc_feature (1)..(263): Homolog of NCBI NO: 19075894 NR Description: hypothetical protein [Schizosaccharomyces pombe]
  misc_feature (66)..(234): Homolog of NCBI NO: 26352908 NR Description: unnamed protein product [Mus musculus]
  misc_feature (36)..(262): Homolog of NCBI NO: 23612162 NR Description: hypothetical protein, conserved [Plasmodium
MKWSPKSPLLAQADAHGRIALRRLEQEDGSDTGILLTDVSAEDISSSMCLYVDWNQTAESLSVGLSDGSLSLVSVREDRLEISEQWTAHQFEVWTCYFDRTSPHLLYSGSDDCCFSCWDLRESPPNIVFQNKKSHKMGVCCITQNPLEGNMLLTGSYDEFLRVWDMRFMAKPVNEKLINLGGGVWRMKYHPSIADVVLAACMHNGFAIVKVGSGDATVMETYCKHESLAYGADWQKSEEVEQNGNSSVVATCSFYDRLLRVWQPENLAEL

SEQ ID NO: 13347 - protein, 223 aa, Zea mays subsp. mays
  peptide (1)..(223): Ceres Seq. ID no. 12411309
  misc_feature (1)..(217): Homolog of NCBI NO: 15242588 NR Description: unknown protein; protein id: At5g63010.1 thaliana] >gi|9758301|dbj|BAB08844.1| gene_id:MJH22.7~unknown
  misc_feature (1)..(146): Homolog of NCBI NO: 26450621 NR Description: unknown protein [Arabidopsis thaliana]
  misc_feature (1)..(214): Homolog of NCBI NO: 18858115 NR Description: CG3184-PA [Drosophila melanogaster]
  misc_feature (1)..(187): Homolog of NCBI NO: 34853114 NR Description: similar to RIKEN cDNA 2810443J12 [Rattus
  misc_feature (196)..(218): Homolog of NCBI NO: 34853114 NR Description: similar to RIKEN cDNA 2810443J12 [Rattus
  misc_feature (1)..(187): Homolog of NCBI NO: 24308452 NR Description: hypothetical protein BC017335 [Homo sapiens] Unknown (protein for MGC:29782) [Homo sapiens]
  misc_feature (1)..(187): Homolog of NCBI NO: 21313066 NR Description: RIKEN cDNA 2810443J12 [Mus musculus] unnamed protein product [Mus musculus]
  misc_feature (1)..(216): Homolog of NCBI NO: 19075894 NR Description: hypothetical protein [Schizosaccharomyces pombe]
  misc_feature (19)..(187): Homolog of NCBI NO: 26352908 NR Description: unnamed protein product [Mus musculus]
  misc_feature (1)..(215): Homolog of NCBI NO: 23612162 NR Description: hypothetical protein, conserved [Plasmodium
MCLYVDWNQTAESLSVGLSDGSLSLVSVREDRLEISEQWTAHQFEVWTCYFDRTSPHLLYSGSDDCCFSCWDLRESPPNIVFQNKKSHKMGVCCITQNPLEGNMLLTGSYDEFLRVWDMRFMAKPVNEKLINLGGGVWRMKYHPSIADVVLAACMHNGFAIVKVGSGDATVMETYCKHESLAYGADWQKSEEVEQNGNSSVVATCSFYDRLLRVWQPENLAEL

SEQ ID NO: 13348 - DNA, 1659 bp, Zea mays subsp. mays
  misc_feature (1)..(1659): Ceres Seq. ID no. 12374238
  misc_feature: MA Experiment ID: 108559 Result: Down-regulated in Transcription
  misc_feature: MA Experiment 108559 PARAMETER Experiment Name: Zm_5mM_NO_P Parameter: Age (day) Value: 8
  misc_feature: MA Experiment 108559 PARAMETER Experiment Name: Zm_5mM_NO_P Parameter: Organism Value: Zea mays
  misc_feature: MA Experiment 108559 PARAMETER Experiment Name: Zm_5mM_NO_P Parameter: Plant Line Value: 35A19
  misc_feature: MA Experiment 108559 PARAMETER Experiment Name: Zm_5mM_NO_P Parameter: Timepoint (hr) Value: 12
  misc_feature: MA Experiment 108559 PARAMETER Experiment Name: Zm_5mM_NO_P Parameter: Tissue Value: Aerial
  misc_feature: MA Experiment 108559 PARAMETER Experiment Name: Zm_5mM_NO_P Parameter: Treatment Value: 5mM NO vs. No Treatment
  misc_feature: MA Experiment ID: 20000492 Result: Down-regulated in Transcription
  misc_feature: MA Experiment 20000492 PARAMETER Experiment Name: Zm_Hybrid_Seed_Dev_P Parameter: DAP Value: 12
  misc_feature: MA Experiment 20000492 PARAMETER Experiment Name: Zm_Hybrid_Seed_Dev_P Parameter: Organism Value: Zea mays
  misc_feature: MA Experiment 20000492 PARAMETER Experiment Name: Zm_Hybrid_Seed_Dev_P Parameter: Plant Line Value: 35A19
  misc_feature: MA Experiment 20000492 PARAMETER Experiment Name: Zm_Hybrid_Seed_Dev_P Parameter: Tissue Value: Fert Kernel vs. Unfert Floret
  misc_feature: MA Experiment ID: 20000534 Result: Down-regulated in Transcription
  misc_feature: MA Experiment 20000534 PARAMETER Experiment Name: Zm_Hybrid_Pollen_P Parameter: Age (day) Value: 8
  misc_feature: MA Experiment 20000534 PARAMETER Experiment Name: Zm_Hybrid_Pollen_P Parameter: Organism Value: Zea mays
  misc_feature: MA Experiment 20000534 PARAMETER Experiment Name: Zm_Hybrid_Pollen_P Parameter: Plant Line Value: 35A19
  misc_feature: MA Experiment 20000534 PARAMETER Experiment Name: Zm_Hybrid_Pollen_P Parameter: Tissue Value: Pollen vs. Aerial
  misc_feature: MA Experiment ID: 20000535 Result: Down-regulated in Transcription
  misc_feature: MA Experiment 20000535 PARAMETER Experiment Name: Zm_Hybrid_Seed_Dev_P Parameter: DAP Value: 30 vs. 12
  misc_feature: MA Experiment 20000535 PARAMETER Experiment Name: Zm_Hybrid_Seed_Dev_P Parameter: Organism Value: Zea mays
  misc_feature: MA Experiment 20000535 PARAMETER Experiment Name: Zm_Hybrid_Seed_Dev_P Parameter: Plant Line Value: 35A19
  misc_feature: MA Experiment 20000535 PARAMETER Experiment Name: Zm_Hybrid_Seed_Dev_P Parameter: Tissue Value: Embryo vs. Unfert Floret
tccggcagcgaagctcccccctccctgcctccttccccggcgccccgctcttcctccttccgctccggcgatgggcactggccgccgcggcggcggcggcggcggcgtgttccaccgcctcctcgccctctcgtcgctgctgctcctcgcttccggcgaggtcgtcttcgaggagcgcttcgaagatggttgggagactcggtgggtggaatccgactggaaaaggagtgaagggaaagcaggaaggttcaagcacacagcggggagatactctgcagatcctgatgacaaaggaatacaaacaacaatagatgccagacattttgctatctcagccaagttcccggaattcagtaacaagaaccggacgcttgtggtccagtactccattaagtttgagcaggatattgaatgtggcggtggctatattaagcttatgtccggttatgtcaaccagaaaaaatttagtggggacactccgtacagcttgatgtttggaccagatatatgtggtactcaaacaaagaagctccatcttatactctcttaccaggggcagaactatcccatcaaaaaagatctagaatgtgagacggacaagttaacacacgtgtatactttcattcttaggcctgatgcatcttatagcctgcttgttgataaccgtgaaagagaatctgggagcatgtacactgattgggatattctccctcctcgtaaaattaaggatgttcacgccaaaaggcctaaggattgggatgacagagaatatattgaagatcctgatgaagttaagccagagggctatgattctatcccaaaacagattcctgatccgaaggacaaaaagcctgacacatgggatgaagatgaggatggaatatggaagcccagaatggtatcaaatccagcatacaagggaccttggaaacgcaagagaattaaaaatcctaactacaagggtaaatggaagaccccatggatcgataatccagagtttgaggatgatccagatctttatgtgctgaagcctttgaagtatattggaattgaagtttggcaggtaaaagctggttcagttttcgacaacattctgatttgtgatgaccctgagtatgcaagaaaggttgttgaggaaacttggggtgcaaatagggaggctgaaaaggaagcttttgaagaagctgaaaaggagaggaaagctagggaggatagggaaggtcaaaaggcaaaggacgatggtggccggcatcgaatacacaggcgtcataaaaaaacactacagagatcactgggacgactaccatgatgagctataaaagtccccaaatattgcattcctcaaaagcataagctggaagttgcttcggacattgtgggtgcttttcaataataataattgattcgcctggtcagaacaacctgaagtgtttcttgctatgcgccaacaaattattgaactacaggatttgatatgtaatggacaaccgaagatctgcagggcattccagcgaaaacttggctctggtactgaaatagaggggacgagagactgtagtttgtgtctgtacaacggtgccggccatgtgctagctttgtaatctcaaaacattgtctttgcatgaataatgtaagttacccaaaaattactgcataccg

SEQ ID NO: 13349 - protein, 435 aa, Zea mays subsp. mays
  peptide (1)..(435): Ceres Seq. ID no. 12374239
  misc_feature (54)..(366): Pfam Name: Calreticulin family Pfam Description: Calreticulin family
  misc_feature (37)..(424): Homolog of NCBI NO: 18390896 NR Description: calreticulin, putative; protein id: At1g08450.1, by cDNA: gi_15810562, supported by cDNA: gi_2052382 [Arabidopsis >gi|15810563|gb|AAL07169.1| putative calreticulin protein
  misc_feature (37)..(424): Homolog of NCBI NO: 27311777 NR Description: calreticulin, putative [Arabidopsis thaliana]
  misc_feature (37)..(424): Homolog of NCBI NO: 12643531 NR Description: Calreticulin 3 precursor
  misc_feature (41)..(412): Homolog of NCBI NO: 11131745 NR Description: Calreticulin precursor >gi|7441496|pir||T10172
  misc_feature (40)..(413): Homolog of NCBI NO: 9858814 NR Description: calreticulin [Pinus taeda]
  misc_feature (37)..(412): Homolog of NCBI NO: 11131631 NR Description: Calreticulin precursor >gi|7441494|pir||T14554
  misc_feature (41)..(412): Homolog of NCBI NO: 12643243 NR Description: CALRETICULIN 2 PRECURSOR
  misc_feature (24)..(412): Homolog of NCBI NO: 11131769 NR Description: Calreticulin precursor >gi|7441495|pir||T16968
  misc_feature (51)..(413): Homolog of NCBI NO: 11131949 NR Description: Calreticulin precursor >gi|4335864|gb|AAD17490.1|
  misc_feature (98)..(312): Homolog of NCBI NO: 6664320 NR Description: T27G7.13 [Arabidopsis thaliana]
PAAKLPPPCLLPRRPALPPSAPAMGTGRRGGGGGGVFHRLLALSSLLLLASGEVVFEERFEDGWETRWVESDWKRSEGKAGRFKHTAGRYSADPDDKGIQTTIDARHFAISAKFPEFSNKNRTLVVQYSIKFEQDIECGGGYIKLMSGYVNQKKFSGDTPYSLMFGPDICGTQTKKLHLILSYQGQNYPIKKDLECETDKLTHVYTFILRPDASYSLLVDNRERESGSMYTDWDILPPRKIKDVHAKRPKDWDDREYIEDPDEVKPEGYDSIPKQIPDPKDKKPDTWDEDEDGIWKPRMVSNPAYKGPWKRKRIKNPNYKGKWKTPWIDNPEFEDDPDLYVLKPLKYIGIEVWQVKAGSVFDNILICDDPEYARKVVEETWGANREAEKEAFEEAEKERKAREDREGQKAKDDGGRHRIHRRHKKTLQRSLGRLP

SEQ ID NO: 13350 - protein, 412 aa, Zea mays subsp. mays
  peptide (1)..(412): Ceres Seq. ID no. 12374240
  misc_feature (31)..(343): Pfam Name: Calreticulin family Pfam Description: Calreticulin family
  misc_feature (14)..(401): Homolog of NCBI NO: 18390896 NR Description: calreticulin, putative; protein id: At1g08450.1, by cDNA: gi_15810562, supported by cDNA: gi_2052382 [Arabidopsis >gi|15810563|gb|AAL07169.1| putative calreticulin protein
  misc_feature (14)..(401): Homolog of NCBI NO: 27311777 NR Description: calreticulin, putative [Arabidopsis thaliana]
  misc_feature (14)..(401): Homolog of NCBI NO: 12643531 NR Description: Calreticulin 3 precursor
  misc_feature (18)..(389): Homolog of NCBI NO: 11131745 NR Description: Calreticulin precursor >gi|7441496|pir||T10172
  misc_feature (17)..(390): Homolog of NCBI NO: 9858814 NR Description: calreticulin [Pinus taeda]
  misc_feature (14)..(389): Homolog of NCBI NO: 11131631 NR Description: Calreticulin precursor >gi|7441494|pir||T14554
  misc_feature (18)..(389): Homolog of NCBI NO: 12643243 NR Description: CALRETICULIN 2 PRECURSOR
  misc_feature (1)..(389): Homolog of NCBI NO: 11131769 NR Description: Calreticulin precursor >gi|7441495|pir||T16968
  misc_feature (28)..(390): Homolog of NCBI NO: 11131949 NR Description: Calreticulin precursor >gi|4335864|gb|AAD17490.1|
  misc_feature (75)..(289): Homolog of NCBI NO: 6664320 NR Description: T27G7.13 [Arabidopsis thaliana]
MGTGRRGGGGGGVFHRLLALSSLLLLASGEVVFEERFEDGWETRWVESDWKRSEGKAGRFKHTAGRYSADPDDKGIQTTIDARHFAISAKFPEFSNKNRTLVVQYSIKFEQDIECGGGYIKLMSGYVNQKKFSGDTPYSLMFGPDICGTQTKKLHLILSYQGQNYPIKKDLECETDKLTHVYTFILRPDASYSLLVDNRERESGSMYTDWDILPPRKIKDVHAKRPKDWDDREYIEDPDEVKPEGYDSIPKQIPDPKDKKPDTWDEDEDGIWKPRMVSNPAYKGPWKRKRIKNPNYKGKWKTPWIDNPEFEDDPDLYVLKPLKYIGIEVWQVKAGSVFDNILICDDPEYARKVVEETWGANREAEKEAFEEAEKERKAREDREGQKAKDDGGRHRIHRRHKKTLQRSLGRLP

SEQ ID NO: 13351 - protein, 290 aa, Zea mays subsp. mays
  peptide (1)..(290): Ceres Seq. ID no. 12374241
  misc_feature (1)..(221): Pfam Name: Calreticulin family Pfam Description: Calreticulin family
  misc_feature (1)..(279): Homolog of NCBI NO: 18390896 NR Description: calreticulin, putative; protein id: At1g08450.1, by cDNA: gi_15810562, supported by cDNA: gi_2052382 [Arabidopsis >gi|15810563|gb|AAL07169.1| putative calreticulin protein
  misc_feature (1)..(279): Homolog of NCBI NO: 27311777 NR Description: calreticulin, putative [Arabidopsis thaliana]
  misc_feature (1)..(279): Homolog of NCBI NO: 12643531 NR Description: Calreticulin 3 precursor
  misc_feature (1)..(267): Homolog of NCBI NO: 11131745 NR Description: Calreticulin precursor >gi|7441496|pir||T10172
  misc_feature (1)..(268): Homolog of NCBI NO: 9858814 NR Description: calreticulin [Pinus taeda]
  misc_feature (1)..(267): Homolog of NCBI NO: 11131631 NR Description: Calreticulin precursor >gi|7441494|pir||T14554
  misc_feature (1)..(267): Homolog of NCBI NO: 12643243 NR Description: CALRETICULIN 2 PRECURSOR
  misc_feature (1)..(267): Homolog of NCBI NO: 11131769 NR Description: Calreticulin precursor >gi|7441495|pir||T16968
  misc_feature (1)..(268): Homolog of NCBI NO: 11131949 NR Description: Calreticulin precursor >gi|4335864|gb|AAD17490.1|
  misc_feature (1)..(167): Homolog of NCBI NO: 6664320 NR Description: T27G7.13 [Arabidopsis thaliana]
MSGYVNQKKFSGDTPYSLMFGPDICGTQTKKLHLILSYQGQNYPIKKDLECETDKLTHVYTFILRPDASYSLLVDNRERESGSMYTDWDILPPRKIKDVHAKRPKDWDDREYIEDPDEVKPEGYDSIPKQIPDPKDKKPDTWDEDEDGIWKPRMVSNPAYKGPWKRKRIKNPNYKGKWKTPWIDNPEFEDDPDLYVLKPLKYIGIEVWQVKAGSVFDNILICDDPEYARKVVEETWGANREAEKEAFEEAEKERKAREDREGQKAKDDGGRHRIHRRHKKTLQRSLGRLP

SEQ ID NO: 13352 - DNA, 1616 bp, Zea mays subsp. mays
  misc_feature (1)..(1616): Ceres Seq. ID no. 12351870
  misc_feature: MA Experiment ID: 108543 Result: Up-regulated in Transcription
  misc_feature: MA Experiment ID: 20000108 Result: Up-regulated in Transcription
  misc_feature: MA Experiment 20000108 PARAMETER Experiment Name: Zm_Root-Tips_P Parameter: Age (day) Value: 12
  misc_feature: MA Experiment 20000108 PARAMETER Experiment Name: Zm_Root-Tips_P Parameter: Organism Value: Zea mays
  misc_feature: MA Experiment 20000108 PARAMETER Experiment Name: Zm_Root-Tips_P Parameter: Tissue Value: Root tips vs. Root mid region    35
  misc_feature: MA Experiment 20000108 PARAMETER Experiment Name: Zm_Root-Tips_P Parameter: Tissue Value: Root tips vs. Root mid region   Sequence Listing-Misc Features (4)
  misc_feature: MA Experiment ID: 20000477 Result: Down-regulated in Transcription
  misc_feature: MA Experiment 20000477 PARAMETER Experiment Name: Zm_5mM_SA_P Parameter: Age (day) Value: 10
  misc_feature: MA Experiment 20000477 PARAMETER Experiment Name: Zm_5mM_SA_P Parameter: Organism Value: Zea mays
  misc_feature: MA Experiment 20000477 PARAMETER Experiment Name: Zm_5mM_SA_P Parameter: Plant Line Value: 35A19
  misc_feature: MA Experiment 20000477 PARAMETER Experiment Name: Zm_5mM_SA_P Parameter: Timepoint (hr) Value: 48
  misc_feature: MA Experiment 20000477 PARAMETER Experiment Name: Zm_5mM_SA_P Parameter: Tissue Value: Aerial
  misc_feature: MA Experiment 20000477 PARAMETER Experiment Name: Zm_5mM_SA_P Parameter: Treatment Value: 5mM SA vs. No Treatment
  misc_feature: MA Experiment ID: 20000478 Result: Down-regulated in Transcription
  misc_feature: MA Experiment 20000478 PARAMETER Experiment Name: Zm_5mM_SA_P Parameter: Age (day) Value: 11
  misc_feature: MA Experiment 20000478 PARAMETER Experiment Name: Zm_5mM_SA_P Parameter: Organism Value: Zea mays
  misc_feature: MA Experiment 20000478 PARAMETER Experiment Name: Zm_5mM_SA_P Parameter: Plant Line Value: 35A19
  misc_feature: MA Experiment 20000478 PARAMETER Experiment Name: Zm_5mM_SA_P Parameter: Timepoint (hr) Value: 72
  misc_feature: MA Experiment 20000478 PARAMETER Experiment Name: Zm_5mM_SA_P Parameter: Tissue Value: Aerial
  misc_feature: MA Experiment 20000478 PARAMETER Experiment Name: Zm_5mM_SA_P Parameter: Treatment Value: 5mM SA vs. No Treatment
  misc_feature: MA Experiment ID: 20000479 Result: Down-regulated in Transcription
  misc_feature: MA Experiment 20000479 PARAMETER Experiment Name: Zm_Drought_P Parameter: Age (day) Value: 10
  misc_feature: MA Experiment 20000479 PARAMETER Experiment Name: Zm_Drought_P Parameter: Organism Value: Zea mays
  misc_feature: MA Experiment 20000479 PARAMETER Experiment Name: Zm_Drought_P Parameter: Plant Line Value: 35A19
  misc_feature: MA Experiment 20000479 PARAMETER Experiment Name: Zm_Drought_P Parameter: Timepoint (hr) Value: 48
  misc_feature: MA Experiment 20000479 PARAMETER Experiment Name: Zm_Drought_P Parameter: Tissue Value: Aerial
  misc_feature: MA Experiment 20000479 PARAMETER Experiment Name: Zm_Drought_P Parameter: Treatment Value: Drought vs. No Drought
  misc_feature: MA Experiment ID: 20000480 Result: Down-regulated in Transcription
  misc_feature: MA Experiment 20000480 PARAMETER Experiment Name: Zm_Drought_P Parameter: Age (day) Value: 11
  misc_feature: MA Experiment 20000480 PARAMETER Experiment Name: Zm_Drought_P Parameter: Organism Value: Zea mays
  misc_feature: MA Experiment 20000480 PARAMETER Experiment Name: Zm_Drought_P Parameter: Plant Line Value: 35A19
  misc_feature: MA Experiment 20000480 PARAMETER Experiment Name: Zm_Drought_P Parameter: Timepoint (hr) Value: 72
  misc_feature: MA Experiment 20000480 PARAMETER Experiment Name: Zm_Drought_P Parameter: Tissue Value: Aerial
  misc_feature: MA Experiment 20000480 PARAMETER Experiment Name: Zm_Drought_P Parameter: Treatment Value: Drought vs. No Drought
  misc_feature: MA Experiment ID: 20000626 Result: Down-regulated in Transcription
  misc_feature: MA Experiment 20000626 PARAMETER Experiment Name: Zm_Herbicide-Treatments_P Parameter: Timepoint (hr) Value: 12
  misc_feature: MA Experiment 20000626 PARAMETER Experiment Name: Zm_Herbicide-Treatments_P Parameter: Tissue Value: Aerial
  misc_feature: MA Experiment 20000626 PARAMETER Experiment Name: Zm_Herbicide-Treatments_P Parameter: Treatment Value: Roundup vs. No Treatment
aaacacagtcaccaccacctacacccccgttgtctcctctccttccattgccacagtcggccttctccgtggaagccggcgggccgccgcctcctttgtccctgtcgtcgtgctcttccgtaccgccattccctagcactgtccacgggcgagatctcgcgtgtacctcgtttccctcggcgggtggatcagtgacggcttggtcgagatggacgatgtggttgatgacatcatctgtggaacggatgcggcggttgccgtcgaggatggggccagtgggacgcccgcaatgcctagcttagggtgccagggtgaggaagagcataggaagggcaatgaggacaactcaggtgagagcgaggtgattaacccggccagcaagaggctggcggggaggccacctcgcccctggaaggcaggaagcctcgcctttccaaggggaatcaaagccatgtacctaaggctgtcaaatctaagagtccaaggagtggagatgaaaatcagacaaggagaaaagctcccaactcttcttttcctaaggcacccattgtccaggagtcccatggtgactctggtgtcggcagtaataaagctggcaagaatgagtctcactcatccccaattgatgcagcattgcccgatgagtccaaggagaaaaggaaaactcaaaagccaccagcacagctctcttccatcaaaagagatgaagaacagtcaaatggtgagagtgcaaagcctcgcaaagttggaagcacgccatcatatggtttcaccttcaagtgtgatgagagatctgaaaaaagacgagagttctattcgaagcttgaggagaagattcatgcaagagagttagaaataagcaatttgcaagccaagtcaaaggaaactgaagaagcagaactcaaaatgctgagaaagagtttgaatttcaaggcaacaccaatgccaagcttttataaggaaccaacccctgccaaggttgaattgaaaaagatccccccaaccagagctaaatcaccaaagcttggtcggtctaaaaacaagtccatatcagagactgaagaaaatactactacggaccaacctgcccgtctgagccttgacgaaaaggtttctcaaaacggtgtgaaaaaaccaaccccgtcgagttcagcaaagaagccccagagaaagtcactccccaggctgccatctgaagaaacttgtccgcttgatgccacctcaaggcagctgaagaacaacaaactggatgaagttaatgctcaggagacaggatcagctacagggcaggtacaaggaagtgagacggaaacagattctgttcagagcgcaactcaagctggagctaaccctgatgaacagagtgtcgctcagtgaacagagtgtcgctcagtgaagatctcggtggccaagccaagtgatttgtgatggatggtgtgccttatctttgtgtgatgttgtgcttgtctactagagtgacttgtggcctgtatcatgctgtgttatactcctgtttttgttttcctgcgattgagcctgtatgttgcttatcaatctagatagcttttgttcataatctacagatatatccaaattgtcctaagtcatttgcagtt

SEQ ID NO: 13353 - protein, 214 aa, Zea mays subsp. mays
  peptide (1)..(214): Ceres Seq. ID no. 12351871
MDDVVDDIICGTDAAVAVEDGASGTPAMPSLGCQGEEEHRKGNEDNSGESEVINPASKRLAGRPPRPWKAGSLAFPRGIKAMYLRLSNLRVQGVEMKIRQGEKLPTLLFLRHPLSRSPMVTLVSAVIKLARMSLTHPQLMQHCPMSPRRKGKLKSHQHSSLPSKEMKNSQMVRVQSLAKLEARHHMVSPSSVMRDLKKDESSIRSLRRRFMQES

SEQ ID NO: 13354 - protein, 187 aa, Zea mays subsp. mays
  peptide (1)..(187): Ceres Seq. ID no. 12351872
MPSLGCQGEEEHRKGNEDNSGESEVINPASKRLAGRPPRPWKAGSLAFPRGIKAMYLRLSNLRVQGVEMKIRQGEKLPTLLFLRHPLSRSPMVTLVSAVIKLARMSLTHPQLMQHCPMSPRRKGKLKSHQHSSLPSKEMKNSQMVRVQSLAKLEARHHMVSPSSVMRDLKKDESSIRSLRRRFMQES

SEQ ID NO: 13355 - protein, 156 aa, Zea mays subsp. mays
  peptide (1)..(156): Ceres Seq. ID no. 12351873
  misc_feature (1)..(99): Homolog of NCBI NO: 18417986 NR Description: putative protein; protein id: At4g32330.1, by cDNA: gi_14334555, supported by cDNA: gi_21280970 [Arabidopsis >gi|14334556|gb|AAK59686.1| unknown protein [Arabidopsis
  misc_feature (1)..(156): Homolog of NCBI NO: 15224733 NR Description: unknown protein; protein id: At2g25480.1
  misc_feature (1)..(140): Homolog of NCBI NO: 18403980 NR Description: expressed protein; protein id: At2g35880.1, by cDNA: gi_16209719 [Arabidopsis thaliana] At2g35880/F11F19.21 [Arabidopsis thaliana]
  misc_feature (1)..(140): Homolog of NCBI NO: 25408425 NR Description: hypothetical protein At2g35880 [imported] -
  misc_feature (1)..(29): Homolog of NCBI NO: 7485356 NR Description: hypothetical protein F10M6.40 - Arabidopsis >gi|2864611|emb|CAA16958.1| putative protein [Arabidopsis
  misc_feature (1)..(29): Homolog of NCBI NO: 7486636 NR Description: hypothetical protein F8B4.30 - Arabidopsis >gi|4049335|emb|CAA22560.1| putative protein [Arabidopsis >gi|7270137|emb|CAB79950.1| putative protein [Arabidopsis
  misc_feature (1)..(84): Homolog of NCBI NO: 34897180 NR Description: unknown protein [Oryza sativa (japonica
  misc_feature (1)..(46): Homolog of NCBI NO: 9294199 NR Description: gb|AAF04893.1~gene_id:MXC7.13~similar to unknown
  misc_feature (1)..(46): Homolog of NCBI NO: 15228950 NR Description: unknown protein; protein id: At3g23090.1 thaliana] >gi|27765054|gb|AAO23648.1| At3g23090 [Arabidopsis
  misc_feature (1)..(59): Homolog of NCBI NO: 18396961 NR Description: expressed protein; protein id: At3g04630.1,
MLRKSLNFKATPMPSFYKEPTPAKVELKKIPPTRAKSPKLGRSKNKSISETEENTTTDQPARLSLDEKVSQNGVKKPTPSSSAKKPQRKSLPRLPSEETCPLDATSRQLKNNKLDEVNAQETGSATGQVQGSETETDSVQSATQAGANPDEQSVAQ

SEQ ID NO: 13356 - DNA, 1534 bp, Zea mays subsp. mays
  misc_feature (1)..(1534): Ceres Seq. ID no. 12435123
  misc_feature: MA Experiment ID: 108522 Result: Down-regulated in Transcription
  misc_feature: MA Experiment 108522 PARAMETER Experiment Name: Zm_42deg_Heat_P Parameter: Age (day) Value: 8
  misc_feature: MA Experiment 108522 PARAMETER Experiment Name: Zm_42deg_Heat_P Parameter: Organism Value: Zea mays
  misc_feature: MA Experiment 108522 PARAMETER Experiment Name: Zm_42deg_Heat_P Parameter: Plant Line Value: 35A19
  misc_feature: MA Experiment 108522 PARAMETER Experiment Name: Zm_42deg_Heat_P Parameter: Temperature (deg C) Value: 42 vs. 22
  misc_feature: MA Experiment 108522 PARAMETER Experiment Name: Zm_42deg_Heat_P Parameter: Timepoint (hr) Value: 1
  misc_feature: MA Experiment 108522 PARAMETER Experiment Name: Zm_42deg_Heat_P Parameter: Tissue Value: Aerial
  misc_feature: MA Experiment ID: 108535 Result: Up-regulated in Transcription
  misc_feature: MA Experiment 108535 PARAMETER Experiment Name: Zm_Meristem_P Parameter: Age (day) Value: 8
  misc_feature: MA Experiment 108535 PARAMETER Experiment Name: Zm_Meristem_P Parameter: Organism Value: Zea mays
  misc_feature: MA Experiment 108535 PARAMETER Experiment Name: Zm_Meristem_P Parameter: Plant Line Value: 35A19
  misc_feature: MA Experiment 108535 PARAMETER Experiment Name: Zm_Meristem_P Parameter: Tissue Value: Root Meristem vs. Above Root Meristem
  misc_feature: MA Experiment ID: 108543 Result: Up-regulated in Transcription
  misc_feature: MA Experiment ID: 108556 Result: Down-regulated in Transcription
  misc_feature: MA Experiment 108556 PARAMETER Experiment Name: Zm_Drought_P Parameter: Age (day) Value: 9
  misc_feature: MA Experiment 108556 PARAMETER Experiment Name: Zm_Drought_P Parameter: Organism Value: Zea mays
  misc_feature: MA Experiment 108556 PARAMETER Experiment Name: Zm_Drought_P Parameter: Plant Line Value: 35A19
  misc_feature: MA Experiment 108556 PARAMETER Experiment Name: Zm_Drought_P Parameter: Timepoint (hr) Value: 24
  misc_feature: MA Experiment 108556 PARAMETER Experiment Name: Zm_Drought_P Parameter: Tissue Value: Aerial
  misc_feature: MA Experiment 108556 PARAMETER Experiment Name: Zm_Drought_P Parameter: Treatment Value: Drought vs. No Drought
  misc_feature: MA Experiment ID: 20000479 Result: Down-regulated in Transcription
  misc_feature: MA Experiment 20000479 PARAMETER Experiment Name: Zm_Drought_P Parameter: Age (day) Value: 10
  misc_feature: MA Experiment 20000479 PARAMETER Experiment Name: Zm_Drought_P Parameter: Organism Value: Zea mays
  misc_feature: MA Experiment 20000479 PARAMETER Experiment Name: Zm_Drought_P Parameter: Plant Line Value: 35A19
  misc_feature: MA Experiment 20000479 PARAMETER Experiment Name: Zm_Drought_P Parameter: Timepoint (hr) Value: 48
  misc_feature: MA Experiment 20000479 PARAMETER Experiment Name: Zm_Drought_P Parameter: Tissue Value: Aerial
  misc_feature: MA Experiment 20000479 PARAMETER Experiment Name: Zm_Drought_P Parameter: Treatment Value: Drought vs. No Drought
caatattgctgcttcagaacatgaaataactgggcctaacaccctctctactgacttcctcagctacgtggaatctgaagttttaagacttgaacagcttaaagcgagcaagatgaaagacctcgttcttaaaaagaagacagaactggaagatcataggagacgtgctcatttgattggtgaggaaggttatgcagccgaatttagcgatgaggctattgaggcaggagctgtcgatcctgcgctggtgctggaacaaattgaggctcacattgccacagtgaaagaggaagcttttagccgtaaggatattcttgagaaggttgaaagatggctgaatgcatgtgaggaggaagcttggctggaagattataacaaagacgacaatcgttataatgccgggaggggggcccacttgacactcaaaagggctgagaaagctcgtattttggttaacaagatcccaggactggtagatgttttgaccacaaaaattgtagcttgggagacagaaagaggaaaggagttcacatatgatggtgtccgcctgcggtcaatgcttgaagactacataatcattcgccaggagaaagagctagagaagaagaggcaaagggatcagaagaagatccaggatcaactcaaagcctgagcaggaagcgctgtatggatcaaaaccaagtccatctaagactcaaagcacgaagaaggtgcctagacaatccatgggtggtgcgaaccgaagactgtctcttggtggagccacaacgcaagcccccaaaacagatataatgcactccaagacagctcgtgctgcgaagaaggctgaagatttgggcgctttatctcctagtagcagaggcttggacattgccggtcttcccatcaagaaactatctttcaacgcaagcactctgcgagaggcagaaacaccacgcaagccttttgcccagatcatgccaggaaacaatgtctcgtcgatgcctgcgcggcccatctccaacgacacagaggaagagaacaaaacccccaaaacatttgcagggctcaatccaaaaacgccggtgacagtgacggctcctatgcagttggcggtgacaccagctgtggccaacaaggtcatagccactcctgcaacccttttccaggagaaggcagagtcgccagcgctgcctggggaccatcgagtactcgttcgaagagaggcgactcgccgtttacctggccaggcaagtggcattttttgttcattcaccttctcccagttgcgctaatacccagctattacttagttgaaagctgagctgactgcgatttctcggcagaggccaatgttacctgttggtcgatactcgatagtagtgggcctcggtcttactttgcactactattcattcatagccatattgctactagccagtaaagggagtttttagtcttgagagcttgtggtctgcatcgtaagttgtatagctttatacggtgcatcgtcgatgacctgttattgttattatatggtttattactgttatcc

SEQ ID NO: 13357 - protein, 216 aa, Zea mays subsp. mays
  peptide (1)..(216): Ceres Seq. ID no. 12435124
  misc_feature (1)..(216): Pfam Name: Microtubule associated protein (MAP65/ASE1 family) Pfam Description: Microtubule associated protein (MAP65/ASE1
  misc_feature (1)..(216): Homolog of NCBI NO: 15242132 NR Description: putative protein; protein id: At5g51600.1 thaliana] >gi|9758202|dbj|BAB08676.1|
  misc_feature (1)..(214): Homolog of NCBI NO: 15232967 NR Description: putative protein; protein id: At3g60840.1
  misc_feature (1)..(214): Homolog of NCBI NO: 15241762 NR Description: cytokinesis regulating protein - like; protein
  misc_feature (1)..(214): Homolog of NCBI NO: 11558252 NR Description: microtubule-associated protein MAP65-1a
  misc_feature (1)..(216): Homolog of NCBI NO: 28200790 NR Description: 65kD microtubule associated protein [Daucus
  misc_feature (1)..(213): Homolog of NCBI NO: 15240485 NR Description: putative protein; protein id: At5g55230.1 thaliana] >gi|9758120|dbj|BAB08592.1| similarity to unknown protein [Arabidopsis thaliana]
  misc_feature (2)..(214): Homolog of NCBI NO: 25410943 NR Description: hypothetical protein At2g01910 [imported] - thaliana >gi|4522009|gb|AAD21782.1| unknown protein [Arabidopsis
  misc_feature (2)..(214): Homolog of NCBI NO: 30677965 NR Description: microtubule associated protein (MAP65/ASE1)
  misc_feature (2)..(214): Homolog of NCBI NO: 21539547 NR Description: unknown protein [Arabidopsis thaliana]
  misc_feature (1)..(214): Homolog of NCBI NO: 11558256 NR Description: microtubule-associated protein MAP65-1c
NIAASEHEITGPNTLSTDFLSYVESEVLRLEQLKASKMKDLVLKKKTELEDHRRRAHLIGEEGYAAEFSDEAIEAGAVDPALVLEQIEAHIATVKEEAFSRKDILEKVERWLNACEEEAWLEDYNKDDNRYNAGRGAHLTLKRAEKARILVNKIPGLVDVLTTKIVAWETERGKEFTYDGVRLRSMLEDYIIIRQEKELEKKRQRDQKKIQDQLKA

SEQ ID NO: 13358 - protein, 182 aa, Zea mays subsp. mays
  peptide (1)..(182): Ceres Seq. ID no. 12435125
  misc_feature (1)..(77): Pfam Name: Microtubule associated protein (MAP65/ASE1 family) Pfam Description: Microtubule associated protein (MAP65/ASE1
  misc_feature (1)..(144): Homolog of NCBI NO: 15242132 NR Description: putative protein; protein id: At5g51600.1 thaliana] >gi|9758202|dbj|BAB08676.1|
MGGANRRLSLGGATTQAPKTDIMHSKTARAAKKAEDLGALSPSSRGLDIAGLPIKKLSFNASTLREAETPRKPFAQIMPGNNVSSMPARPISNDTEEENKTPKTFAGLNPKTPVTVTAPMQLAVTPAVANKVIATPATLFQEKAESPALPGDHRVLVRREATRRLPGQASGIFCSFTFSQLR

SEQ ID NO: 13359 - protein, 179 aa, Zea mays subsp. mays
  peptide (1)..(179): Ceres Seq. ID no. 12435126
  misc_feature (1)..(179): Pfam Name: Microtubule associated protein (MAP65/ASE1 family) Pfam Description: Microtubule associated protein (MAP65/ASE1
  misc_feature (1)..(179): Homolog of NCBI NO: 15242132 NR Description: putative protein; protein id: At5g51600.1 thaliana] >gi|9758202|dbj|BAB08676.1|
  misc_feature (1)..(177): Homolog of NCBI NO: 15232967 NR Description: putative protein; protein id: At3g60840.1
  misc_feature (1)..(177): Homolog of NCBI NO: 15241762 NR Description: cytokinesis regulating protein - like; protein
  misc_feature (1)..(177): Homolog of NCBI NO: 11558252 NR Description: microtubule-associated protein MAP65-1a
  misc_feature (1)..(179): Homolog of NCBI NO: 28200790 NR Description: 65kD microtubule associated protein [Daucus
  misc_feature (1)..(176): Homolog of NCBI NO: 15240485 NR Description: putative protein; protein id: At5g55230.1 thaliana] >gi|9758120|dbj|BAB08592.1| similarity to unknown protein [Arabidopsis thaliana]
  misc_feature (1)..(177): Homolog of NCBI NO: 25410943 NR Description: hypothetical protein At2g01910 [imported] - thaliana >gi|4522009|gb|AAD21782.1| unknown protein [Arabidopsis
  misc_feature (1)..(177): Homolog of NCBI NO: 30677965 NR Description: microtubule associated protein (MAP65/ASE1)
  misc_feature (1)..(177): Homolog of NCBI NO: 21539547 NR Description: unknown protein [Arabidopsis thaliana]
  misc_feature (1)..(177): Homolog of NCBI NO: 11558256 NR Description: microtubule-associated protein MAP65-1c
MKDLVLKKKTELEDHRRRAHLIGEEGYAAEFSDEAIEAGAVDPALVLEQIEAHIATVKEEAFSRKDILEKVERWLNACEEEAWLEDYNKDDNRYNAGRGAHLTLKRAEKARILVNKIPGLVDVLTTKIVAWETERGKEFTYDGVRLRSMLEDYIIIRQEKELEKKRQRDQKKIQDQLKA

SEQ ID NO: 13360 - DNA, 945 bp, Zea mays subsp. mays
  misc_feature (1)..(945): Ceres Seq. ID no. 13577751
  misc_feature: MA Experiment ID: 108528 Result: Up-regulated in Transcription
  misc_feature: MA Experiment 108528 PARAMETER Experiment Name: Zm_Imbibed_Seeds_P Parameter: Age (day) Value: 5 vs. 2
  misc_feature: MA Experiment 108528 PARAMETER Experiment Name: Zm_Imbibed_Seeds_P Parameter: Organism Value: Zea mays
  misc_feature: MA Experiment 108528 PARAMETER Experiment Name: Zm_Imbibed_Seeds_P Parameter: Plant Line Value: 35A19
  misc_feature: MA Experiment 108528 PARAMETER Experiment Name: Zm_Imbibed_Seeds_P Parameter: Tissue Value: Aerial vs. Embryo
  misc_feature: MA Experiment ID: 108530 Result: Up-regulated in Transcription
  misc_feature: MA Experiment 108530 PARAMETER Experiment Name: Zm_Imbibed_Seeds_P Parameter: Age (day) Value: 6 vs. 2
  misc_feature: MA Experiment 108530 PARAMETER Experiment Name: Zm_Imbibed_Seeds_P Parameter: Organism Value: Zea mays
  misc_feature: MA Experiment 108530 PARAMETER Experiment Name: Zm_Imbibed_Seeds_P Parameter: Plant Line Value: 35A19
  misc_feature: MA Experiment 108530 PARAMETER Experiment Name: Zm_Imbibed_Seeds_P Parameter: Tissue Value: Aerial vs. Embryo
  misc_feature: MA Experiment ID: 108545 Result: Up-regulated in Transcription
  misc_feature: MA Experiment 108545 PARAMETER Experiment Name: Zm_Imbibed_Seeds_P Parameter: Age (day) Value: 3 vs. 2
  misc_feature: MA Experiment 108545 PARAMETER Experiment Name: Zm_Imbibed_Seeds_P Parameter: Organism Value: Zea mays
  misc_feature: MA Experiment 108545 PARAMETER Experiment Name: Zm_Imbibed_Seeds_P Parameter: Plant Line Value: 35A19
  misc_feature: MA Experiment 108545 PARAMETER Experiment Name: Zm_Imbibed_Seeds_P Parameter: Tissue Value: Aerial vs. Embryo
  misc_feature: MA Experiment ID: 108547 Result: Up-regulated in Transcription
  misc_feature: MA Experiment 108547 PARAMETER Experiment Name: Zm_Imbibed_Seeds_P Parameter: Age (day) Value: 4 vs. 2
  misc_feature: MA Experiment 108547 PARAMETER Experiment Name: Zm_Imbibed_Seeds_P Parameter: Organism Value: Zea mays
  misc_feature: MA Experiment 108547 PARAMETER Experiment Name: Zm_Imbibed_Seeds_P Parameter: Plant Line Value: 35A19
  misc_feature: MA Experiment 108547 PARAMETER Experiment Name: Zm_Imbibed_Seeds_P Parameter: Tissue Value: Aerial vs. Embryo
  misc_feature: MA Experiment ID: 20000626 Result: Down-regulated in Transcription
  misc_feature: MA Experiment 20000626 PARAMETER Experiment Name: Zm_Herbicide-Treatments_P Parameter: Timepoint (hr) Value: 12
  misc_feature: MA Experiment 20000626 PARAMETER Experiment Name: Zm_Herbicide-Treatments_P Parameter: Tissue Value: Aerial
  misc_feature: MA Experiment 20000626 PARAMETER Experiment Name: Zm_Herbicide-Treatments_P Parameter: Treatment Value: Roundup vs. No Treatment
aattttgcttccggctgccgctcttctccgccgccgccccgatccccttcctccccaagcccttcaactatccactcccgcgtccccggagaagcggcgagatgtacggcatcctgacctccccctgccctcgagccccgcttctccgcgctctcccgagcccatccgcccgcgcattccccagaacactagccttccccgcgaggcccctcccccgcggtctccgcctgacccctccgcacgcmgmmgcggaggcatyggcggcagcacggcgttgggcgggcttctggcgtcgccgctctcgactctggaggccgccctgcggggcctcaacctcgcgccccttcgcgcccccgtggcggcggcgatgtcggcggccgtgcggtggctgggagtgtaccgggaggtgctgctcgtcggcgtgctgctctcctggttccccaacatcccctgggaccgccagcccttctcggccctgcgcgacctctgcgaccccttcctcgccctgtgccgtgaggtcatgccccccgtgttcgggcgcaagctcgacctcagcccgcttgttgcattcatggctattgacatcatcatcatgatcctgcgcccgcagccacgcatgtgatgactccctgcagcagtgggtttggacgatgttggttggtatgttaggctctgactgcaggaacaaggatctaaggctgttttcggtcatcagatggcaaagaaaggtgctgtgccgctcacctctatcagtacacaagtgcggtggttggatggattagttttgcgatcttagcatagctgttatggagggtgtaatgcaatataaatgatttcgatgtggcttcattcccaaaacttcctttttctcgtgtcctgtggttgttgtagtaatatgtgttggctacgtttacgtattggtaatcccagttttggtcagtgccc

SEQ ID NO: 13361 - protein, 206 aa, Zea mays subsp. mays
  peptide (1)..(206): Ceres Seq. ID no. 15222656
  misc_feature (119)..(200): Pfam Name: YGGT family Pfam Description: YGGT family
  misc_feature (52)..(206): Homolog of NCBI NO: 34393226 NR Description: unknown protein [Oryza sativa (japonica
  misc_feature (97)..(200): Homolog of NCBI NO: 15234345 NR Description: expressed protein [Arabidopsis thaliana]
  misc_feature (97)..(200): Homolog of NCBI NO: 21592772 NR Description: unknown [Arabidopsis thaliana]
  misc_feature (105)..(193): Homolog of NCBI NO: 18397948 NR Description: expressed protein [Arabidopsis thaliana] unknown protein [Arabidopsis thaliana] unknown protein [Arabidopsis thaliana]
  misc_feature (105)..(193): Homolog of NCBI NO: 21617923 NR Description: unknown [Arabidopsis thaliana]
  misc_feature (129)..(200): Homolog of NCBI NO: 22298077 NR Description: ORF_ID:tsr0534~hypothetical protein
  misc_feature (119)..(196): Homolog of NCBI NO: 37523109 NR Description: hypothetical protein [Gloeobacter violaceus]
  misc_feature (123)..(206): Homolog of NCBI NO: 17229553 NR Description: hypothetical protein [Nostoc sp. PCC 7120]
  misc_feature (124)..(200): Homolog of NCBI NO: 11467623 NR Description: hypothetical chloroplast RF19 [Guillardia theta] HYPOTHETICAL 10.4 KD PROTEIN YCF19 >gi|3602948|gb|AAC35609.1|
  misc_feature (123)..(203): Homolog of NCBI NO: 11465587 NR Description: unknown [Cyanidium caldarium] Hypothetical 10.5 kDa protein ycf19
  misc_feature (82)..(82): Xaa is any aa, unknown or other
  misc_feature (83)..(83): Xaa is any aa, unknown or other
  misc_feature (86)..(86): Xaa is any aa, unknown or other
ILLPAAALLRRRPDPLPPQALQLSTPASPEKRRDVRHPDLPLPSSPASPRSPEPIRPRIPQNTSLPREAPPPRSPPDPSARXXGGXGGSTALGGLLASPLSTLEAALRGLNLAPLRAPVAAAMSAAVRWLGVYREVLLVGVLLSWFPNIPWDRQPFSALRDLCDPFLALCREVMPPVFGRKLDLSPLVAFMAIDIIIMILRPQPRM

SEQ ID NO: 13362 - protein, 197 aa, Zea mays subsp. mays
  peptide (1)..(197): Ceres Seq. ID no. 15222657
  misc_feature (123)..(182): Pfam Name: Keratin, high sulfur B2 protein Pfam Description: Keratin, high sulfur B2 protein
  misc_feature (81)..(81): Xaa is any aa, unknown or other
  misc_feature (82)..(82): Xaa is any aa, unknown or other
  misc_feature (86)..(86): Xaa is any aa, unknown or other
FCFRLPLFSAAAPIPFLPKPFNYPLPRPRRSGEMYGILTSPCPRAPLLRALPSPSARAFPRTLAFPARPLPRGLRLTPPHXXAEAXAAARRWAGFWRRRSRLWRPPCGASTSRPFAPPWRRRCRRPCGGWECTGRCCSSACCSPGSPTSPGTASPSRPCATSATPSSPCAVRSCPPCSGASSTSARLLHSWLLTSSS

SEQ ID NO: 13363 - protein, 164 aa, Zea mays subsp. mays
  peptide (1)..(164): Ceres Seq. ID no. 15222658
  misc_feature (90)..(149): Pfam Name: Keratin, high sulfur B2 protein Pfam Description: Keratin, high sulfur B2 protein
  misc_feature (48)..(48): Xaa is any aa, unknown or other
  misc_feature (49)..(49): Xaa is any aa, unknown or other
  misc_feature (53)..(53): Xaa is any aa, unknown or other
MYGILTSPCPRAPLLRALPSPSARAFPRTLAFPARPLPRGLRLTPPHXXAEAXAAARRWAGFWRRRSRLWRPPCGASTSRPFAPPWRRRCRRPCGGWECTGRCCSSACCSPGSPTSPGTASPSRPCATSATPSSPCAVRSCPPCSGASSTSARLLHSWLLTSSS

SEQ ID NO: 13364 - DNA, 1270 bp, Zea mays subsp. mays
  misc_feature (1)..(1270): Ceres Seq. ID no. 13496142
  misc_feature: MA Experiment ID: 108523 Result: Up-regulated in Transcription
  misc_feature: MA Experiment 108523 PARAMETER Experiment Name: Zm_42deg_Heat_P Parameter: Age (day) Value: 8
  misc_feature: MA Experiment 108523 PARAMETER Experiment Name: Zm_42deg_Heat_P Parameter: Organism Value: Zea mays
  misc_feature: MA Experiment 108523 PARAMETER Experiment Name: Zm_42deg_Heat_P Parameter: Plant Line Value: 35A19
  misc_feature: MA Experiment 108523 PARAMETER Experiment Name: Zm_42deg_Heat_P Parameter: Temperature (deg C) Value: 42 vs. 22
  misc_feature: MA Experiment 108523 PARAMETER Experiment Name: Zm_42deg_Heat_P Parameter: Timepoint (hr) Value: 6
  misc_feature: MA Experiment 108523 PARAMETER Experiment Name: Zm_42deg_Heat_P Parameter: Tissue Value: Aerial
  misc_feature: MA Experiment ID: 108527 Result: Up-regulated in Transcription
  misc_feature: MA Experiment 108527 PARAMETER Experiment Name: Zm_5mM_NO_P Parameter: Age (day) Value: 8
  misc_feature: MA Experiment 108527 PARAMETER Experiment Name: Zm_5mM_NO_P Parameter: Organism Value: Zea mays
  misc_feature: MA Experiment 108527 PARAMETER Experiment Name: Zm_5mM_NO_P Parameter: Plant Line Value: 35A19
  misc_feature: MA Experiment 108527 PARAMETER Experiment Name: Zm_5mM_NO_P Parameter: Timepoint (hr) Value: 6
  misc_feature: MA Experiment 108527 PARAMETER Experiment Name: Zm_5mM_NO_P Parameter: Tissue Value: Aerial
  misc_feature: MA Experiment 108527 PARAMETER Experiment Name: Zm_5mM_NO_P Parameter: Treatment Value: 5mM NO vs. No Treatment
  misc_feature: MA Experiment ID: 108528 Result: Down-regulated in Transcription
  misc_feature: MA Experiment 108528 PARAMETER Experiment Name: Zm_Imbibed_Seeds_P Parameter: Age (day) Value: 5 vs. 2
  misc_feature: MA Experiment 108528 PARAMETER Experiment Name: Zm_Imbibed_Seeds_P Parameter: Organism Value: Zea mays
  misc_feature: MA Experiment 108528 PARAMETER Experiment Name: Zm_Imbibed_Seeds_P Parameter: Plant Line Value: 35A19
  misc_feature: MA Experiment 108528 PARAMETER Experiment Name: Zm_Imbibed_Seeds_P Parameter: Tissue Value: Aerial vs. Embryo
  misc_feature: MA Experiment ID: 108530 Result: Down-regulated in Transcription
  misc_feature: MA Experiment 108530 PARAMETER Experiment Name: Zm_Imbibed_Seeds_P Parameter: Age (day) Value: 6 vs. 2
  misc_feature: MA Experiment 108530 PARAMETER Experiment Name: Zm_Imbibed_Seeds_P Parameter: Organism Value: Zea mays
  misc_feature: MA Experiment 108530 PARAMETER Experiment Name: Zm_Imbibed_Seeds_P Parameter: Plant Line Value: 35A19
  misc_feature: MA Experiment 108530 PARAMETER Experiment Name: Zm_Imbibed_Seeds_P Parameter: Tissue Value: Aerial vs. Embryo
  misc_feature: MA Experiment ID: 108543 Result: Down-regulated in Transcription
  misc_feature: MA Experiment ID: 108547 Result: Down-regulated in Transcription
  misc_feature: MA Experiment 108547 PARAMETER Experiment Name: Zm_Imbibed_Seeds_P Parameter: Age (day) Value: 4 vs. 2
  misc_feature: MA Experiment 108547 PARAMETER Experiment Name: Zm_Imbibed_Seeds_P Parameter: Organism Value: Zea mays
  misc_feature: MA Experiment 108547 PARAMETER Experiment Name: Zm_Imbibed_Seeds_P Parameter: Plant Line Value: 35A19
  misc_feature: MA Experiment 108547 PARAMETER Experiment Name: Zm_Imbibed_Seeds_P Parameter: Tissue Value: Aerial vs. Embryo
  misc_feature: MA Experiment ID: 20000487 Result: Up-regulated in Transcription
  misc_feature: MA Experiment 20000487 PARAMETER Experiment Name: Zm_50mM_NH4NO3_L_to_H_P Parameter: Organism Value: Zea mays
  misc_feature: MA Experiment 20000487 PARAMETER Experiment Name: Zm_50mM_NH4NO3_L_to_H_P Parameter: Timepoint (hr) Value: 4
  misc_feature: MA Experiment 20000487 PARAMETER Experiment Name: Zm_50mM_NH4NO3_L_to_H_P Parameter: Tissue Value: Leaves
  misc_feature: MA Experiment 20000487 PARAMETER Experiment Name: Zm_50mM_NH4NO3_L_to_H_P Parameter: Treatment Value: 50mM NH4NO3 vs. 100mM Mannitol
  misc_feature: MA Experiment ID: 20000488 Result: Up-regulated in Transcription
  misc_feature: MA Experiment 20000488 PARAMETER Experiment Name: Zm_50mM_NH4NO3_L_to_H_P Parameter: Organism Value: Zea mays
  misc_feature: MA Experiment 20000488 PARAMETER Experiment Name: Zm_50mM_NH4NO3_L_to_H_P Parameter: Timepoint (hr) Value: 8
  misc_feature: MA Experiment 20000488 PARAMETER Experiment Name: Zm_50mM_NH4NO3_L_to_H_P Parameter: Tissue Value: Leaves
  misc_feature: MA Experiment 20000488 PARAMETER Experiment Name: Zm_50mM_NH4NO3_L_to_H_P Parameter: Treatment Value: 50mM NH4NO3 vs. 100mM Mannitol
  misc_feature: MA Experiment ID: 20001605 Result: Up-regulated in Transcription
  misc_feature: MA Experiment 20001605 PARAMETER Experiment Name: Zm_50ppm_KNO3_L-to-H_P Parameter: Age (day) Value: 19
  misc_feature: MA Experiment 20001605 PARAMETER Experiment Name: Zm_50ppm_KNO3_L-to-H_P Parameter: Organism Value: Zea mays
  misc_feature: MA Experiment 20001605 PARAMETER Experiment Name: Zm_50ppm_KNO3_L-to-H_P Parameter: Plant Line Value: 35A19
  misc_feature: MA Experiment 20001605 PARAMETER Experiment Name: Zm_50ppm_KNO3_L-to-H_P Parameter: Timepoint (hr) Value: 4
  misc_feature: MA Experiment 20001605 PARAMETER Experiment Name: Zm_50ppm_KNO3_L-to-H_P Parameter: Tissue Value: Shoots
  misc_feature: MA Experiment 20001605 PARAMETER Experiment Name: Zm_50ppm_KNO3_L-to-H_P Parameter: Treatment Value: 50ppm KNO3 vs. 50ppm KCl
  misc_feature: MA Experiment ID: 20001606 Result: Up-regulated in Transcription
  misc_feature: MA Experiment 20001606 PARAMETER Experiment Name: Zm_50ppm_KNO3_L-to-H_P Parameter: Age (day) Value: 19
  misc_feature: MA Experiment 20001606 PARAMETER Experiment Name: Zm_50ppm_KNO3_L-to-H_P Parameter: Organism Value: Zea mays
  misc_feature: MA Experiment 20001606 PARAMETER Experiment Name: Zm_50ppm_KNO3_L-to-H_P Parameter: Plant Line Value: 35A19
  misc_feature: MA Experiment 20001606 PARAMETER Experiment Name: Zm_50ppm_KNO3_L-to-H_P Parameter: Timepoint (hr) Value: 8
  misc_feature: MA Experiment 20001606 PARAMETER Experiment Name: Zm_50ppm_KNO3_L-to-H_P Parameter: Tissue Value: Shoots
  misc_feature: MA Experiment 20001606 PARAMETER Experiment Name: Zm_50ppm_KNO3_L-to-H_P Parameter: Treatment Value: 50ppm KNO3 vs. 50ppm KCl
  misc_feature: MA Experiment ID: 20001612 Result: Up-regulated in Transcription
  misc_feature: MA Experiment 20001612 PARAMETER Experiment Name: Zm_50ppm_KNO3_L-to-H_P Parameter: Age (day) Value: 19
  misc_feature: MA Experiment 20001612 PARAMETER Experiment Name: Zm_50ppm_KNO3_L-to-H_P Parameter: Organism Value: Zea mays
  misc_feature: MA Experiment 20001612 PARAMETER Experiment Name: Zm_50ppm_KNO3_L-to-H_P Parameter: Plant Line Value: 35A19
  misc_feature: MA Experiment 20001612 PARAMETER Experiment Name: Zm_50ppm_KNO3_L-to-H_P Parameter: Timepoint (hr) Value: 8
  misc_feature: MA Experiment 20001612 PARAMETER Experiment Name: Zm_50ppm_KNO3_L-to-H_P Parameter: Tissue Value: Roots
  misc_feature: MA Experiment 20001612 PARAMETER Experiment Name: Zm_50ppm_KNO3_L-to-H_P Parameter: Treatment Value: 50ppm KNO3 vs. 50ppm KCl
  misc_feature: MA Experiment ID: 20001613 Result: Up-regulated in Transcription
  misc_feature: MA Experiment 20001613 PARAMETER Experiment Name: Zm_50ppm_KNO3_L-to-H_P Parameter: Age (day) Value: 20
  misc_feature: MA Experiment 20001613 PARAMETER Experiment Name: Zm_50ppm_KNO3_L-to-H_P Parameter: Organism Value: Zea mays
  misc_feature: MA Experiment 20001613 PARAMETER Experiment Name: Zm_50ppm_KNO3_L-to-H_P Parameter: Plant Line Value: 35A19
  misc_feature: MA Experiment 20001613 PARAMETER Experiment Name: Zm_50ppm_KNO3_L-to-H_P Parameter: Timepoint (hr) Value: 24
  misc_feature: MA Experiment 20001613 PARAMETER Experiment Name: Zm_50ppm_KNO3_L-to-H_P Parameter: Tissue Value: Roots
  misc_feature: MA Experiment 20001613 PARAMETER Experiment Name: Zm_50ppm_KNO3_L-to-H_P Parameter: Treatment Value: 50ppm KNO3 vs. 50ppm KCl
tagaacatcctaatcgaaaatccacctttcccgcaccttgttgcacataaaaattcccacgccccgcacccaacgacctccgcgtccgcccccaaaacccccgcaaaccctagccgccgccagctaggcaaggaatggccgccctcctgcggctcgccgcagcccgatccgccctccccaggcgcgccctcgccccacaccggaggctcgcggcggcggcggcggccgcgatggaggagtggtggtccgactgggagcaggacggcgaggaggaggcgcgcgcctcggcgccggccgccggccttgaccccgccggcgggggccccgggggcgtgcagtgggtcgtcatgggccgccctggcccgcagaagcacgcccacgccgcgcgcctctccgaggtgctcgccgtgccctacatctccatgggcgcgctcctcaggcaggagctcaacccctcctcgcaactctacaggaagattgcaaactctgtgaatgaagggaggcttgtgccggaggacatcatatttgggttgctgacgaagcggcttgaggacggatacaacaagggtgaaaatgggttcattcttgatgggattccacgcacccgtatgcaagctgagattcttgacgagattgtggatgttgatttggttcttaatttcaagtgtgctgatggctgtttcatgaagaagcaatcgagaggcaacatctgcgcccactgtggacagctctttgacgtcagcaattcagcatctacgaactgtagccccagcctcgggagctatacatggcattctcaggcagaacctgctggtgttttaggcctcgaagcctcaaggatggagaggatgcgcacatatgctgagcagaccaagcagctggaagattactacaagaagcagaggaaaattgtggaactgaagacatctgctcgcccggtggagacatggcaggggctcgtagccgccctgcacctccagcatctggactcgcccccgacaccgcacaaactcaccgcgtaaatatcattattaattttgctacctccgagtagagagtctaaaggatcagaattccgatcctgcctgcagcatatctaatatccctatgtttgtgggttctggctcgagagagtcagtcggctgtcttttgttttgttttgttattgttatagataaaggtaagcgattttgcagacacgcttattgtatggttgtaaccgagagttgtggacttgccttggcttgcgagtgtactcgcttatatgctc

SEQ ID NO: 13365 - protein, 295 aa, Zea mays subsp. mays
  peptide (1)..(295): Ceres Seq. ID no. 13496143
  misc_feature (7)..(180): Homolog of NCBI NO: 6091724 NR Description: putative adenylate kinase [Arabidopsis thaliana]
  misc_feature (7)..(180): Homolog of NCBI NO: 30678433 NR Description: adenylate kinase -related [Arabidopsis thaliana] AT3g01820/F28J7_15 [Arabidopsis thaliana]
  misc_feature (1)..(290): Homolog of NCBI NO: 29427816 NR Description: Adenylate kinase, chloroplast precursor (ATP-AMP
  misc_feature (23)..(281): Homolog of NCBI NO: 15228109 NR Description: adenylate kinase -related [Arabidopsis thaliana]
  misc_feature (23)..(282): Homolog of NCBI NO: 30687836 NR Description: adenylate kinase -related [Arabidopsis thaliana]
  misc_feature (115)..(282): Homolog of NCBI NO: 6063552 NR Description: ESTs AU065232(E60855),C23624(S1554), correspond to a region of the predicted gene.~similar to putative
  misc_feature (1)..(120): Homolog of NCBI NO: 6063552 NR Description: ESTs AU065232(E60855),C23624(S1554), correspond to a region of the predicted gene.~similar to putative
  misc_feature (70)..(279): Homolog of NCBI NO: 11498284 NR Description: adenylate kinase (adk) [Archaeoglobus fulgidus
  misc_feature (70)..(283): Homolog of NCBI NO: 23112485 NR Description: hypothetical protein [Desulfitobacterium
  misc_feature (61)..(254): Homolog of NCBI NO: 9664584 NR Description: adenylate kinase [uncultured marine group II
MAALLRLAAARSALPRRALAPHRRLAAAAAAAMEEWWSDWEQDGEEEARASAPAAGLDPAGGGPGGVQWVVMGRPGPQKHAHAARLSEVLAVPYISMGALLRQELNPSSQLYRKIANSVNEGRLVPEDIIFGLLTKRLEDGYNKGENGFILDGIPRTRMQAEILDEIVDVDLVLNFKCADGCFMKKQSRGNICAHCGQLFDVSNSASTNCSPSLGSYTWHSQAEPAGVLGLEASRMERMRTYAEQTKQLEDYYKKQRKIVELKTSARPVETWQGLVAALHLQHLDSPPTPHKLTA

SEQ ID NO: 13366 - protein, 263 aa, Zea mays subsp. mays
  peptide (1)..(263): Ceres Seq. ID no. 13496144
  misc_feature (1)..(148): Homolog of NCBI NO: 6091724 NR Description: putative adenylate kinase [Arabidopsis thaliana]
  misc_feature (1)..(148): Homolog of NCBI NO: 30678433 NR Description: adenylate kinase -related [Arabidopsis thaliana] AT3g01820/F28J7_15 [Arabidopsis thaliana]
  misc_feature (1)..(258): Homolog of NCBI NO: 29427816 NR Description: Adenylate kinase, chloroplast precursor (ATP-AMP
  misc_feature (1)..(249): Homolog of NCBI NO: 15228109 NR Description: adenylate kinase -related [Arabidopsis thaliana]
  misc_feature (1)..(250): Homolog of NCBI NO: 30687836 NR Description: adenylate kinase -related [Arabidopsis thaliana]
  misc_feature (83)..(250): Homolog of NCBI NO: 6063552 NR Description: ESTs AU065232(E60855),C23624(S1554), correspond to a region of the predicted gene.~similar to putative
  misc_feature (1)..(88): Homolog of NCBI NO: 6063552 NR Description: ESTs AU065232(E60855),C23624(S1554), correspond to a region of the predicted gene.~similar to putative
  misc_feature (38)..(247): Homolog of NCBI NO: 11498284 NR Description: adenylate kinase (adk) [Archaeoglobus fulgidus
  misc_feature (38)..(251): Homolog of NCBI NO: 23112485 NR Description: hypothetical protein [Desulfitobacterium
  misc_feature (29)..(222): Homolog of NCBI NO: 9664584 NR Description: adenylate kinase [uncultured marine group II
MEEWWSDWEQDGEEEARASAPAAGLDPAGGGPGGVQWVVMGRPGPQKHAHAARLSEVLAVPYISMGALLRQELNPSSQLYRKIANSVNEGRLVPEDIIFGLLTKRLEDGYNKGENGFILDGIPRTRMQAEILDEIVDVDLVLNFKCADGCFMKKQSRGNICAHCGQLFDVSNSASTNCSPSLGSYTWHSQAEPAGVLGLEASRMERMRTYAEQTKQLEDYYKKQRKIVELKTSARPVETWQGLVAALHLQHLDSPPTPHKLTA

SEQ ID NO: 13367 - protein, 224 aa, Zea mays subsp. mays
  peptide (1)..(224): Ceres Seq. ID no. 13496145
  misc_feature (1)..(109): Homolog of NCBI NO: 6091724 NR Description: putative adenylate kinase [Arabidopsis thaliana]
  misc_feature (1)..(109): Homolog of NCBI NO: 30678433 NR Description: adenylate kinase -related [Arabidopsis thaliana] AT3g01820/F28J7_15 [Arabidopsis thaliana]
  misc_feature (1)..(219): Homolog of NCBI NO: 29427816 NR Description: Adenylate kinase, chloroplast precursor (ATP-AMP
  misc_feature (1)..(210): Homolog of NCBI NO: 15228109 NR Description: adenylate kinase -related [Arabidopsis thaliana]
  misc_feature (1)..(211): Homolog of NCBI NO: 30687836 NR Description: adenylate kinase -related [Arabidopsis thaliana]
  misc_feature (44)..(211): Homolog of NCBI NO: 6063552 NR Description: ESTs AU065232(E60855),C23624(S1554), correspond to a region of the predicted gene.~similar to putative
  misc_feature (1)..(49): Homolog of NCBI NO: 6063552 NR Description: ESTs AU065232(E60855),C23624(S1554), correspond to a region of the predicted gene.~similar to putative
  misc_feature (1)..(208): Homolog of NCBI NO: 11498284 NR Description: adenylate kinase (adk) [Archaeoglobus fulgidus
  misc_feature (1)..(212): Homolog of NCBI NO: 23112485 NR Description: hypothetical protein [Desulfitobacterium
  misc_feature (1)..(183): Homolog of NCBI NO: 9664584 NR Description: adenylate kinase [uncultured marine group II
MGRPGPQKHAHAARLSEVLAVPYISMGALLRQELNPSSQLYRKIANSVNEGRLVPEDIIFGLLTKRLEDGYNKGENGFILDGIPRTRMQAEILDEIVDVDLVLNFKCADGCFMKKQSRGNICAHCGQLFDVSNSASTNCSPSLGSYTWHSQAEPAGVLGLEASRMERMRTYAEQTKQLEDYYKKQRKIVELKTSARPVETWQGLVAALHLQHLDSPPTPHKLTA

SEQ ID NO: 13368 - DNA, 1906 bp, Zea mays subsp. mays; identical to SEQ ID NO: 1877
  misc_feature (1)..(1906): Ceres Seq. ID no. 13498491
  misc_feature: MA Experiment ID: 108535 Result: Up-regulated in Transcription
  misc_feature: MA Experiment 108535 PARAMETER Experiment Name: Zm_Meristem_P Parameter: Age (day) Value: 8
  misc_feature: MA Experiment 108535 PARAMETER Experiment Name: Zm_Meristem_P Parameter: Organism Value: Zea mays
  misc_feature: MA Experiment 108535 PARAMETER Experiment Name: Zm_Meristem_P Parameter: Plant Line Value: 35A19
  misc_feature: MA Experiment 108535 PARAMETER Experiment Name: Zm_Meristem_P Parameter: Tissue Value: Root Meristem vs. Above Root Meristem
  misc_feature: MA Experiment ID: 108544 Result: Down-regulated in Transcription
  misc_feature: MA Experiment ID: 108556 Result: Down-regulated in Transcription
  misc_feature: MA Experiment 108556 PARAMETER Experiment Name: Zm_Drought_P Parameter: Age (day) Value: 9
  misc_feature: MA Experiment 108556 PARAMETER Experiment Name: Zm_Drought_P Parameter: Organism Value: Zea mays
  misc_feature: MA Experiment 108556 PARAMETER Experiment Name: Zm_Drought_P Parameter: Plant Line Value: 35A19
  misc_feature: MA Experiment 108556 PARAMETER Experiment Name: Zm_Drought_P Parameter: Timepoint (hr) Value: 24
  misc_feature: MA Experiment 108556 PARAMETER Experiment Name: Zm_Drought_P Parameter: Tissue Value: Aerial
  misc_feature: MA Experiment 108556 PARAMETER Experiment Name: Zm_Drought_P Parameter: Treatment Value: Drought vs. No Drought
  misc_feature: MA Experiment ID: 20000487 Result: Up-regulated in Transcription
  misc_feature: MA Experiment 20000487 PARAMETER Experiment Name: Zm_50mM_NH4NO3_L_to_H_P Parameter: Organism Value: Zea mays
  misc_feature: MA Experiment 20000487 PARAMETER Experiment Name: Zm_50mM_NH4NO3_L_to_H_P Parameter: Timepoint (hr) Value: 4
  misc_feature: MA Experiment 20000487 PARAMETER Experiment Name: Zm_50mM_NH4NO3_L_to_H_P Parameter: Tissue Value: Leaves
  misc_feature: MA Experiment 20000487 PARAMETER Experiment Name: Zm_50mM_NH4NO3_L_to_H_P Parameter: Treatment Value: 50mM NH4NO3 vs. 100mM Mannitol

SEQ ID NO: 13369 - protein, 224 aa, Zea mays subsp. mays; identical to SEQ ID NO: 1878
  peptide (1)..(224): Ceres Seq. ID no. 13498492
  misc_feature (64)..(217): Pfam Name: TCP-1/cpn60 chaperonin family Pfam Description: TCP-1/cpn60 chaperonin family
  misc_feature (25)..(217): Homolog of NCBI NO: 1587206 NR Description: T complex protein
  misc_feature (25)..(217): Homolog of NCBI NO: 730919 NR Description: T-COMPLEX PROTEIN 1, EPSILON SUBUNIT
  misc_feature (25)..(217): Homolog of NCBI NO: 1729864 NR Description: T-COMPLEX PROTEIN 1, EPSILON SUBUNIT
  misc_feature (25)..(217): Homolog of NCBI NO: 15221770 NR Description: T-complex protein 1, epsilon subunit/chaperonin
  misc_feature (27)..(217): Homolog of NCBI NO: 27924333 NR Description: Similar to chaperonin containing TCP1, subunit 5
  misc_feature (27)..(217): Homolog of NCBI NO: 603955 NR Description: KIAA0098 protein [Homo sapiens]
  misc_feature (27)..(217): Homolog of NCBI NO: 12804225 NR Description: Unknown (protein for IMAGE:3543711) [Homo sapiens]
  misc_feature (27)..(217): Homolog of NCBI NO: 24307939 NR Description: chaperonin containing TCP1, subunit 5 (epsilon)
  misc_feature (27)..(217): Homolog of NCBI NO: 6683670 NR Description: CCT (chaperonin containing T-complex polypeptide
  misc_feature (27)..(217): Homolog of NCBI NO: 6671702 NR Description: chaperonin subunit 5 (epsilon) [Mus musculus]

SEQ ID NO: 13370 - protein, 200 aa, Zea mays subsp. mays; identical to SEQ ID NO: 1879
  peptide (1)..(200): Ceres Seq. ID no. 13498493
  misc_feature (40)..(193): Pfam Name: TCP-1/cpn60 chaperonin family Pfam Description: TCP-1/cpn60 chaperonin family
  misc_feature (1)..(193): Homolog of NCBI NO: 1587206 NR Description: T complex protein
  misc_feature (1)..(193): Homolog of NCBI NO: 730919 NR Description: T-COMPLEX PROTEIN 1, EPSILON SUBUNIT
  misc_feature (1)..(193): Homolog of NCBI NO: 1729864 NR Description: T-COMPLEX PROTEIN 1, EPSILON SUBUNIT
  misc_feature (1)..(193): Homolog of NCBI NO: 15221770 NR Description: T-complex protein 1, epsilon subunit/chaperonin
  misc_feature (3)..(193): Homolog of NCBI NO: 27924333 NR Description: Similar to chaperonin containing TCP1, subunit 5
  misc_feature (3)..(193): Homolog of NCBI NO: 603955 NR Description: KIAA0098 protein [Homo sapiens]
  misc_feature (3)..(193): Homolog of NCBI NO: 24307939 NR Description: chaperonin containing TCP1, subunit 5 (epsilon)
  misc_feature (3)..(193): Homolog of NCBI NO: 12804225 NR Description: Unknown (protein for IMAGE:3543711) [Homo sapiens]
  misc_feature (3)..(193): Homolog of NCBI NO: 6683670 NR Description: CCT (chaperonin containing T-complex polypeptide
  misc_feature (3)..(193): Homolog of NCBI NO: 6671702 NR Description: chaperonin subunit 5 (epsilon) [Mus musculus]

SEQ ID NO: 13371 - protein, 148 aa, Zea mays subsp. mays; identical to SEQ ID NO: 1880
  peptide (1)..(148): Ceres Seq. ID no. 13498494
  misc_feature (1)..(141): Pfam Name: TCP-1/cpn60 chaperonin family Pfam Description: TCP-1/cpn60 chaperonin family
  misc_feature (1)..(141): Homolog of NCBI NO: 1587206 NR Description: T complex protein
  misc_feature (1)..(141): Homolog of NCBI NO: 730919 NR Description: T-COMPLEX PROTEIN 1, EPSILON SUBUNIT
  misc_feature (1)..(141): Homolog of NCBI NO: 1729864 NR Description: T-COMPLEX PROTEIN 1, EPSILON SUBUNIT
  misc_feature (1)..(141): Homolog of NCBI NO: 15221770 NR Description: T-complex protein 1, epsilon subunit/chaperonin
  misc_feature (1)..(141): Homolog of NCBI NO: 27924333 NR Description: Similar to chaperonin containing TCP1, subunit 5
  misc_feature (1)..(141): Homolog of NCBI NO: 603955 NR Description: KIAA0098 protein [Homo sapiens]
  misc_feature (1)..(141): Homolog of NCBI NO: 24307939 NR Description: chaperonin containing TCP1, subunit 5 (epsilon)
  misc_feature (1)..(141): Homolog of NCBI NO: 12804225 NR Description: Unknown (protein for IMAGE:3543711) [Homo sapiens]
  misc_feature (1)..(141): Homolog of NCBI NO: 6683670 NR Description: CCT (chaperonin containing T-complex polypeptide
  misc_feature (1)..(141): Homolog of NCBI NO: 6671702 NR Description: chaperonin subunit 5 (epsilon) [Mus musculus]

SEQ ID NO: 13372 - DNA, 1704 bp, Zea mays subsp. mays
  misc_feature (1)..(1704): Ceres Seq. ID no. 13492801
  misc_feature: MA Experiment ID: 108523 Result: Down-regulated in Transcription
  misc_feature: MA Experiment 108523 PARAMETER Experiment Name: Zm_42deg_Heat_P Parameter: Age (day) Value: 8
  misc_feature: MA Experiment 108523 PARAMETER Experiment Name: Zm_42deg_Heat_P Parameter: Organism Value: Zea mays
  misc_feature: MA Experiment 108523 PARAMETER Experiment Name: Zm_42deg_Heat_P Parameter: Plant Line Value: 35A19
  misc_feature: MA Experiment 108523 PARAMETER Experiment Name: Zm_42deg_Heat_P Parameter: Temperature (deg C) Value: 42 vs. 22
  misc_feature: MA Experiment 108523 PARAMETER Experiment Name: Zm_42deg_Heat_P Parameter: Timepoint (hr) Value: 6
  misc_feature: MA Experiment 108523 PARAMETER Experiment Name: Zm_42deg_Heat_P Parameter: Tissue Value: Aerial
  misc_feature: MA Experiment ID: 108543 Result: Up-regulated in Transcription
  misc_feature: MA Experiment ID: 108689 Result: Down-regulated in Transcription
  misc_feature: MA Experiment 108689 PARAMETER Experiment Name: Zm_Drought_Roots_P Parameter: Age (day) Value: 9
  misc_feature: MA Experiment 108689 PARAMETER Experiment Name: Zm_Drought_Roots_P Parameter: Organism Value: Zea mays
  misc_feature: MA Experiment 108689 PARAMETER Experiment Name: Zm_Drought_Roots_P Parameter: Plant Line Value: 35A19
  misc_feature: MA Experiment 108689 PARAMETER Experiment Name: Zm_Drought_Roots_P Parameter: Timepoint (hr) Value: 24
  misc_feature: MA Experiment 108689 PARAMETER Experiment Name: Zm_Drought_Roots_P Parameter: Tissue Value: Roots
  misc_feature: MA Experiment 108689 PARAMETER Experiment Name: Zm_Drought_Roots_P Parameter: Treatment Value: Drought vs. No Drought
acaaattagatgggcattcacatcagatcgagtgttttgattactttagtggtggtgattttgataagctatatatagtcaccggctctcaagataaaactgccaagatctgggactgcgagaatgcgggctgtgtccagacactggaaggacatgcaggtcccgttagagctgtctgttaccatcagaatctctcgttattaattacagggtgctctgacggatcaattcatctatggaactccactaccttcaggcttgagcataaactgaactttgctgacttcggattactgagttctgtagcttgtttgaaaggatcgaaaaggattgcaatcagaagcagggaaggattagcacttgtagacatagacatagaggacaagaaggatagcgatgtggagagcatcacgactactgcttccatgaacgacacaggtccaattacagaagagaacggagtggcagcagaccatatctctgatgaccacctggcgcagggcgtagtatatgtacatacagagattataggcaaagtcaattcagcatgcaccatagacgtccatccgacaaagccatggatggtcatcactcaagctaacaagtttgttcatgtttgggactaccatacaaaggtagtggaatggacgattcagattaagggagcgaaagttagttcagctaaatttatagccagccaggattggattgtggcgggtactacccgtggattcctccacgtgtacgattgcgaatcgaggaaggaaatacgccgtctttgtgaacacccgaaatctatcacgtcattggctgttgacgatgatgcccttgagctggtgctgtcagcgtccatcgatggcaagattttgatctggagctactggcactactatcacgcacgtagacgtagtacctggcatttggaaaaaacatttgacgcgggaagccagtgtctgaagcaagtcgcgtttattgctccaagtgtccatcgcagcagcagcactatcatcgctactgctcgagacggaacagtaaagatttgggatcccgatcgttctgacggatgccgtgagttcacattggctgcggattcaggtcagattgttgaatgtttcgattggtttagtcgtggtactgatatatacttggtcaccggttctcgagacaacactgccaagatctgggacatagaggatgggagttgtgtccgaacactggaaggacacgcagatcatgttaccgttgtctgttaccatccggatctttcaatgctcattacaggttcaagggacggctcgattcgtctgtggaactccactaccttcaggtttgagcatgagctgaactttgacctcgggtctctgagttctttagcttgtatcaagggatcaacaaggattgcaatcggatatgaaagaggtctagtactggcagacatttgcactcaggaacatagagcatgatctataaagcggcataataccttgagagcgacagaataaaatctaaacattgataaagcggcaaaaatccctggcaaacatttgctgatgcgatgggattgcatccaaacatttttcttggtaagctaatagactgcaataagtttttccatggacttgggaggtgtcgatctgcggatatgcttttgtatggtttaaacatatcatcggatagaaatttatactactatattaaaaattt

SEQ ID NO: 13373 - protein, 486 aa, Zea mays subsp. mays
  peptide (1)..(486): Ceres Seq. ID no. 13492802
  misc_feature (184)..(479): Homolog of NCBI NO: 15218215 NR Description: coatomer protein complex, subunit beta 2 (beta putative [Arabidopsis thaliana] >gi|25312791|pir||G96563 probable
  misc_feature (184)..(479): Homolog of NCBI NO: 9294445 NR Description: coatomer protein complex, beta prime; beta'-COP
  misc_feature (184)..(479): Homolog of NCBI NO: 30683862 NR Description: coatomer protein complex, subunit beta 2 (beta putative [Arabidopsis thaliana] >gi|21539583|gb|AAM53344.1| coatomer complex subunit [Arabidopsis thaliana]
  misc_feature (184)..(479): Homolog of NCBI NO: 30683865 NR Description: coatomer protein complex, subunit beta 2 (beta putative [Arabidopsis thaliana] >gi|30683868|ref|NP_850593.1| protein complex, subunit beta 2 (beta prime), putative
  misc_feature (184)..(479): Homolog of NCBI NO: 12324597 NR Description: putative coatomer protein complex, subunit beta 2
  misc_feature (184)..(479): Homolog of NCBI NO: 30699476 NR Description: coatomer protein complex, subunit beta 2 (beta putative [Arabidopsis thaliana] >gi|25312792|pir||C96831
  misc_feature (171)..(483): Homolog of NCBI NO: 3287963 NR Description: PROBABLE COATOMER BETA' SUBUNIT (BETA'-COAT
  misc_feature (171)..(483): Homolog of NCBI NO: 39586361 NR Description: Hypothetical protein CBG21666 [Caenorhabditis
  misc_feature (184)..(483): Homolog of NCBI NO: 486784 NR Description: Golgi-associated particle 102K chain - human
  misc_feature (184)..(483): Homolog of NCBI NO: 4758032 NR Description: coatomer protein complex, subunit beta 2 (beta
KLDGHSHQIECFDYFSGGDFDKLYIVTGSQDKTAKIWDCENAGCVQTLEGHAGPVRAVCYHQNLSLLITGCSDGSIHLWNSTTFRLEHKLNFADFGLLSSVACLKGSKRIAIRSREGLALVDIDIEDKKDSDVESITTTASMNDTGPITEENGVAADHISDDHLAQGVVYVHTEIIGKVNSACTIDVHPTKPWMVITQANKFVHVWDYHTKVVEWTIQIKGAKVSSAKFIASQDWIVAGTTRGFLHVYDCESRKEIRRLCEHPKSITSLAVDDDALELVLSASIDGKILIWSYWHYYHARRRSTWHLEKTFDAGSQCLKQVAFIAPSVHRSSSTIIATARDGTVKIWDPDRSDGCREFTLAADSGQIVECFDWFSRGTDIYLVTGSRDNTAKIWDIEDGSCVRTLEGHADHVTVVCYHPDLSMLITGSRDGSIRLWNSTTFRFEHELNFDLGSLSSLACIKGSTRIAIGYERGLVLADICTQEHRA

SEQ ID NO: 13374 - protein, 345 aa, Zea mays subsp. mays
  peptide (1)..(345): Ceres Seq. ID no. 13492803
  misc_feature (43)..(338): Homolog of NCBI NO: 15218215 NR Description: coatomer protein complex, subunit beta 2 (beta putative [Arabidopsis thaliana] >gi|25312791|pir||G96563 probable
  misc_feature (43)..(338): Homolog of NCBI NO: 9294445 NR Description: coatomer protein complex, beta prime; beta'-COP
  misc_feature (43)..(338): Homolog of NCBI NO: 30683862 NR Description: coatomer protein complex, subunit beta 2 (beta putative [Arabidopsis thaliana] >gi|21539583|gb|AAM53344.1| coatomer complex subunit [Arabidopsis thaliana]
  misc_feature (43)..(338): Homolog of NCBI NO: 30683865 NR Description: coatomer protein complex, subunit beta 2 (beta putative [Arabidopsis thaliana] >gi|30683868|ref|NP_850593.1| protein complex, subunit beta 2 (beta prime), putative
  misc_feature (43)..(338): Homolog of NCBI NO: 12324597 NR Description: putative coatomer protein complex, subunit beta 2
  misc_feature (43)..(338): Homolog of NCBI NO: 30699476 NR Description: coatomer protein complex, subunit beta 2 (beta putative [Arabidopsis thaliana] >gi|25312792|pir||C96831
  misc_feature (30)..(342): Homolog of NCBI NO: 3287963 NR Description: PROBABLE COATOMER BETA' SUBUNIT (BETA'-COAT
  misc_feature (30)..(342): Homolog of NCBI NO: 39586361 NR Description: Hypothetical protein CBG21666 [Caenorhabditis
  misc_feature (43)..(342): Homolog of NCBI NO: 486784 NR Description: Golgi-associated particle 102K chain - human
  misc_feature (43)..(342): Homolog of NCBI NO: 4758032 NR Description: coatomer protein complex, subunit beta 2 (beta
MNDTGPITEENGVAADHISDDHLAQGVVYVHTEIIGKVNSACTIDVHPTKPWMVITQANKFVHVWDYHTKVVEWTIQIKGAKVSSAKFIASQDWIVAGTTRGFLHVYDCESRKEIRRLCEHPKSITSLAVDDDALELVLSASIDGKILIWSYWHYYHARRRSTWHLEKTFDAGSQCLKQVAFIAPSVHRSSSTIIATARDGTVKIWDPDRSDGCREFTLAADSGQIVECFDWFSRGTDIYLVTGSRDNTAKIWDIEDGSCVRTLEGHADHVTVVCYHPDLSMLITGSRDGSIRLWNSTTFRFEHELNFDLGSLSSLACIKGSTRIAIGYERGLVLADICTQEHRA

SEQ ID NO: 13375 - protein, 293 aa, Zea mays subsp. mays
  peptide (1)..(293): Ceres Seq. ID no. 13492804
  misc_feature (1)..(286): Homolog of NCBI NO: 15218215 NR Description: coatomer protein complex, subunit beta 2 (beta putative [Arabidopsis thaliana] >gi|25312791|pir||G96563 probable
  misc_feature (1)..(286): Homolog of NCBI NO: 9294445 NR Description: coatomer protein complex, beta prime; beta'-COP
  misc_feature (1)..(286): Homolog of NCBI NO: 30683862 NR Description: coatomer protein complex, subunit beta 2 (beta putative [Arabidopsis thaliana] >gi|21539583|gb|AAM53344.1| coatomer complex subunit [Arabidopsis thaliana]
  misc_feature (1)..(286): Homolog of NCBI NO: 30683865 NR Description: coatomer protein complex, subunit beta 2 (beta putative [Arabidopsis thaliana] >gi|30683868|ref|NP_850593.1| protein complex, subunit beta 2 (beta prime), putative
  misc_feature (1)..(286): Homolog of NCBI NO: 12324597 NR Description: putative coatomer protein complex, subunit beta 2
  misc_feature (1)..(286): Homolog of NCBI NO: 30699476 NR Description: coatomer protein complex, subunit beta 2 (beta putative [Arabidopsis thaliana] >gi|25312792|pir||C96831
  misc_feature (1)..(290): Homolog of NCBI NO: 3287963 NR Description: PROBABLE COATOMER BETA' SUBUNIT (BETA'-COAT
  misc_feature (1)..(290): Homolog of NCBI NO: 39586361 NR Description: Hypothetical protein CBG21666 [Caenorhabditis
  misc_feature (1)..(290): Homolog of NCBI NO: 486784 NR Description: Golgi-associated particle 102K chain - human
  misc_feature (1)..(290): Homolog of NCBI NO: 27805865 NR Description: coatomer protein complex, subunit beta 2 (beta
MVITQANKFVHVWDYHTKVVEWTIQIKGAKVSSAKFIASQDWIVAGTTRGFLHVYDCESRKEIRRLCEHPKSITSLAVDDDALELVLSASIDGKILIWSYWHYYHARRRSTWHLEKTFDAGSQCLKQVAFIAPSVHRSSSTIIATARDGTVKIWDPDRSDGCREFTLAADSGQIVECFDWFSRGTDIYLVTGSRDNTAKIWDIEDGSCVRTLEGHADHVTVVCYHPDLSMLITGSRDGSIRLWNSTTFRFEHELNFDLGSLSSLACIKGSTRIAIGYERGLVLADICTQEHRA

SEQ ID NO: 13376 - DNA, 1097 bp, Zea mays subsp. mays; identical to SEQ ID NO: 3807
  misc_feature (1)..(1097): Ceres Seq. ID no. 13494437
  misc_feature: MA Experiment ID: 108504 Result: Up-regulated in Transcription
  misc_feature: MA Experiment 108504 PARAMETER Experiment Name: Zm_Drought_P Parameter: Age (day) Value: 8
  misc_feature: MA Experiment 108504 PARAMETER Experiment Name: Zm_Drought_P Parameter: Organism Value: Zea mays
  misc_feature: MA Experiment 108504 PARAMETER Experiment Name: Zm_Drought_P Parameter: Plant Line Value: 35A19
  misc_feature: MA Experiment 108504 PARAMETER Experiment Name: Zm_Drought_P Parameter: Timepoint (hr) Value: 12
  misc_feature: MA Experiment 108504 PARAMETER Experiment Name: Zm_Drought_P Parameter: Tissue Value: Aerial
  misc_feature: MA Experiment 108504 PARAMETER Experiment Name: Zm_Drought_P Parameter: Treatment Value: Drought vs. No Drought
  misc_feature: MA Experiment ID: 108513 Result: Up-regulated in Transcription
  misc_feature: MA Experiment 108513 PARAMETER Experiment Name: Zm_100uM_ABA_P Parameter: Age (day) Value: 8
  misc_feature: MA Experiment 108513 PARAMETER Experiment Name: Zm_100uM_ABA_P Parameter: Organism Value: Zea mays
  misc_feature: MA Experiment 108513 PARAMETER Experiment Name: Zm_100uM_ABA_P Parameter: Plant Line Value: 35A19
  misc_feature: MA Experiment 108513 PARAMETER Experiment Name: Zm_100uM_ABA_P Parameter: Timepoint (hr) Value: 6
  misc_feature: MA Experiment 108513 PARAMETER Experiment Name: Zm_100uM_ABA_P Parameter: Tissue Value: Aerial
  misc_feature: MA Experiment 108513 PARAMETER Experiment Name: Zm_100uM_ABA_P Parameter: Treatment Value: 100uM ABA vs. No Treatment
  misc_feature: MA Experiment ID: 108522 Result: Up-regulated in Transcription
  misc_feature: MA Experiment 108522 PARAMETER Experiment Name: Zm_42deg_Heat_P Parameter: Age (day) Value: 8
  misc_feature: MA Experiment 108522 PARAMETER Experiment Name: Zm_42deg_Heat_P Parameter: Organism Value: Zea mays
  misc_feature: MA Experiment 108522 PARAMETER Experiment Name: Zm_42deg_Heat_P Parameter: Plant Line Value: 35A19
  misc_feature: MA Experiment 108522 PARAMETER Experiment Name: Zm_42deg_Heat_P Parameter: Temperature (deg C) Value: 42 vs. 22
  misc_feature: MA Experiment 108522 PARAMETER Experiment Name: Zm_42deg_Heat_P Parameter: Timepoint (hr) Value: 1
  misc_feature: MA Experiment 108522 PARAMETER Experiment Name: Zm_42deg_Heat_P Parameter: Tissue Value: Aerial
  misc_feature: MA Experiment ID: 108523 Result: Up-regulated in Transcription
  misc_feature: MA Experiment 108523 PARAMETER Experiment Name: Zm_42deg_Heat_P Parameter: Age (day) Value: 8
  misc_feature: MA Experiment 108523 PARAMETER Experiment Name: Zm_42deg_Heat_P Parameter: Organism Value: Zea mays
  misc_feature: MA Experiment 108523 PARAMETER Experiment Name: Zm_42deg_Heat_P Parameter: Plant Line Value: 35A19
  misc_feature: MA Experiment 108523 PARAMETER Experiment Name: Zm_42deg_Heat_P Parameter: Temperature (deg C) Value: 42 vs. 22
  misc_feature: MA Experiment 108523 PARAMETER Experiment Name: Zm_42deg_Heat_P Parameter: Timepoint (hr) Value: 6
  misc_feature: MA Experiment 108523 PARAMETER Experiment Name: Zm_42deg_Heat_P Parameter: Tissue Value: Aerial
  misc_feature: MA Experiment ID: 108532 Result: Up-regulated in Transcription
  misc_feature: MA Experiment 108532 PARAMETER Experiment Name: Zm_20uM_KNO3_H-to-L_P Parameter: Age (day) Value: 11
  misc_feature: MA Experiment 108532 PARAMETER Experiment Name: Zm_20uM_KNO3_H-to-L_P Parameter: Organism Value: Zea mays
  misc_feature: MA Experiment 108532 PARAMETER Experiment Name: Zm_20uM_KNO3_H-to-L_P Parameter: Plant Line Value: 35A19
  misc_feature: MA Experiment 108532 PARAMETER Experiment Name: Zm_20uM_KNO3_H-to-L_P Parameter: Timepoint (hr) Value: 16
  misc_feature: MA Experiment 108532 PARAMETER Experiment Name: Zm_20uM_KNO3_H-to-L_P Parameter: Tissue Value: Roots
  misc_feature: MA Experiment 108532 PARAMETER Experiment Name: Zm_20uM_KNO3_H-to-L_P Parameter: Treatment Value: 20uM KNO3 vs. 60mM KNO3
  misc_feature: MA Experiment ID: 108534 Result: Down-regulated in Transcription
  misc_feature: MA Experiment 108534 PARAMETER Experiment Name: Zm_4deg_Cold_P Parameter: Age (hr) Value: 8
  misc_feature: MA Experiment 108534 PARAMETER Experiment Name: Zm_4deg_Cold_P Parameter: Organism Value: Zea mays
  misc_feature: MA Experiment 108534 PARAMETER Experiment Name: Zm_4deg_Cold_P Parameter: Plant Line Value: 35A19
  misc_feature: MA Experiment 108534 PARAMETER Experiment Name: Zm_4deg_Cold_P Parameter: Temperature (deg C) Value: 4 vs. 22
  misc_feature: MA Experiment 108534 PARAMETER Experiment Name: Zm_4deg_Cold_P Parameter: Timepoint (hr) Value: 6
  misc_feature: MA Experiment 108534 PARAMETER Experiment Name: Zm_4deg_Cold_P Parameter: Tissue Value: Aerial
  misc_feature: MA Experiment ID: 108540 Result: Up-regulated in Transcription
  misc_feature: MA Experiment 108540 PARAMETER Experiment Name: Zm_20percent_PEG_P Parameter: Age (day) Value: 8
  misc_feature: MA Experiment 108540 PARAMETER Experiment Name: Zm_20percent_PEG_P Parameter: Organism Value: Zea mays
  misc_feature: MA Experiment 108540 PARAMETER Experiment Name: Zm_20percent_PEG_P Parameter: Plant Line Value: 35A19
  misc_feature: MA Experiment 108540 PARAMETER Experiment Name: Zm_20percent_PEG_P Parameter: Timepoint (hr) Value: 6
  misc_feature: MA Experiment 108540 PARAMETER Experiment Name: Zm_20percent_PEG_P Parameter: Tissue Value: Aerial
  misc_feature: MA Experiment 108540 PARAMETER Experiment Name: Zm_20percent_PEG_P Parameter: Treatment Value: 20percent PEG vs. No Treatment
  misc_feature: MA Experiment ID: 108543 Result: Up-regulated in Transcription
  misc_feature: MA Experiment ID: 108544 Result: Up-regulated in Transcription
  misc_feature: MA Experiment ID: 108548 Result: Up-regulated in Transcription
  misc_feature: MA Experiment 108548 PARAMETER Experiment Name: Zm_20uM_KNO3_H-to-L_P Parameter: Age (day) Value: 11
  misc_feature: MA Experiment 108548 PARAMETER Experiment Name: Zm_20uM_KNO3_H-to-L_P Parameter: Organism Value: Zea mays
  misc_feature: MA Experiment 108548 PARAMETER Experiment Name: Zm_20uM_KNO3_H-to-L_P Parameter: Plant Line Value: 35A19
  misc_feature: MA Experiment 108548 PARAMETER Experiment Name: Zm_20uM_KNO3_H-to-L_P Parameter: Timepoint (hr) Value: 4
  misc_feature: MA Experiment 108548 PARAMETER Experiment Name: Zm_20uM_KNO3_H-to-L_P Parameter: Tissue Value: Roots
  misc_feature: MA Experiment 108548 PARAMETER Experiment Name: Zm_20uM_KNO3_H-to-L_P Parameter: Treatment Value: 20uM KNO3 vs. 60mM KNO3
  misc_feature: MA Experiment ID: 108689 Result: Up-regulated in Transcription
  misc_feature: MA Experiment 108689 PARAMETER Experiment Name: Zm_Drought_Roots_P Parameter: Age (day) Value: 9
  misc_feature: MA Experiment 108689 PARAMETER Experiment Name: Zm_Drought_Roots_P Parameter: Organism Value: Zea mays
  misc_feature: MA Experiment 108689 PARAMETER Experiment Name: Zm_Drought_Roots_P Parameter: Plant Line Value: 35A19
  misc_feature: MA Experiment 108689 PARAMETER Experiment Name: Zm_Drought_Roots_P Parameter: Timepoint (hr) Value: 24
  misc_feature: MA Experiment 108689 PARAMETER Experiment Name: Zm_Drought_Roots_P Parameter: Tissue Value: Roots
  misc_feature: MA Experiment 108689 PARAMETER Experiment Name: Zm_Drought_Roots_P Parameter: Treatment Value: Drought vs. No Drought
  misc_feature: MA Experiment ID: 20000480 Result: Up-regulated in Transcription
  misc_feature: MA Experiment 20000480 PARAMETER Experiment Name: Zm_Drought_P Parameter: Age (day) Value: 11
  misc_feature: MA Experiment 20000480 PARAMETER Experiment Name: Zm_Drought_P Parameter: Organism Value: Zea mays
  misc_feature: MA Experiment 20000480 PARAMETER Experiment Name: Zm_Drought_P Parameter: Plant Line Value: 35A19
  misc_feature: MA Experiment 20000480 PARAMETER Experiment Name: Zm_Drought_P Parameter: Timepoint (hr) Value: 72
  misc_feature: MA Experiment 20000480 PARAMETER Experiment Name: Zm_Drought_P Parameter: Tissue Value: Aerial
  misc_feature: MA Experiment 20000480 PARAMETER Experiment Name: Zm_Drought_P Parameter: Treatment Value: Drought vs. No Drought
  misc_feature: MA Experiment ID: 20000487 Result: Down-regulated in Transcription
  misc_feature: MA Experiment 20000487 PARAMETER Experiment Name: Zm_50mM_NH4NO3_L_to_H_P Parameter: Organism Value: Zea mays
  misc_feature: MA Experiment 20000487 PARAMETER Experiment Name: Zm_50mM_NH4NO3_L_to_H_P Parameter: Timepoint (hr) Value: 4
  misc_feature: MA Experiment 20000487 PARAMETER Experiment Name: Zm_50mM_NH4NO3_L_to_H_P Parameter: Tissue Value: Leaves
  misc_feature: MA Experiment 20000487 PARAMETER Experiment Name: Zm_50mM_NH4NO3_L_to_H_P Parameter: Treatment Value: 50mM NH4NO3 vs. 100mM Mannitol
  misc_feature: MA Experiment ID: 20000535 Result: Up-regulated in Transcription
  misc_feature: MA Experiment 20000535 PARAMETER Experiment Name: Zm_Hybrid_Seed_Dev_P Parameter: DAP Value: 30 vs. 12
  misc_feature: MA Experiment 20000535 PARAMETER Experiment Name: Zm_Hybrid_Seed_Dev_P Parameter: Organism Value: Zea mays
  misc_feature: MA Experiment 20000535 PARAMETER Experiment Name: Zm_Hybrid_Seed_Dev_P Parameter: Plant Line Value: 35A19
  misc_feature: MA Experiment 20000535 PARAMETER Experiment Name: Zm_Hybrid_Seed_Dev_P Parameter: Tissue Value: Embryo vs. Unfert Floret
  misc_feature: MA Experiment ID: 20000626 Result: Up-regulated in Transcription
  misc_feature: MA Experiment 20000626 PARAMETER Experiment Name: Zm_Herbicide-Treatments_P Parameter: Timepoint (hr) Value: 12
  misc_feature: MA Experiment 20000626 PARAMETER Experiment Name: Zm_Herbicide-Treatments_P Parameter: Tissue Value: Aerial
  misc_feature: MA Experiment 20000626 PARAMETER Experiment Name: Zm_Herbicide-Treatments_P Parameter: Treatment Value: Roundup vs. No Treatment
  misc_feature: MA Experiment ID: 20001606 Result: Down-regulated in Transcription
  misc_feature: MA Experiment 20001606 PARAMETER Experiment Name: Zm_50ppm_KNO3_L-to-H_P Parameter: Age (day) Value: 19
  misc_feature: MA Experiment 20001606 PARAMETER Experiment Name: Zm_50ppm_KNO3_L-to-H_P Parameter: Organism Value: Zea mays
  misc_feature: MA Experiment 20001606 PARAMETER Experiment Name: Zm_50ppm_KNO3_L-to-H_P Parameter: Plant Line Value: 35A19
  misc_feature: MA Experiment 20001606 PARAMETER Experiment Name: Zm_50ppm_KNO3_L-to-H_P Parameter: Timepoint (hr) Value: 8
  misc_feature: MA Experiment 20001606 PARAMETER Experiment Name: Zm_50ppm_KNO3_L-to-H_P Parameter: Tissue Value: Shoots
  misc_feature: MA Experiment 20001606 PARAMETER Experiment Name: Zm_50ppm_KNO3_L-to-H_P Parameter: Treatment Value: 50ppm KNO3 vs. 50ppm KCl
  misc_feature: MA Experiment ID: 20001608 Result: Down-regulated in Transcription
  misc_feature: MA Experiment 20001608 PARAMETER Experiment Name: Zm_50ppm_KNO3_L-to-H_P Parameter: Age (day) Value: 21
  misc_feature: MA Experiment 20001608 PARAMETER Experiment Name: Zm_50ppm_KNO3_L-to-H_P Parameter: Organism Value: Zea mays
  misc_feature: MA Experiment 20001608 PARAMETER Experiment Name: Zm_50ppm_KNO3_L-to-H_P Parameter: Plant Line Value: 35A19
  misc_feature: MA Experiment 20001608 PARAMETER Experiment Name: Zm_50ppm_KNO3_L-to-H_P Parameter: Timepoint (hr) Value: 48
  misc_feature: MA Experiment 20001608 PARAMETER Experiment Name: Zm_50ppm_KNO3_L-to-H_P Parameter: Tissue Value: Shoots
  misc_feature: MA Experiment 20001608 PARAMETER Experiment Name: Zm_50ppm_KNO3_L-to-H_P Parameter: Treatment Value: 50ppm KNO3 vs. 50ppm KCl

SEQ ID NO: 13377 - protein, 225 aa, Zea mays subsp. mays; identical to SEQ ID NO: 3808
  peptide (1)..(225): Ceres Seq. ID no. 13494438
  misc_feature (70)..(141): Pfam Name: linker histone H1 and H5 family Pfam Description: linker histone H1 and H5 family
  misc_feature (70)..(141): Pfam Name: linker histone H1 and H5 family Pfam Description: linker histone H1 and H5 family
  misc_feature (70)..(141): Pfam Name: linker histone H1 and H5 family Pfam Description: linker histone H1 and H5 family
  misc_feature (1)..(225): Homolog of NCBI NO: 6006363 NR Description: ESTs AU078183(C62904),C73912(E21020) correspond a region of the predicted gene.~Similar to water stress inducible
  misc_feature (26)..(220): Homolog of NCBI NO: 7439658 NR Description: histone H1, stress-inducible - tomato
  misc_feature (27)..(220): Homolog of NCBI NO: 23506611 NR Description: histone H1D [Nicotiana tabacum]
  misc_feature (22)..(220): Homolog of NCBI NO: 7595978 NR Description: histone H1 variant [Lycopersicon chilense]
  misc_feature (21)..(220): Homolog of NCBI NO: 27529850 NR Description: stress-inducible H1 histone-like protein
  misc_feature (26)..(220): Homolog of NCBI NO: 7439658 NR Description: histone H1, stress-inducible - tomato
  misc_feature (22)..(220): Homolog of NCBI NO: 7595978 NR Description: histone H1 variant [Lycopersicon chilense]
  misc_feature (27)..(220): Homolog of NCBI NO: 23506611 NR Description: histone H1D [Nicotiana tabacum]
  misc_feature (26)..(220): Homolog of NCBI NO: 7439658 NR Description: histone H1, stress-inducible - tomato
  misc_feature (1)..(225): Homolog of NCBI NO: 6006363 NR Description: ESTs AU078183(C62904),C73912(E21020) correspond a region of the predicted gene.~Similar to water stress inducible
  misc_feature (15)..(225): Homolog of NCBI NO: 13540391 NR Description: histone H1 [Pisum sativum]
  misc_feature (1)..(225): Homolog of NCBI NO: 2623960 NR Description: histone H1 [Apium graveolens]
  misc_feature (77)..(215): Homolog of NCBI NO: 7489483 NR Description: histone H1 homolog - rice
  misc_feature (27)..(220): Homolog of NCBI NO: 5726575 NR Description: histone H1C [Nicotiana tabacum]
  misc_feature (27)..(220): Homolog of NCBI NO: 729668 NR Description: Histone H1 >gi|2147479|pir||S65059 histone H1,
  misc_feature (21)..(220): Homolog of NCBI NO: 27529850 NR Description: stress-inducible H1 histone-like protein
  misc_feature (15)..(225): Homolog of NCBI NO: 13540391 NR Description: histone H1 [Pisum sativum]
  misc_feature (1)..(225): Homolog of NCBI NO: 2623960 NR Description: histone H1 [Apium graveolens]
  misc_feature (77)..(215): Homolog of NCBI NO: 7489483 NR Description: histone H1 homolog - rice
  misc_feature (27)..(220): Homolog of NCBI NO: 5726575 NR Description: histone H1C [Nicotiana tabacum]
  misc_feature (27)..(220): Homolog of NCBI NO: 729668 NR Description: Histone H1 >gi|2147479|pir||S65059 histone H1,
  misc_feature (21)..(220): Homolog of NCBI NO: 27529850 NR Description: stress-inducible H1 histone-like protein
  misc_feature (22)..(220): Homolog of NCBI NO: 7595978 NR Description: histone H1 variant [Lycopersicon chilense]
  misc_feature (27)..(220): Homolog of NCBI NO: 23506611 NR Description: histone H1D [Nicotiana tabacum]
  misc_feature (1)..(225): Homolog of NCBI NO: 6006363 NR Description: ESTs AU078183(C62904),C73912(E21020) correspond a region of the predicted gene.~Similar to water stress inducible
  misc_feature (27)..(220): Homolog of NCBI NO: 729668 NR Description: Histone H1 >gi|2147479|pir||S65059 histone H1,
  misc_feature (27)..(220): Homolog of NCBI NO: 5726575 NR Description: histone H1C [Nicotiana tabacum]
  misc_feature (77)..(215): Homolog of NCBI NO: 7489483 NR Description: histone H1 homolog - rice
  misc_feature (1)..(225): Homolog of NCBI NO: 2623960 NR Description: histone H1 [Apium graveolens]
  misc_feature (15)..(225): Homolog of NCBI NO: 13540391 NR Description: histone H1 [Pisum sativum]

SEQ ID NO: 13378 - protein, 149 aa, Zea mays subsp. mays; identical to SEQ ID NO: 3809
  peptide (1)..(149): Ceres Seq. ID no. 13494439
  misc_feature (1)..(65): Pfam Name: linker histone H1 and H5 family Pfam Description: linker histone H1 and H5 family
  misc_feature (1)..(65): Pfam Name: linker histone H1 and H5 family Pfam Description: linker histone H1 and H5 family
  misc_feature (1)..(65): Pfam Name: linker histone H1 and H5 family Pfam Description: linker histone H1 and H5 family
  misc_feature (1)..(149): Homolog of NCBI NO: 6006363 NR Description: ESTs AU078183(C62904),C73912(E21020) correspond a region of the predicted gene.~Similar to water stress inducible
  misc_feature (1)..(144): Homolog of NCBI NO: 7439658 NR Description: histone H1, stress-inducible - tomato
  misc_feature (1)..(144): Homolog of NCBI NO: 23506611 NR Description: histone H1D [Nicotiana tabacum]
  misc_feature (1)..(144): Homolog of NCBI NO: 7595978 NR Description: histone H1 variant [Lycopersicon chilense]
  misc_feature (1)..(144): Homolog of NCBI NO: 27529850 NR Description: stress-inducible H1 histone-like protein
  misc_feature (1)..(144): Homolog of NCBI NO: 7439658 NR Description: histone H1, stress-inducible - tomato
  misc_feature (1)..(144): Homolog of NCBI NO: 7595978 NR Description: histone H1 variant [Lycopersicon chilense]
  misc_feature (1)..(144): Homolog of NCBI NO: 23506611 NR Description: histone H1D [Nicotiana tabacum]
  misc_feature (1)..(144): Homolog of NCBI NO: 7439658 NR Description: histone H1, stress-inducible - tomato
  misc_feature (1)..(149): Homolog of NCBI NO: 6006363 NR Description: ESTs AU078183(C62904),C73912(E21020) correspond a region of the predicted gene.~Similar to water stress inducible
  misc_feature (1)..(149): Homolog of NCBI NO: 13540391 NR Description: histone H1 [Pisum sativum]
  misc_feature (1)..(149): Homolog of NCBI NO: 2623960 NR Description: histone H1 [Apium graveolens]
  misc_feature (1)..(139): Homolog of NCBI NO: 7489483 NR Description: histone H1 homolog - rice
  misc_feature (1)..(144): Homolog of NCBI NO: 5726575 NR Description: histone H1C [Nicotiana tabacum]
  misc_feature (1)..(144): Homolog of NCBI NO: 729668 NR Description: Histone H1 >gi|2147479|pir||S65059 histone H1,
  misc_feature (1)..(144): Homolog of NCBI NO: 27529850 NR Description: stress-inducible H1 histone-like protein
  misc_feature (1)..(149): Homolog of NCBI NO: 13540391 NR Description: histone H1 [Pisum sativum]
  misc_feature (1)..(149): Homolog of NCBI NO: 2623960 NR Description: histone H1 [Apium graveolens]
  misc_feature (1)..(139): Homolog of NCBI NO: 7489483 NR Description: histone H1 homolog - rice
  misc_feature (1)..(144): Homolog of NCBI NO: 5726575 NR Description: histone H1C [Nicotiana tabacum]
  misc_feature (1)..(144): Homolog of NCBI NO: 729668 NR Description: Histone H1 >gi|2147479|pir||S65059 histone H1,
  misc_feature (1)..(144): Homolog of NCBI NO: 27529850 NR Description: stress-inducible H1 histone-like protein
  misc_feature (1)..(144): Homolog of NCBI NO: 7595978 NR Description: histone H1 variant [Lycopersicon chilense]
  misc_feature (1)..(144): Homolog of NCBI NO: 23506611 NR Description: histone H1D [Nicotiana tabacum]
  misc_feature (1)..(149): Homolog of NCBI NO: 6006363 NR Description: ESTs AU078183(C62904),C73912(E21020) correspond a region of the predicted gene.~Similar to water stress inducible
  misc_feature (1)..(144): Homolog of NCBI NO: 729668 NR Description: Histone H1 >gi|2147479|pir||S65059 histone H1,
  misc_feature (1)..(144): Homolog of NCBI NO: 5726575 NR Description: histone H1C [Nicotiana tabacum]
  misc_feature (1)..(139): Homolog of NCBI NO: 7489483 NR Description: histone H1 homolog - rice
  misc_feature (1)..(149): Homolog of NCBI NO: 2623960 NR Description: histone H1 [Apium graveolens]
  misc_feature (1)..(149): Homolog of NCBI NO: 13540391 NR Description: histone H1 [Pisum sativum]

SEQ ID NO: 13379 - protein, 125 aa, Zea mays subsp. mays; identical to SEQ ID NO: 3810
  peptide (1)..(125): Ceres Seq. ID no. 13494440
  misc_feature (1)..(125): Homolog of NCBI NO: 6006363 NR Description: ESTs AU078183(C62904),C73912(E21020) correspond a region of the predicted gene.~Similar to water stress inducible
  misc_feature (1)..(120): Homolog of NCBI NO: 7439658 NR Description: histone H1, stress-inducible - tomato
  misc_feature (1)..(120): Homolog of NCBI NO: 23506611 NR Description: histone H1D [Nicotiana tabacum]
  misc_feature (1)..(120): Homolog of NCBI NO: 7595978 NR Description: histone H1 variant [Lycopersicon chilense]
  misc_feature (1)..(120): Homolog of NCBI NO: 27529850 NR Description: stress-inducible H1 histone-like protein
  misc_feature (1)..(120): Homolog of NCBI NO: 729668 NR Description: Histone H1 >gi|2147479|pir||S65059 histone H1,
  misc_feature (1)..(120): Homolog of NCBI NO: 5726575 NR Description: histone H1C [Nicotiana tabacum]
  misc_feature (1)..(115): Homolog of NCBI NO: 7489483 NR Description: histone H1 homolog - rice
  misc_feature (1)..(125): Homolog of NCBI NO: 2623960 NR Description: histone H1 [Apium graveolens]
  misc_feature (1)..(125): Homolog of NCBI NO: 13540391 NR Description: histone H1 [Pisum sativum]
  misc_feature (1)..(125): Homolog of NCBI NO: 6006363 NR Description: ESTs AU078183(C62904),C73912(E21020) correspond a region of the predicted gene.~Similar to water stress inducible
  misc_feature (1)..(120): Homolog of NCBI NO: 7439658 NR Description: histone H1, stress-inducible - tomato
  misc_feature (1)..(120): Homolog of NCBI NO: 23506611 NR Description: histone H1D [Nicotiana tabacum]
  misc_feature (1)..(120): Homolog of NCBI NO: 7595978 NR Description: histone H1 variant [Lycopersicon chilense]
  misc_feature (1)..(120): Homolog of NCBI NO: 27529850 NR Description: stress-inducible H1 histone-like protein
  misc_feature (1)..(120): Homolog of NCBI NO: 729668 NR Description: Histone H1 >gi|2147479|pir||S65059 histone H1,
  misc_feature (1)..(120): Homolog of NCBI NO: 5726575 NR Description: histone H1C [Nicotiana tabacum]
  misc_feature (1)..(115): Homolog of NCBI NO: 7489483 NR Description: histone H1 homolog - rice
  misc_feature (1)..(125): Homolog of NCBI NO: 2623960 NR Description: histone H1 [Apium graveolens]
  misc_feature (1)..(125): Homolog of NCBI NO: 13540391 NR Description: histone H1 [Pisum sativum]
  misc_feature (1)..(120): Homolog of NCBI NO: 23506611 NR Description: histone H1D [Nicotiana tabacum]
  misc_feature (1)..(120): Homolog of NCBI NO: 7595978 NR Description: histone H1 variant [Lycopersicon chilense]
  misc_feature (1)..(120): Homolog of NCBI NO: 27529850 NR Description: stress-inducible H1 histone-like protein
  misc_feature (1)..(120): Homolog of NCBI NO: 729668 NR Description: Histone H1 >gi|2147479|pir||S65059 histone H1,
  misc_feature (1)..(120): Homolog of NCBI NO: 5726575 NR Description: histone H1C [Nicotiana tabacum]
  misc_feature (1)..(115): Homolog of NCBI NO: 7489483 NR Description: histone H1 homolog - rice
  misc_feature (1)..(125): Homolog of NCBI NO: 2623960 NR Description: histone H1 [Apium graveolens]
  misc_feature (1)..(125): Homolog of NCBI NO: 13540391 NR Description: histone H1 [Pisum sativum]
  misc_feature (1)..(125): Homolog of NCBI NO: 6006363 NR Description: ESTs AU078183(C62904),C73912(E21020) correspond a region of the predicted gene.~Similar to water stress inducible
  misc_feature (1)..(120): Homolog of NCBI NO: 7439658 NR Description: histone H1, stress-inducible - tomato

SEQ ID NO: 13380 - DNA, 2056 bp, Zea mays subsp. mays
  misc_feature (1)..(2056): Ceres Seq. ID no. 12367419
  misc_feature: MA Experiment ID: 108535 Result: Up-regulated in Transcription
  misc_feature: MA Experiment 108535 PARAMETER Experiment Name: Zm_Meristem_P Parameter: Age (day) Value: 8
  misc_feature: MA Experiment 108535 PARAMETER Experiment Name: Zm_Meristem_P Parameter: Organism Value: Zea mays
  misc_feature: MA Experiment 108535 PARAMETER Experiment Name: Zm_Meristem_P Parameter: Plant Line Value: 35A19
  misc_feature: MA Experiment 108535 PARAMETER Experiment Name: Zm_Meristem_P Parameter: Tissue Value: Root Meristem vs. Above Root Meristem
  misc_feature: MA Experiment ID: 108544 Result: Down-regulated in Transcription
  misc_feature: MA Experiment ID: 108556 Result: Down-regulated in Transcription
  misc_feature: MA Experiment 108556 PARAMETER Experiment Name: Zm_Drought_P Parameter: Age (day) Value: 9
  misc_feature: MA Experiment 108556 PARAMETER Experiment Name: Zm_Drought_P Parameter: Organism Value: Zea mays
  misc_feature: MA Experiment 108556 PARAMETER Experiment Name: Zm_Drought_P Parameter: Plant Line Value: 35A19
  misc_feature: MA Experiment 108556 PARAMETER Experiment Name: Zm_Drought_P Parameter: Timepoint (hr) Value: 24
  misc_feature: MA Experiment 108556 PARAMETER Experiment Name: Zm_Drought_P Parameter: Tissue Value: Aerial
  misc_feature: MA Experiment 108556 PARAMETER Experiment Name: Zm_Drought_P Parameter: Treatment Value: Drought vs. No Drought
  misc_feature: MA Experiment ID: 20000487 Result: Up-regulated in Transcription
  misc_feature: MA Experiment 20000487 PARAMETER Experiment Name: Zm_50mM_NH4NO3_L_to_H_P Parameter: Organism Value: Zea mays
  misc_feature: MA Experiment 20000487 PARAMETER Experiment Name: Zm_50mM_NH4NO3_L_to_H_P Parameter: Timepoint (hr) Value: 4
  misc_feature: MA Experiment 20000487 PARAMETER Experiment Name: Zm_50mM_NH4NO3_L_to_H_P Parameter: Tissue Value: Leaves
  misc_feature: MA Experiment 20000487 PARAMETER Experiment Name: Zm_50mM_NH4NO3_L_to_H_P Parameter: Treatment Value: 50mM NH4NO3 vs. 100mM Mannitol
accctcccacactccaccacccgcgccgccgcctcctactccgccccggcccctctgatccggaccgagcgccggccatggcgctcgccttcgacgagttcgggcgccccttcattatcctgcgggagcaggagaagaagacgcgccttcgggggcttgacgcgcagaaggccaacatcgcctcggccaaggccgtcgcgcggatcctccgcacgtcgctgggacccaagggcatggacaagatgctccagtcccccgacggcgacgtcatcatcacaaatgatggagcgaccatcctggagcagatggatgttgacaaccagatagcaaagctgatggtggagctgtcccgtagtcaagactatgaaatcggggatggtaccaccggggtggtagtcatggcaggggctcttctcgagcaggctgagaagcttctggagcgtggtattcaccccattagggtggctgaaggctatgagatggcgtcaaaggtagcttttgaccacctagaacatatatccgaaaagtttgagttcagtgcagacaacattgaacccctggtccagacctgcatgacaactctatcctcaaagattgttaaccgttgcaagcgggcgttggcagagattgctgtcaaagcagtacttgcggttgcagatttggagaggaaggatgttaacttggatctaattaaagtagaaggcaaggttggtgggaagctggaggacactgaacttgtatatggaattattgttgacaaagatatgagccatccacaaatgccaaagagaattgaggatgctaagattgccatcttgacatgcccatttgagcctccgaagccaaagacaaagcataaggttgacattgacactgtcgagaaattccagacactgcgtgagcaagagcagaaatactttgatgaaatggttcagaagtgcaaggatgctggtgcaaccctggttatttgccagtggggttttgatgatgaagccaatcatttattgatgcatagaaatctgccagcagtgagatgggttggtggtgttgaattggaactgattgccattgctacaggagggcggattgttccgagattccaagagttgagtcctgaaaagcttggaaaggctggattagtcagagagaaatcattcggaacaacaaaggaccggatgctttacattgagaagtgtgccaattctagagctgtaaccattttcatccgtgggggaaacaaaatgatgattgaggagaccaagcgcagtcttcatgatgctctttgcgtagcaaggaatctgatccggaataactcgattgtgtacggtggcggctcagccgagatatcttgctcaattgctgttgaaactgctgcagatcggcacccgggagttgagcagtatgctatcaggtcattcgctgatgcattagatgctgttccactagcgttggccgaaaacagtggtttgtcaccaattgataccttaactgcggtaaaagctcaacaagtcaaggagagcaacccccactgtggcatagactgcaacgacgttggcaccaccgacatgaaagaacagaacgtcttcgagaccctgattggcaagcagcaacagatcttgcttgccacccaggtggtgaagatgatcctgaagatcgacgatgtcatctcaccgtccgagtactgacggaaagaaggaacggatggctatgctggatatgcgtaggcggcattgctgatgtgttttgattggtgtacctccttgtccaggcttgctgcctaccactcactccctgtgtgacgttttgctgaaattggtttgtactgtgcacgataatatctggaaatagactctagacagtccttagttatctttttattatataaaaaaagtcagcgccttctcgttagggttgagatgtttgcagtattgatgcttttgtagtgtttttatagctcagcttaagctgtcatttttgtttgatgatttgcaatagttggacgccctcatgaacaaaatgcaatggttcatcttttggttcacatggacaaaatgtc

SEQ ID NO: 13381 - protein, 560 aa, Zea mays subsp. mays
  peptide (1)..(560): Ceres Seq. ID no. 12367420
  misc_feature (65)..(559): Pfam Name: TCP-1/cpn60 chaperonin family Pfam Description: TCP-1/cpn60 chaperonin family
  misc_feature (26)..(560): Homolog of NCBI NO: 1587206 NR Description: T complex protein
  misc_feature (26)..(560): Homolog of NCBI NO: 730919 NR Description: T-COMPLEX PROTEIN 1, EPSILON SUBUNIT
  misc_feature (26)..(560): Homolog of NCBI NO: 1729864 NR Description: T-COMPLEX PROTEIN 1, EPSILON SUBUNIT
  misc_feature (26)..(560): Homolog of NCBI NO: 15221770 NR Description: T-complex chaperonin protein , epsilon subunit; id: At1g24510.1, supported by cDNA: gi_19715604 [Arabidopsis
  misc_feature (28)..(559): Homolog of NCBI NO: 27924333 NR Description: Similar to chaperonin containing TCP1, subunit 5
  misc_feature (28)..(559): Homolog of NCBI NO: 603955 NR Description: KIAA0098 protein [Homo sapiens]
  misc_feature (28)..(559): Homolog of NCBI NO: 12804225 NR Description: Unknown (protein for IMAGE:3543711) [Homo sapiens]
  misc_feature (28)..(559): Homolog of NCBI NO: 24307939 NR Description: chaperonin containing TCP1, subunit 5 (epsilon)
  misc_feature (28)..(559): Homolog of NCBI NO: 6683670 NR Description: CCT (chaperonin containing T-complex polypeptide
  misc_feature (28)..(559): Homolog of NCBI NO: 6671702 NR Description: chaperonin subunit 5 (epsilon) [Mus musculus]
PPTLHHPRRRLLLRPGPSDPDRAPAMALAFDEFGRPFIILREQEKKTRLRGLDAQKANIASAKAVARILRTSLGPKGMDKMLQSPDGDVIITNDGATILEQMDVDNQIAKLMVELSRSQDYEIGDGTTGVVVMAGALLEQAEKLLERGIHPIRVAEGYEMASKVAFDHLEHISEKFEFSADNIEPLVQTCMTTLSSKIVNRCKRALAEIAVKAVLAVADLERKDVNLDLIKVEGKVGGKLEDTELVYGIIVDKDMSHPQMPKRIEDAKIAILTCPFEPPKPKTKHKVDIDTVEKFQTLREQEQKYFDEMVQKCKDAGATLVICQWGFDDEANHLLMHRNLPAVRWVGGVELELIAIATGGRIVPRFQELSPEKLGKAGLVREKSFGTTKDRMLYIEKCANSRAVTIFIRGGNKMMIEETKRSLHDALCVARNLIRNNSIVYGGGSAEISCSIAVETAADRHPGVEQYAIRSFADALDAVPLALAENSGLSPIDTLTAVKAQQVKESNPHCGIDCNDVGTTDMKEQNVFETLIGKQQQILLATQVVKMILKIDDVISPSEY

SEQ ID NO: 13382 - protein, 535 aa, Zea mays subsp. mays
  peptide (1)..(535): Ceres Seq. ID no. 12367421
  misc_feature (40)..(534): Pfam Name: TCP-1/cpn60 chaperonin family Pfam Description: TCP-1/cpn60 chaperonin family
  misc_feature (1)..(535): Homolog of NCBI NO: 1587206 NR Description: T complex protein
  misc_feature (1)..(535): Homolog of NCBI NO: 730919 NR Description: T-COMPLEX PROTEIN 1, EPSILON SUBUNIT
  misc_feature (1)..(535): Homolog of NCBI NO: 1729864 NR Description: T-COMPLEX PROTEIN 1, EPSILON SUBUNIT
  misc_feature (1)..(535): Homolog of NCBI NO: 15221770 NR Description: T-complex chaperonin protein , epsilon subunit; id: At1g24510.1, supported by cDNA: gi_19715604 [Arabidopsis
  misc_feature (3)..(534): Homolog of NCBI NO: 27924333 NR Description: Similar to chaperonin containing TCP1, subunit 5
  misc_feature (3)..(534): Homolog of NCBI NO: 603955 NR Description: KIAA0098 protein [Homo sapiens]
  misc_feature (3)..(534): Homolog of NCBI NO: 12804225 NR Description: Unknown (protein for IMAGE:3543711) [Homo sapiens]
  misc_feature (3)..(534): Homolog of NCBI NO: 24307939 NR Description: chaperonin containing TCP1, subunit 5 (epsilon)
  misc_feature (3)..(534): Homolog of NCBI NO: 6683670 NR Description: CCT (chaperonin containing T-complex polypeptide
  misc_feature (3)..(534): Homolog of NCBI NO: 6671702 NR Description: chaperonin subunit 5 (epsilon) [Mus musculus]
MALAFDEFGRPFIILREQEKKTRLRGLDAQKANIASAKAVARILRTSLGPKGMDKMLQSPDGDVIITNDGATILEQMDVDNQIAKLMVELSRSQDYEIGDGTTGVVVMAGALLEQAEKLLERGIHPIRVAEGYEMASKVAFDHLEHISEKFEFSADNIEPLVQTCMTTLSSKIVNRCKRALAEIAVKAVLAVADLERKDVNLDLIKVEGKVGGKLEDTELVYGIIVDKDMSHPQMPKRIEDAKIAILTCPFEPPKPKTKHKVDIDTVEKFQTLREQEQKYFDEMVQKCKDAGATLVICQWGFDDEANHLLMHRNLPAVRWVGGVELELIAIATGGRIVPRFQELSPEKLGKAGLVREKSFGTTKDRMLYIEKCANSRAVTIFIRGGNKMMIEETKRSLHDALCVARNLIRNNSIVYGGGSAEISCSIAVETAADRHPGVEQYAIRSFADALDAVPLALAENSGLSPIDTLTAVKAQQVKESNPHCGIDCNDVGTTDMKEQNVFETLIGKQQQILLATQVVKMILKIDDVISPSEY

SEQ ID NO: 13383 - protein, 483 aa, Zea mays subsp. mays
  peptide (1)..(483): Ceres Seq. ID no. 12367422
  misc_feature (1)..(482): Pfam Name: TCP-1/cpn60 chaperonin family Pfam Description: TCP-1/cpn60 chaperonin family
  misc_feature (1)..(483): Homolog of NCBI NO: 1587206 NR Description: T complex protein
  misc_feature (1)..(483): Homolog of NCBI NO: 730919 NR Description: T-COMPLEX PROTEIN 1, EPSILON SUBUNIT
  misc_feature (1)..(483): Homolog of NCBI NO: 1729864 NR Description: T-COMPLEX PROTEIN 1, EPSILON SUBUNIT
  misc_feature (1)..(483): Homolog of NCBI NO: 15221770 NR Description: T-complex chaperonin protein , epsilon subunit; id: At1g24510.1, supported by cDNA: gi_19715604 [Arabidopsis
  misc_feature (1)..(482): Homolog of NCBI NO: 27924333 NR Description: Similar to chaperonin containing TCP1, subunit 5
  misc_feature (1)..(482): Homolog of NCBI NO: 603955 NR Description: KIAA0098 protein [Homo sapiens]
  misc_feature (1)..(482): Homolog of NCBI NO: 24307939 NR Description: chaperonin containing TCP1, subunit 5 (epsilon)
  misc_feature (1)..(482): Homolog of NCBI NO: 12804225 NR Description: Unknown (protein for IMAGE:3543711) [Homo sapiens]
  misc_feature (1)..(482): Homolog of NCBI NO: 6683670 NR Description: CCT (chaperonin containing T-complex polypeptide
  misc_feature (1)..(482): Homolog of NCBI NO: 6671702 NR Description: chaperonin subunit 5 (epsilon) [Mus musculus]
MDKMLQSPDGDVIITNDGATILEQMDVDNQIAKLMVELSRSQDYEIGDGTTGVVVMAGALLEQAEKLLERGIHPIRVAEGYEMASKVAFDHLEHISEKFEFSADNIEPLVQTCMTTLSSKIVNRCKRALAEIAVKAVLAVADLERKDVNLDLIKVEGKVGGKLEDTELVYGIIVDKDMSHPQMPKRIEDAKIAILTCPFEPPKPKTKHKVDIDTVEKFQTLREQEQKYFDEMVQKCKDAGATLVICQWGFDDEANHLLMHRNLPAVRWVGGVELELIAIATGGRIVPRFQELSPEKLGKAGLVREKSFGTTKDRMLYIEKCANSRAVTIFIRGGNKMMIEETKRSLHDALCVARNLIRNNSIVYGGGSAEISCSIAVETAADRHPGVEQYAIRSFADALDAVPLALAENSGLSPIDTLTAVKAQQVKESNPHCGIDCNDVGTTDMKEQNVFETLIGKQQQILLATQVVKMILKIDDVISPSEY

SEQ ID NO: 13384 - DNA, 1439 bp, Zea mays subsp. mays
  misc_feature (1)..(1439): Ceres Seq. ID no. 12355841
  misc_feature: MA Experiment ID: 108527 Result: Down-regulated in Transcription
  misc_feature: MA Experiment 108527 PARAMETER Experiment Name: Zm_5mM_NO_P Parameter: Age (day) Value: 8
  misc_feature: MA Experiment 108527 PARAMETER Experiment Name: Zm_5mM_NO_P Parameter: Organism Value: Zea mays
  misc_feature: MA Experiment 108527 PARAMETER Experiment Name: Zm_5mM_NO_P Parameter: Plant Line Value: 35A19
  misc_feature: MA Experiment 108527 PARAMETER Experiment Name: Zm_5mM_NO_P Parameter: Timepoint (hr) Value: 6
  misc_feature: MA Experiment 108527 PARAMETER Experiment Name: Zm_5mM_NO_P Parameter: Tissue Value: Aerial
  misc_feature: MA Experiment 108527 PARAMETER Experiment Name: Zm_5mM_NO_P Parameter: Treatment Value: 5mM NO vs. No Treatment
  misc_feature: MA Experiment ID: 108528 Result: Up-regulated in Transcription
  misc_feature: MA Experiment 108528 PARAMETER Experiment Name: Zm_Imbibed_Seeds_P Parameter: Age (day) Value: 5 vs. 2
  misc_feature: MA Experiment 108528 PARAMETER Experiment Name: Zm_Imbibed_Seeds_P Parameter: Organism Value: Zea mays
  misc_feature: MA Experiment 108528 PARAMETER Experiment Name: Zm_Imbibed_Seeds_P Parameter: Plant Line Value: 35A19
  misc_feature: MA Experiment 108528 PARAMETER Experiment Name: Zm_Imbibed_Seeds_P Parameter: Tissue Value: Aerial vs. Embryo
  misc_feature: MA Experiment ID: 108530 Result: Up-regulated in Transcription
  misc_feature: MA Experiment 108530 PARAMETER Experiment Name: Zm_Imbibed_Seeds_P Parameter: Age (day) Value: 6 vs. 2
  misc_feature: MA Experiment 108530 PARAMETER Experiment Name: Zm_Imbibed_Seeds_P Parameter: Organism Value: Zea mays
  misc_feature: MA Experiment 108530 PARAMETER Experiment Name: Zm_Imbibed_Seeds_P Parameter: Plant Line Value: 35A19
  misc_feature: MA Experiment 108530 PARAMETER Experiment Name: Zm_Imbibed_Seeds_P Parameter: Tissue Value: Aerial vs. Embryo
  misc_feature: MA Experiment ID: 108536 Result: Down-regulated in Transcription
  misc_feature: MA Experiment 108536 PARAMETER Experiment Name: Zm_Meristem_P Parameter: Age (day) Value: 8
  misc_feature: MA Experiment 108536 PARAMETER Experiment Name: Zm_Meristem_P Parameter: Organism Value: Zea mays
  misc_feature: MA Experiment 108536 PARAMETER Experiment Name: Zm_Meristem_P Parameter: Plant Line Value: 35A19
  misc_feature: MA Experiment 108536 PARAMETER Experiment Name: Zm_Meristem_P Parameter: Tissue Value: Shoot Meristem vs. Above Shoot Meristem
  misc_feature: MA Experiment ID: 108545 Result: Up-regulated in Transcription
  misc_feature: MA Experiment 108545 PARAMETER Experiment Name: Zm_Imbibed_Seeds_P Parameter: Age (day) Value: 3 vs. 2
  misc_feature: MA Experiment 108545 PARAMETER Experiment Name: Zm_Imbibed_Seeds_P Parameter: Organism Value: Zea mays
  misc_feature: MA Experiment 108545 PARAMETER Experiment Name: Zm_Imbibed_Seeds_P Parameter: Plant Line Value: 35A19
  misc_feature: MA Experiment 108545 PARAMETER Experiment Name: Zm_Imbibed_Seeds_P Parameter: Tissue Value: Aerial vs. Embryo
  misc_feature: MA Experiment ID: 108547 Result: Up-regulated in Transcription
  misc_feature: MA Experiment 108547 PARAMETER Experiment Name: Zm_Imbibed_Seeds_P Parameter: Age (day) Value: 4 vs. 2
  misc_feature: MA Experiment 108547 PARAMETER Experiment Name: Zm_Imbibed_Seeds_P Parameter: Organism Value: Zea mays
  misc_feature: MA Experiment 108547 PARAMETER Experiment Name: Zm_Imbibed_Seeds_P Parameter: Plant Line Value: 35A19
  misc_feature: MA Experiment 108547 PARAMETER Experiment Name: Zm_Imbibed_Seeds_P Parameter: Tissue Value: Aerial vs. Embryo
  misc_feature: MA Experiment ID: 108556 Result: Down-regulated in Transcription
  misc_feature: MA Experiment 108556 PARAMETER Experiment Name: Zm_Drought_P Parameter: Age (day) Value: 9
  misc_feature: MA Experiment 108556 PARAMETER Experiment Name: Zm_Drought_P Parameter: Organism Value: Zea mays
  misc_feature: MA Experiment 108556 PARAMETER Experiment Name: Zm_Drought_P Parameter: Plant Line Value: 35A19
  misc_feature: MA Experiment 108556 PARAMETER Experiment Name: Zm_Drought_P Parameter: Timepoint (hr) Value: 24
  misc_feature: MA Experiment 108556 PARAMETER Experiment Name: Zm_Drought_P Parameter: Tissue Value: Aerial
  misc_feature: MA Experiment 108556 PARAMETER Experiment Name: Zm_Drought_P Parameter: Treatment Value: Drought vs. No Drought
  misc_feature: MA Experiment ID: 108559 Result: Down-regulated in Transcription
  misc_feature: MA Experiment 108559 PARAMETER Experiment Name: Zm_5mM_NO_P Parameter: Age (day) Value: 8
  misc_feature: MA Experiment 108559 PARAMETER Experiment Name: Zm_5mM_NO_P Parameter: Organism Value: Zea mays
  misc_feature: MA Experiment 108559 PARAMETER Experiment Name: Zm_5mM_NO_P Parameter: Plant Line Value: 35A19
  misc_feature: MA Experiment 108559 PARAMETER Experiment Name: Zm_5mM_NO_P Parameter: Timepoint (hr) Value: 12
  misc_feature: MA Experiment 108559 PARAMETER Experiment Name: Zm_5mM_NO_P Parameter: Tissue Value: Aerial
  misc_feature: MA Experiment 108559 PARAMETER Experiment Name: Zm_5mM_NO_P Parameter: Treatment Value: 5mM NO vs. No Treatment
  misc_feature: MA Experiment ID: 108687 Result: Down-regulated in Transcription
  misc_feature: MA Experiment 108687 PARAMETER Experiment Name: Zm_Embryos-Flowers__P Parameter: Tissue Value: Embryo vs. Aerial+
  misc_feature: MA Experiment ID: 20000477 Result: Down-regulated in Transcription
  misc_feature: MA Experiment 20000477 PARAMETER Experiment Name: Zm_5mM_SA_P Parameter: Age (day) Value: 10
  misc_feature: MA Experiment 20000477 PARAMETER Experiment Name: Zm_5mM_SA_P Parameter: Organism Value: Zea mays
  misc_feature: MA Experiment 20000477 PARAMETER Experiment Name: Zm_5mM_SA_P Parameter: Plant Line Value: 35A19
  misc_feature: MA Experiment 20000477 PARAMETER Experiment Name: Zm_5mM_SA_P Parameter: Timepoint (hr) Value: 48
  misc_feature: MA Experiment 20000477 PARAMETER Experiment Name: Zm_5mM_SA_P Parameter: Tissue Value: Aerial
  misc_feature: MA Experiment 20000477 PARAMETER Experiment Name: Zm_5mM_SA_P Parameter: Treatment Value: 5mM SA vs. No Treatment
  misc_feature: MA Experiment ID: 20000478 Result: Down-regulated in Transcription
  misc_feature: MA Experiment 20000478 PARAMETER Experiment Name: Zm_5mM_SA_P Parameter: Age (day) Value: 11
  misc_feature: MA Experiment 20000478 PARAMETER Experiment Name: Zm_5mM_SA_P Parameter: Organism Value: Zea mays
  misc_feature: MA Experiment 20000478 PARAMETER Experiment Name: Zm_5mM_SA_P Parameter: Plant Line Value: 35A19
  misc_feature: MA Experiment 20000478 PARAMETER Experiment Name: Zm_5mM_SA_P Parameter: Timepoint (hr) Value: 72
  misc_feature: MA Experiment 20000478 PARAMETER Experiment Name: Zm_5mM_SA_P Parameter: Tissue Value: Aerial
  misc_feature: MA Experiment 20000478 PARAMETER Experiment Name: Zm_5mM_SA_P Parameter: Treatment Value: 5mM SA vs. No Treatment
  misc_feature: MA Experiment ID: 20000479 Result: Down-regulated in Transcription
  misc_feature: MA Experiment 20000479 PARAMETER Experiment Name: Zm_Drought_P Parameter: Age (day) Value: 10
  misc_feature: MA Experiment 20000479 PARAMETER Experiment Name: Zm_Drought_P Parameter: Organism Value: Zea mays
  misc_feature: MA Experiment 20000479 PARAMETER Experiment Name: Zm_Drought_P Parameter: Plant Line Value: 35A19
  misc_feature: MA Experiment 20000479 PARAMETER Experiment Name: Zm_Drought_P Parameter: Timepoint (hr) Value: 48
  misc_feature: MA Experiment 20000479 PARAMETER Experiment Name: Zm_Drought_P Parameter: Tissue Value: Aerial
  misc_feature: MA Experiment 20000479 PARAMETER Experiment Name: Zm_Drought_P Parameter: Treatment Value: Drought vs. No Drought
  misc_feature: MA Experiment ID: 20000480 Result: Down-regulated in Transcription
  misc_feature: MA Experiment 20000480 PARAMETER Experiment Name: Zm_Drought_P Parameter: Age (day) Value: 11
  misc_feature: MA Experiment 20000480 PARAMETER Experiment Name: Zm_Drought_P Parameter: Organism Value: Zea mays
  misc_feature: MA Experiment 20000480 PARAMETER Experiment Name: Zm_Drought_P Parameter: Plant Line Value: 35A19
  misc_feature: MA Experiment 20000480 PARAMETER Experiment Name: Zm_Drought_P Parameter: Timepoint (hr) Value: 72
  misc_feature: MA Experiment 20000480 PARAMETER Experiment Name: Zm_Drought_P Parameter: Tissue Value: Aerial
  misc_feature: MA Experiment 20000480 PARAMETER Experiment Name: Zm_Drought_P Parameter: Treatment Value: Drought vs. No Drought
agttccacggttccacccccgccggccacactcgtctctctcacgagccacagcccacaggctagctctctagccagtccagtccacgcagcgcagggatggcgtcgttcgccgtggcaacggccccgtcgctagcggccccggcagccaagaggaggcccgccgccggcgtcacgtacgtggagtgcatgaaagcctacagcggcctcaaggggctcaacaaggtgaccatgctcggggtgcgcaagaccgccgactactccttcgccaaggtcgtggcatcgctcagcctcgcgggcaggaagcggcgcggaggagcgttcggcgcccagatgaggttttacgcttacacagtggtgacggttgcaccacgtgagcgagcgcagcgaagccaacacaactgccggcggacaagtgtccccatagacgagatccatggcggagcgccggaagagcgtctcctccgtgctgtttgcttcggcgcgcgccgggaggggataatggcagcagtgagctcggtctctattctgcccctcgcgtcgctgaggcctcttccgttgaggcgtgctgctaggaatgtgttggagggaggagggagaagggcttcgagtcccctgctcctcgcgaggtatgggctgtggcgcggacgcccggctgctgctgtgggcggcgaagcagagttggccctcgaagatgcggatgccgcgatgagggtggccgccgacgacgacagcatcacggccacggtggtgtccgtgctgctcacacttgcgttcgtcggcctctccatcctcaccctcggggtgatctacctgtcggtgcaggacttcttgcagaagagggaaaaggagaagtttgagaaggaggaggccgaaaagcagaaagaggaggcgaggaagaagagggctaagtcgaggcagaagagaagaaattattgatctcaggatgaactacccccaccaatatgctgtaacactgaactccattgccggctccattgcccggggttgtgctcacgccatcagttttggagtctcttggatgctgtaacactgaactccattgccggctccattgcccggggttgtgctcacgccatcagttttggagtccggaggagggaggaaaagcagggtagccagaatctctattggcgtcgcctgtttcattgtgttcatgatgatcctttcagtaataggcctttttaggaagtaaaggaaacgtttgtgctctggtttctgcaagaggtttgcacataaacaattttttattgctgtctaggctccaacctttggttgataaacactcacaataagtaacgaaggaataagaataaatgatgagagatataagaatatgaaaatgaataaatgatgtgacaggttgttgtagagcagcatgatctaagtgaatgcataactctactcttatattatatc

SEQ ID NO: 13385 - protein, 279 aa, Zea mays subsp. mays
  peptide (1)..(279): Ceres Seq. ID no. 12355842
  misc_feature (1)..(78): Homolog of NCBI NO: 31415934 NR Description: unknown protein [Oryza sativa (japonica
  misc_feature (140)..(236): Homolog of NCBI NO: 34902104 NR Description: hypothetical protein [Oryza sativa (japonica group)] >gi|29893616|gb|AAP06870.1| hypothetical protein [Oryza
  misc_feature (221)..(279): Homolog of NCBI NO: 34902104 NR Description: hypothetical protein [Oryza sativa (japonica group)] >gi|29893616|gb|AAP06870.1| hypothetical protein [Oryza
  misc_feature (180)..(279): Homolog of NCBI NO: 15227050 NR Description: unknown protein; protein id: At2g29180.1
MASFAVATAPSLAAPAAKRRPAAGVTYVECMKAYSGLKGLNKVTMLGVRKTADYSFAKVVASLSLAGRKRRGGAFGAQMRFYAYTVVTVAPRERAQRSQHNCRRTSVPIDEIHGGAPEERLLRAVCFGARREGIMAAVSSVSILPLASLRPLPLRRAARNVLEGGGRRASSPLLLARYGLWRGRPAAAVGGEAELALEDADAAMRVAADDDSITATVVSVLLTLAFVGLSILTLGVIYLSVQDFLQKREKEKFEKEEAEKQKEEARKKRAKSRQKRRNY

SEQ ID NO: 13386 - protein, 249 aa, Zea mays subsp. mays
  peptide (1)..(249): Ceres Seq. ID no. 12355843
  misc_feature (1)..(48): Homolog of NCBI NO: 31415934 NR Description: unknown protein [Oryza sativa (japonica
  misc_feature (110)..(206): Homolog of NCBI NO: 34902104 NR Description: hypothetical protein [Oryza sativa (japonica group)] >gi|29893616|gb|AAP06870.1| hypothetical protein [Oryza
  misc_feature (191)..(249): Homolog of NCBI NO: 34902104 NR Description: hypothetical protein [Oryza sativa (japonica group)] >gi|29893616|gb|AAP06870.1| hypothetical protein [Oryza
  misc_feature (150)..(249): Homolog of NCBI NO: 15227050 NR Description: unknown protein; protein id: At2g29180.1
MKAYSGLKGLNKVTMLGVRKTADYSFAKVVASLSLAGRKRRGGAFGAQMRFYAYTVVTVAPRERAQRSQHNCRRTSVPIDEIHGGAPEERLLRAVCFGARREGIMAAVSSVSILPLASLRPLPLRRAARNVLEGGGRRASSPLLLARYGLWRGRPAAAVGGEAELALEDADAAMRVAADDDSITATVVSVLLTLAFVGLSILTLGVIYLSVQDFLQKREKEKFEKEEAEKQKEEARKKRAKSRQKRRNY

SEQ ID NO: 13387 - protein, 235 aa, Zea mays subsp. mays
  peptide (1)..(235): Ceres Seq. ID no. 12355844
  misc_feature (1)..(34): Homolog of NCBI NO: 31415934 NR Description: unknown protein [Oryza sativa (japonica
  misc_feature (96)..(192): Homolog of NCBI NO: 34902104 NR Description: hypothetical protein [Oryza sativa (japonica group)] >gi|29893616|gb|AAP06870.1| hypothetical protein [Oryza
  misc_feature (177)..(235): Homolog of NCBI NO: 34902104 NR Description: hypothetical protein [Oryza sativa (japonica group)] >gi|29893616|gb|AAP06870.1| hypothetical protein [Oryza
  misc_feature (136)..(235): Homolog of NCBI NO: 15227050 NR Description: unknown protein; protein id: At2g29180.1
MLGVRKTADYSFAKVVASLSLAGRKRRGGAFGAQMRFYAYTVVTVAPRERAQRSQHNCRRTSVPIDEIHGGAPEERLLRAVCFGARREGIMAAVSSVSILPLASLRPLPLRRAARNVLEGGGRRASSPLLLARYGLWRGRPAAAVGGEAELALEDADAAMRVAADDDSITATVVSVLLTLAFVGLSILTLGVIYLSVQDFLQKREKEKFEKEEAEKQKEEARKKRAKSRQKRRNY

SEQ ID NO: 13388 - DNA, 1472 bp, Zea mays subsp. mays
  misc_feature (1)..(1472): Ceres Seq. ID no. 12554648
  misc_feature: MA Experiment ID: 108529 Result: Up-regulated in Transcription
  misc_feature: MA Experiment 108529 PARAMETER Experiment Name: Zm_Imbibed_Seeds_P Parameter: Age (day) Value: 5 vs. 2
  misc_feature: MA Experiment 108529 PARAMETER Experiment Name: Zm_Imbibed_Seeds_P Parameter: Organism Value: Zea mays
  misc_feature: MA Experiment 108529 PARAMETER Experiment Name: Zm_Imbibed_Seeds_P Parameter: Plant Line Value: 35A19
  misc_feature: MA Experiment 108529 PARAMETER Experiment Name: Zm_Imbibed_Seeds_P Parameter: Tissue Value: Roots vs. Embryo
  misc_feature: MA Experiment ID: 108534 Result: Up-regulated in Transcription
  misc_feature: MA Experiment 108534 PARAMETER Experiment Name: Zm_4deg_Cold_P Parameter: Age (hr) Value: 8
  misc_feature: MA Experiment 108534 PARAMETER Experiment Name: Zm_4deg_Cold_P Parameter: Organism Value: Zea mays
  misc_feature: MA Experiment 108534 PARAMETER Experiment Name: Zm_4deg_Cold_P Parameter: Plant Line Value: 35A19
  misc_feature: MA Experiment 108534 PARAMETER Experiment Name: Zm_4deg_Cold_P Parameter: Temperature (deg C) Value: 4 vs. 22
  misc_feature: MA Experiment 108534 PARAMETER Experiment Name: Zm_4deg_Cold_P Parameter: Timepoint (hr) Value: 6
  misc_feature: MA Experiment 108534 PARAMETER Experiment Name: Zm_4deg_Cold_P Parameter: Tissue Value: Aerial
  misc_feature: MA Experiment ID: 108535 Result: Down-regulated in Transcription
  misc_feature: MA Experiment 108535 PARAMETER Experiment Name: Zm_Meristem_P Parameter: Age (day) Value: 8
  misc_feature: MA Experiment 108535 PARAMETER Experiment Name: Zm_Meristem_P Parameter: Organism Value: Zea mays
  misc_feature: MA Experiment 108535 PARAMETER Experiment Name: Zm_Meristem_P Parameter: Plant Line Value: 35A19
  misc_feature: MA Experiment 108535 PARAMETER Experiment Name: Zm_Meristem_P Parameter: Tissue Value: Root Meristem vs. Above Root Meristem
  misc_feature: MA Experiment ID: 108545 Result: Down-regulated in Transcription
  misc_feature: MA Experiment 108545 PARAMETER Experiment Name: Zm_Imbibed_Seeds_P Parameter: Age (day) Value: 3 vs. 2
  misc_feature: MA Experiment 108545 PARAMETER Experiment Name: Zm_Imbibed_Seeds_P Parameter: Organism Value: Zea mays
  misc_feature: MA Experiment 108545 PARAMETER Experiment Name: Zm_Imbibed_Seeds_P Parameter: Plant Line Value: 35A19
  misc_feature: MA Experiment 108545 PARAMETER Experiment Name: Zm_Imbibed_Seeds_P Parameter: Tissue Value: Aerial vs. Embryo
  misc_feature: MA Experiment ID: 20000535 Result: Down-regulated in Transcription
  misc_feature: MA Experiment 20000535 PARAMETER Experiment Name: Zm_Hybrid_Seed_Dev_P Parameter: DAP Value: 30 vs. 12
  misc_feature: MA Experiment 20000535 PARAMETER Experiment Name: Zm_Hybrid_Seed_Dev_P Parameter: Organism Value: Zea mays
  misc_feature: MA Experiment 20000535 PARAMETER Experiment Name: Zm_Hybrid_Seed_Dev_P Parameter: Plant Line Value: 35A19
  misc_feature: MA Experiment 20000535 PARAMETER Experiment Name: Zm_Hybrid_Seed_Dev_P Parameter: Tissue Value: Embryo vs. Unfert Floret
aggatgaatcggaagagagaatcctaccaaacctagctaccaactcgatcgtcgtcatcacgctcgaccgcacaactgcaccgaggggggaggagacctaaaaactactacatcttttagctacacatctagctaaagatcgagaggggtaaataaggacgagcgggcgcgagctagaagagcagctgcaggtactaccatcatcgtcgtcgtcgtcgccaggatgaccgttgtcgacgccgtctcctccaccgatgccggcgccgccgccgccacggtaccggcggggaacgggcagaccgtgtgcgtcaccggcgcggccgggtacatcgcctcgtggttagtgaagctgctgctcgagaagggatacactgtgaagggcaccgtgaggaacccagatgacccgaagaacgcgcacctcaaggcgctggacggcgccgccgagcggctgatcctctgcaaggccgatctgctggactacgacgccatctgccgcgccgtgcagggctgccagggcgtcttccacaccgcctcccccgtcaccgacgacccggagcaaatggtggagccggcggtgcgcggcaccgagtacgtgatcaacgcggcggcggaggccggcacggtgcggcgggtggtgttcacgtcgtccatcggcgccgtgaccatggaccccaagcgcgggcccgacgtcgtggtcgacgagtcgtgctggagcgacctcgagttctgcgagaaaaccaggaactggtactgctacggcaaggcggtggcggagcaggcggcgtgggagacggcccggcggcggggcgtggacctggtggtggtgaaccccgtgctggtggtgggccccctgctgcaggcgacggtgaacgccagcatcgcgcacatcctcaagtacctggacggctcggcccgcaccttcgccaacgccgtgcaggcgtacgtggacgtgcgcgacgtggccgacgcgcacctccgcgtcttcgagagcccccgcgcgtccggccgccacctctgcgccgagcgcgtcctccaccgcgaggacgtcgtccgcatcctcgccaagctattccccgagtaccccgtcccagccaggtgctccgacgaggtgaatccgcgaaagcagccgtacaagttctccaaccagaagctccgggacctggggctgcagttccggccggtcagccagtcgctttacgacacggtgaagaacctccaggagaagggacacctgccggtgctcggagagcggacgacgacggaggccgccgacaaggatgcccccacggccgagatgcagcagggagggatcgccatccgtgcctgagagggcgatgccacacatgaacacaaagcaatgttcatactgctgccctgcacctgcaccttcccctgctgtgtaaacaggcctgtgtttgttctggctgatagtgatgtaccctaagacttgtaacgtcatgttcgttcttgtg

SEQ ID NO: 13389 - protein, 367 aa, Zea mays subsp. mays
  peptide (1)..(367): Ceres Seq. ID no. 12554649
  misc_feature (27)..(255): Pfam Name: NAD dependent epimerase/dehydratase family Pfam Description: NAD dependent epimerase/dehydratase family
  misc_feature (1)..(367): Homolog of NCBI NO: 7431410 NR Description: cinnamoyl CoA reductase - maize
  misc_feature (1)..(367): Homolog of NCBI NO: 3242328 NR Description: cinnamoyl-CoA reductase [Zea mays]
  misc_feature (1)..(367): Homolog of NCBI NO: 3341511 NR Description: cinnamoyl-CoA reductase [Saccharum officinarum]
  misc_feature (1)..(367): Homolog of NCBI NO: 17978549 NR Description: cinnamoyl-CoA reductase [Lolium perenne]
  misc_feature (1)..(356): Homolog of NCBI NO: 25140432 NR Description: cinnamoyl CoA reductase [Hordeum vulgare]
  misc_feature (10)..(339): Homolog of NCBI NO: 9964087 NR Description: cinnamoyl CoA reductase [Lolium perenne]
  misc_feature (21)..(339): Homolog of NCBI NO: 9998901 NR Description: cinnamoyl-CoA reductase [Populus balsamifera
  misc_feature (21)..(339): Homolog of NCBI NO: 2960364 NR Description: cinnamoyl CoA reductase [Populus balsamifera
  misc_feature (22)..(339): Homolog of NCBI NO: 7431407 NR Description: cinnamoyl-CoA reductase (EC 1.2.1.44) CCR - cider
  misc_feature (21)..(339): Homolog of NCBI NO: 7239228 NR Description: cinnamoyl CoA reductase; CCR [Populus tremuloides]
MTVVDAVSSTDAGAAAATVPAGNGQTVCVTGAAGYIASWLVKLLLEKGYTVKGTVRNPDDPKNAHLKALDGAAERLILCKADLLDYDAICRAVQGCQGVFHTASPVTDDPEQMVEPAVRGTEYVINAAAEAGTVRRVVFTSSIGAVTMDPKRGPDVVVDESCWSDLEFCEKTRNWYCYGKAVAEQAAWETARRRGVDLVVVNPVLVVGPLLQATVNASIAHILKYLDGSARTFANAVQAYVDVRDVADAHLRVFESPRASGRHLCAERVLHREDVVRILAKLFPEYPVPARCSDEVNPRKQPYKFSNQKLRDLGLQFRPVSQSLYDTVKNLQEKGHLPVLGERTTTEAADKDAPTAEMQQGGIAIRA

SEQ ID NO: 13390 - protein, 255 aa, Zea mays subsp. mays
  peptide (1)..(255): Ceres Seq. ID no. 12554650
  misc_feature (1)..(143): Pfam Name: NAD dependent epimerase/dehydratase family Pfam Description: NAD dependent epimerase/dehydratase family
  misc_feature (1)..(255): Homolog of NCBI NO: 7431410 NR Description: cinnamoyl CoA reductase - maize
  misc_feature (1)..(255): Homolog of NCBI NO: 3242328 NR Description: cinnamoyl-CoA reductase [Zea mays]
  misc_feature (1)..(255): Homolog of NCBI NO: 3341511 NR Description: cinnamoyl-CoA reductase [Saccharum officinarum]
  misc_feature (1)..(255): Homolog of NCBI NO: 17978549 NR Description: cinnamoyl-CoA reductase [Lolium perenne]
  misc_feature (1)..(244): Homolog of NCBI NO: 25140432 NR Description: cinnamoyl CoA reductase [Hordeum vulgare]
  misc_feature (1)..(227): Homolog of NCBI NO: 9964087 NR Description: cinnamoyl CoA reductase [Lolium perenne]
  misc_feature (1)..(227): Homolog of NCBI NO: 9998901 NR Description: cinnamoyl-CoA reductase [Populus balsamifera
  misc_feature (1)..(227): Homolog of NCBI NO: 2960364 NR Description: cinnamoyl CoA reductase [Populus balsamifera
  misc_feature (1)..(227): Homolog of NCBI NO: 7431407 NR Description: cinnamoyl-CoA reductase (EC 1.2.1.44) CCR - cider
  misc_feature (1)..(227): Homolog of NCBI NO: 7239228 NR Description: cinnamoyl CoA reductase; CCR [Populus tremuloides]
MVEPAVRGTEYVINAAAEAGTVRRVVFTSSIGAVTMDPKRGPDVVVDESCWSDLEFCEKTRNWYCYGKAVAEQAAWETARRRGVDLVVVNPVLVVGPLLQATVNASIAHILKYLDGSARTFANAVQAYVDVRDVADAHLRVFESPRASGRHLCAERVLHREDVVRILAKLFPEYPVPARCSDEVNPRKQPYKFSNQKLRDLGLQFRPVSQSLYDTVKNLQEKGHLPVLGERTTTEAADKDAPTAEMQQGGIAIRA

SEQ ID NO: 13391 - protein, 220 aa, Zea mays subsp. mays
  peptide (1)..(220): Ceres Seq. ID no. 12554651
  misc_feature (1)..(108): Pfam Name: NAD dependent epimerase/dehydratase family Pfam Description: NAD dependent epimerase/dehydratase family
  misc_feature (1)..(220): Homolog of NCBI NO: 7431410 NR Description: cinnamoyl CoA reductase - maize
  misc_feature (1)..(220): Homolog of NCBI NO: 3242328 NR Description: cinnamoyl-CoA reductase [Zea mays]
  misc_feature (1)..(220): Homolog of NCBI NO: 3341511 NR Description: cinnamoyl-CoA reductase [Saccharum officinarum]
  misc_feature (1)..(220): Homolog of NCBI NO: 17978549 NR Description: cinnamoyl-CoA reductase [Lolium perenne]
  misc_feature (1)..(209): Homolog of NCBI NO: 25140432 NR Description: cinnamoyl CoA reductase [Hordeum vulgare]
  misc_feature (1)..(192): Homolog of NCBI NO: 9964087 NR Description: cinnamoyl CoA reductase [Lolium perenne]
  misc_feature (1)..(192): Homolog of NCBI NO: 9998901 NR Description: cinnamoyl-CoA reductase [Populus balsamifera
  misc_feature (1)..(192): Homolog of NCBI NO: 2960364 NR Description: cinnamoyl CoA reductase [Populus balsamifera
  misc_feature (1)..(192): Homolog of NCBI NO: 7431407 NR Description: cinnamoyl-CoA reductase (EC 1.2.1.44) CCR - cider
  misc_feature (1)..(192): Homolog of NCBI NO: 7239228 NR Description: cinnamoyl CoA reductase; CCR [Populus tremuloides]
MDPKRGPDVVVDESCWSDLEFCEKTRNWYCYGKAVAEQAAWETARRRGVDLVVVNPVLVVGPLLQATVNASIAHILKYLDGSARTFANAVQAYVDVRDVADAHLRVFESPRASGRHLCAERVLHREDVVRILAKLFPEYPVPARCSDEVNPRKQPYKFSNQKLRDLGLQFRPVSQSLYDTVKNLQEKGHLPVLGERTTTEAADKDAPTAEMQQGGIAIRA

SEQ ID NO: 13392 - DNA, 1411 bp, Zea mays subsp. mays
  misc_feature (1)..(1411): Ceres Seq. ID no. 12411284
  misc_feature: MA Experiment ID: 108534 Result: Down-regulated in Transcription
  misc_feature: MA Experiment 108534 PARAMETER Experiment Name: Zm_4deg_Cold_P Parameter: Age (hr) Value: 8
  misc_feature: MA Experiment 108534 PARAMETER Experiment Name: Zm_4deg_Cold_P Parameter: Organism Value: Zea mays
  misc_feature: MA Experiment 108534 PARAMETER Experiment Name: Zm_4deg_Cold_P Parameter: Plant Line Value: 35A19
  misc_feature: MA Experiment 108534 PARAMETER Experiment Name: Zm_4deg_Cold_P Parameter: Temperature (deg C) Value: 4 vs. 22
  misc_feature: MA Experiment 108534 PARAMETER Experiment Name: Zm_4deg_Cold_P Parameter: Timepoint (hr) Value: 6
  misc_feature: MA Experiment 108534 PARAMETER Experiment Name: Zm_4deg_Cold_P Parameter: Tissue Value: Aerial
agacgctccagaatccaaatacctttccatcgattcttggcatcgcccttctctctaaaccccaactcctcgactcgagcaatccctaggtctccgcgcgaggcggtggcggctgtgaggggattttgattgatttggctcgagatggcggaggacaaggtgcggcggatcttcgtcggcgggttgtcctggaagaccacggagcgcacgctcgagcgcaccttcggtcagtacggcaaggtcatcgaggcacaggttgtagtgaaaaaggaaacaggccgctcgaggggatttggatttgtcacattctcagaacctcgggctgtggatgctgccatttgtggaatgcataatgcggaactggatggccgtaatattactgtgaacaaagctaaacctaggattgctgactatggctatggtggtggtggtggtggttactcgtctggtgctagaggtggatatcgtagtggcggtgatgtagttccagcagtgagtgatgaatgtttcaaatgcggcctttctggacattgggctcgtcaatgcccttattcagatggcagtggtagaactggaagatattctcccgcttcaaggtatggtggtggcactgggagacatggtgaccgctttggaggatcagatcgttttgctcgctatgatgatgaccgatatgatggtggccgctatgtagacagcagggatacttattatggtgctgggcgagatcgttatgctaacgatcgccatccgccagcaacagacctctattctggtgacaggtacagtggtgcagatcgttacgcgtccagtggctttgccgggcgagatcgttatgctaacgatcgccatccgccagcaacagaccgctattctggtgacaggtacagtggtgcacgtcgttccgcgtccagtggctttgccagagaaaggagctatgagagagatggaggcaggtccactggaacttactaccgtgatgttccgaggggcactggtggctatggcagaggtggttcacgtggcggtagcggcggcggcggcgggcctgctcgctttggtgggagttaccgagataggcctgctccgtatgaccgtcctagcaggggcggggcagctcgtgcttatgatgatcgttactgaagaatgtttccttgaagtagaacagagatgttggtgtattttagttttgcatcagtatttgcacttgccagcttgatccttcaattctatgctattcagcagcgcagtttgttttagtggtctctgaagacaatggttcagtatgtcagttactatcagtatgttggtaccataatctgtaggcagtgatcctggtccatttgacatgtttgtgtaattgcttggagtctgcactaaataatgaactaatcgcagcatgtgatctttg

SEQ ID NO: 13393 - protein, 332 aa, Zea mays subsp. mays
  peptide (1)..(332): Ceres Seq. ID no. 12411285
  misc_feature (10)..(80): Pfam Name: RNA recognition motif. (a.k.a. RRM, RBD, or RNP domain) Pfam Description: RNA recognition motif. (a.k.a. RRM, RBD, or RNP
  misc_feature (1)..(312): Homolog of NCBI NO: 33146923 NR Description: glycine-rich RNA-binding protein-like [Oryza
  misc_feature (1)..(301): Homolog of NCBI NO: 15237666 NR Description: glycine-rich RNA-binding protein; protein id:
  misc_feature (141)..(332): Homolog of NCBI NO: 33146923 NR Description: glycine-rich RNA-binding protein-like [Oryza
  misc_feature (8)..(278): Homolog of NCBI NO: 18406831 NR Description: glycine-rich RNA-binding protein; protein id: supported by cDNA: 42847. [Arabidopsis thaliana]
  misc_feature (1)..(204): Homolog of NCBI NO: 40714682 NR Description: putative RNA binding protein [Oryza sativa
  misc_feature (1)..(245): Homolog of NCBI NO: 15231557 NR Description: glycine-rich RNA-binding protein; protein id: supported by cDNA: gi_15451065, supported by cDNA: gi_15982738, by cDNA: gi_15983476, supported by cDNA: gi_18377411 [Arabidopsis
  misc_feature (8)..(177): Homolog of NCBI NO: 12659074 NR Description: RNA-binding protein [Triticum aestivum]
  misc_feature (8)..(175): Homolog of NCBI NO: 20152613 NR Description: putative glycine rich protein [Rumex obtusifolius]
  misc_feature (1)..(166): Homolog of NCBI NO: 15226605 NR Description: glycine-rich RNA binding protein AtGRP7; protein At2g21660.1, supported by cDNA: 13879., supported by cDNA: supported by cDNA: gi_16226371, supported by cDNA: gi_166836
  misc_feature (1)..(216): Homolog of NCBI NO: 2129944 NR Description: RNA-binding protein RZ-1 - wood tobacco
MAEDKVRRIFVGGLSWKTTERTLERTFGQYGKVIEAQVVVKKETGRSRGFGFVTFSEPRAVDAAICGMHNAELDGRNITVNKAKPRIADYGYGGGGGGYSSGARGGYRSGGDVVPAVSDECFKCGLSGHWARQCPYSDGSGRTGRYSPASRYGGGTGRHGDRFGGSDRFARYDDDRYDGGRYVDSRDTYYGAGRDRYANDRHPPATDLYSGDRYSGADRYASSGFAGRDRYANDRHPPATDRYSGDRYSGARRSASSGFARERSYERDGGRSTGTYYRDVPRGTGGYGRGGSRGGSGGGGGPARFGGSYRDRPAPYDRPSRGGAARAYDDRY

SEQ ID NO: 13394 - protein, 265 aa, Zea mays subsp. mays
  peptide (1)..(265): Ceres Seq. ID no. 12411286
  misc_feature (137)..(228): Pfam Name: Dehydrin Pfam Description: Dehydrin
  misc_feature (1)..(245): Homolog of NCBI NO: 33146923 NR Description: glycine-rich RNA-binding protein-like [Oryza
  misc_feature (1)..(234): Homolog of NCBI NO: 15237666 NR Description: glycine-rich RNA-binding protein; protein id:
  misc_feature (74)..(265): Homolog of NCBI NO: 33146923 NR Description: glycine-rich RNA-binding protein-like [Oryza
  misc_feature (1)..(211): Homolog of NCBI NO: 18406831 NR Description: glycine-rich RNA-binding protein; protein id: supported by cDNA: 42847. [Arabidopsis thaliana]
  misc_feature (1)..(137): Homolog of NCBI NO: 40714682 NR Description: putative RNA binding protein [Oryza sativa
  misc_feature (1)..(178): Homolog of NCBI NO: 15231557 NR Description: glycine-rich RNA-binding protein; protein id: supported by cDNA: gi_15451065, supported by cDNA: gi_15982738, by cDNA: gi_15983476, supported by cDNA: gi_18377411 [Arabidopsis
  misc_feature (1)..(110): Homolog of NCBI NO: 12659074 NR Description: RNA-binding protein [Triticum aestivum]
  misc_feature (1)..(108): Homolog of NCBI NO: 20152613 NR Description: putative glycine rich protein [Rumex obtusifolius]
  misc_feature (1)..(99): Homolog of NCBI NO: 15226605 NR Description: glycine-rich RNA binding protein AtGRP7; protein At2g21660.1, supported by cDNA: 13879., supported by cDNA: supported by cDNA: gi_16226371, supported by cDNA: gi_166836
  misc_feature (1)..(149): Homolog of NCBI NO: 2129944 NR Description: RNA-binding protein RZ-1 - wood tobacco
MHNAELDGRNITVNKAKPRIADYGYGGGGGGYSSGARGGYRSGGDVVPAVSDECFKCGLSGHWARQCPYSDGSGRTGRYSPASRYGGGTGRHGDRFGGSDRFARYDDDRYDGGRYVDSRDTYYGAGRDRYANDRHPPATDLYSGDRYSGADRYASSGFAGRDRYANDRHPPATDRYSGDRYSGARRSASSGFARERSYERDGGRSTGTYYRDVPRGTGGYGRGGSRGGSGGGGGPARFGGSYRDRPAPYDRPSRGGAARAYDDRY

SEQ ID NO: 13395 - protein, 168 aa, Zea mays subsp. mays
  peptide (1)..(168): Ceres Seq. ID no. 12411287
MVLGEIVMLTIAIRQQQTSILVTGTVVQIVTRPVALPGEIVMLTIAIRQQQTAILVTGTVVHVVPRPVALPEKGAMREMEAGPLELTTVMFRGALVAMAEVVHVAVAAAAAGLLALVGVTEIGLLRMTVLAGAGQLVLMMIVTEECFLEVEQRCWCILVLHQYLHLPA

SEQ ID NO: 13396 - DNA, 1274 bp, Zea mays subsp. mays
  misc_feature (1)..(1274): Ceres Seq. ID no. 12411280
  misc_feature: MA Experiment ID: 108504 Result: Up-regulated in Transcription
  misc_feature: MA Experiment 108504 PARAMETER Experiment Name: Zm_Drought_P Parameter: Age (day) Value: 8
  misc_feature: MA Experiment 108504 PARAMETER Experiment Name: Zm_Drought_P Parameter: Organism Value: Zea mays
  misc_feature: MA Experiment 108504 PARAMETER Experiment Name: Zm_Drought_P Parameter: Plant Line Value: 35A19
  misc_feature: MA Experiment 108504 PARAMETER Experiment Name: Zm_Drought_P Parameter: Timepoint (hr) Value: 12
  misc_feature: MA Experiment 108504 PARAMETER Experiment Name: Zm_Drought_P Parameter: Tissue Value: Aerial
  misc_feature: MA Experiment 108504 PARAMETER Experiment Name: Zm_Drought_P Parameter: Treatment Value: Drought vs. No Drought
  misc_feature: MA Experiment ID: 108515 Result: Up-regulated in Transcription
  misc_feature: MA Experiment 108515 PARAMETER Experiment Name: Zm_2mM_SA_P Parameter: Age (day) Value: 8
  misc_feature: MA Experiment 108515 PARAMETER Experiment Name: Zm_2mM_SA_P Parameter: Organism Value: Zea mays
  misc_feature: MA Experiment 108515 PARAMETER Experiment Name: Zm_2mM_SA_P Parameter: Plant Line Value: 35A19
  misc_feature: MA Experiment 108515 PARAMETER Experiment Name: Zm_2mM_SA_P Parameter: Timepoint (hr) Value: 12
  misc_feature: MA Experiment 108515 PARAMETER Experiment Name: Zm_2mM_SA_P Parameter: Tissue Value: Aerial
  misc_feature: MA Experiment 108515 PARAMETER Experiment Name: Zm_2mM_SA_P Parameter: Treatment Value: 2mM SA vs. No Treatment
  misc_feature: MA Experiment ID: 108523 Result: Up-regulated in Transcription
  misc_feature: MA Experiment 108523 PARAMETER Experiment Name: Zm_42deg_Heat_P Parameter: Age (day) Value: 8
  misc_feature: MA Experiment 108523 PARAMETER Experiment Name: Zm_42deg_Heat_P Parameter: Organism Value: Zea mays
  misc_feature: MA Experiment 108523 PARAMETER Experiment Name: Zm_42deg_Heat_P Parameter: Plant Line Value: 35A19
  misc_feature: MA Experiment 108523 PARAMETER Experiment Name: Zm_42deg_Heat_P Parameter: Temperature (deg C) Value: 42 vs. 22
  misc_feature: MA Experiment 108523 PARAMETER Experiment Name: Zm_42deg_Heat_P Parameter: Timepoint (hr) Value: 6
  misc_feature: MA Experiment 108523 PARAMETER Experiment Name: Zm_42deg_Heat_P Parameter: Tissue Value: Aerial
  misc_feature: MA Experiment ID: 108527 Result: Up-regulated in Transcription
  misc_feature: MA Experiment 108527 PARAMETER Experiment Name: Zm_5mM_NO_P Parameter: Age (day) Value: 8
  misc_feature: MA Experiment 108527 PARAMETER Experiment Name: Zm_5mM_NO_P Parameter: Organism Value: Zea mays
  misc_feature: MA Experiment 108527 PARAMETER Experiment Name: Zm_5mM_NO_P Parameter: Plant Line Value: 35A19
  misc_feature: MA Experiment 108527 PARAMETER Experiment Name: Zm_5mM_NO_P Parameter: Timepoint (hr) Value: 6
  misc_feature: MA Experiment 108527 PARAMETER Experiment Name: Zm_5mM_NO_P Parameter: Tissue Value: Aerial
  misc_feature: MA Experiment 108527 PARAMETER Experiment Name: Zm_5mM_NO_P Parameter: Treatment Value: 5mM NO vs. No Treatment
  misc_feature: MA Experiment ID: 108530 Result: Down-regulated in Transcription
  misc_feature: MA Experiment 108530 PARAMETER Experiment Name: Zm_Imbibed_Seeds_P Parameter: Age (day) Value: 6 vs. 2
  misc_feature: MA Experiment 108530 PARAMETER Experiment Name: Zm_Imbibed_Seeds_P Parameter: Organism Value: Zea mays
  misc_feature: MA Experiment 108530 PARAMETER Experiment Name: Zm_Imbibed_Seeds_P Parameter: Plant Line Value: 35A19
  misc_feature: MA Experiment 108530 PARAMETER Experiment Name: Zm_Imbibed_Seeds_P Parameter: Tissue Value: Aerial vs. Embryo
  misc_feature: MA Experiment ID: 108542 Result: Up-regulated in Transcription
  misc_feature: MA Experiment 108542 PARAMETER Experiment Name: Zm_150mM_NaCl_P Parameter: Age (day) Value: 8
  misc_feature: MA Experiment 108542 PARAMETER Experiment Name: Zm_150mM_NaCl_P Parameter: Organism Value: Zea mays
  misc_feature: MA Experiment 108542 PARAMETER Experiment Name: Zm_150mM_NaCl_P Parameter: Plant Line Value: 35A19
  misc_feature: MA Experiment 108542 PARAMETER Experiment Name: Zm_150mM_NaCl_P Parameter: Timepoint (hr) Value: 6
  misc_feature: MA Experiment 108542 PARAMETER Experiment Name: Zm_150mM_NaCl_P Parameter: Tissue Value: Aerial
  misc_feature: MA Experiment 108542 PARAMETER Experiment Name: Zm_150mM_NaCl_P Parameter: Treatment Value: 150mM NaCl vs. No Treatment
  misc_feature: MA Experiment ID: 108547 Result: Down-regulated in Transcription
  misc_feature: MA Experiment 108547 PARAMETER Experiment Name: Zm_Imbibed_Seeds_P Parameter: Age (day) Value: 4 vs. 2
  misc_feature: MA Experiment 108547 PARAMETER Experiment Name: Zm_Imbibed_Seeds_P Parameter: Organism Value: Zea mays
  misc_feature: MA Experiment 108547 PARAMETER Experiment Name: Zm_Imbibed_Seeds_P Parameter: Plant Line Value: 35A19
  misc_feature: MA Experiment 108547 PARAMETER Experiment Name: Zm_Imbibed_Seeds_P Parameter: Tissue Value: Aerial vs. Embryo
  misc_feature: MA Experiment ID: 108556 Result: Up-regulated in Transcription
  misc_feature: MA Experiment 108556 PARAMETER Experiment Name: Zm_Drought_P Parameter: Age (day) Value: 9
  misc_feature: MA Experiment 108556 PARAMETER Experiment Name: Zm_Drought_P Parameter: Organism Value: Zea mays
  misc_feature: MA Experiment 108556 PARAMETER Experiment Name: Zm_Drought_P Parameter: Plant Line Value: 35A19
  misc_feature: MA Experiment 108556 PARAMETER Experiment Name: Zm_Drought_P Parameter: Timepoint (hr) Value: 24
  misc_feature: MA Experiment 108556 PARAMETER Experiment Name: Zm_Drought_P Parameter: Tissue Value: Aerial
  misc_feature: MA Experiment 108556 PARAMETER Experiment Name: Zm_Drought_P Parameter: Treatment Value: Drought vs. No Drought
  misc_feature: MA Experiment ID: 108559 Result: Up-regulated in Transcription
  misc_feature: MA Experiment 108559 PARAMETER Experiment Name: Zm_5mM_NO_P Parameter: Age (day) Value: 8
  misc_feature: MA Experiment 108559 PARAMETER Experiment Name: Zm_5mM_NO_P Parameter: Organism Value: Zea mays
  misc_feature: MA Experiment 108559 PARAMETER Experiment Name: Zm_5mM_NO_P Parameter: Plant Line Value: 35A19
  misc_feature: MA Experiment 108559 PARAMETER Experiment Name: Zm_5mM_NO_P Parameter: Timepoint (hr) Value: 12
  misc_feature: MA Experiment 108559 PARAMETER Experiment Name: Zm_5mM_NO_P Parameter: Tissue Value: Aerial
  misc_feature: MA Experiment 108559 PARAMETER Experiment Name: Zm_5mM_NO_P Parameter: Treatment Value: 5mM NO vs. No Treatment
  misc_feature: MA Experiment ID: 108597 Result: Up-regulated in Transcription
  misc_feature: MA Experiment 108597 PARAMETER Experiment Name: Zm_100uM_ABA_P Parameter: Age (day) Value: 9
  misc_feature: MA Experiment 108597 PARAMETER Experiment Name: Zm_100uM_ABA_P Parameter: Organism Value: Zea mays
  misc_feature: MA Experiment 108597 PARAMETER Experiment Name: Zm_100uM_ABA_P Parameter: Plant Line Value: 35A19
  misc_feature: MA Experiment 108597 PARAMETER Experiment Name: Zm_100uM_ABA_P Parameter: Timepoint (hr) Value: 24
  misc_feature: MA Experiment 108597 PARAMETER Experiment Name: Zm_100uM_ABA_P Parameter: Tissue Value: Aerial
  misc_feature: MA Experiment 108597 PARAMETER Experiment Name: Zm_100uM_ABA_P Parameter: Treatment Value: 100uM ABA vs. No Treatment
  misc_feature: MA Experiment ID: 108689 Result: Up-regulated in Transcription
  misc_feature: MA Experiment 108689 PARAMETER Experiment Name: Zm_Drought_Roots_P Parameter: Age (day) Value: 9
  misc_feature: MA Experiment 108689 PARAMETER Experiment Name: Zm_Drought_Roots_P Parameter: Organism Value: Zea mays
  misc_feature: MA Experiment 108689 PARAMETER Experiment Name: Zm_Drought_Roots_P Parameter: Plant Line Value: 35A19
  misc_feature: MA Experiment 108689 PARAMETER Experiment Name: Zm_Drought_Roots_P Parameter: Timepoint (hr) Value: 24
  misc_feature: MA Experiment 108689 PARAMETER Experiment Name: Zm_Drought_Roots_P Parameter: Tissue Value: Roots
  misc_feature: MA Experiment 108689 PARAMETER Experiment Name: Zm_Drought_Roots_P Parameter: Treatment Value: Drought vs. No Drought
  misc_feature: MA Experiment ID: 20000478 Result: Up-regulated in Transcription
  misc_feature: MA Experiment 20000478 PARAMETER Experiment Name: Zm_5mM_SA_P Parameter: Age (day) Value: 11
  misc_feature: MA Experiment 20000478 PARAMETER Experiment Name: Zm_5mM_SA_P Parameter: Organism Value: Zea mays
  misc_feature: MA Experiment 20000478 PARAMETER Experiment Name: Zm_5mM_SA_P Parameter: Plant Line Value: 35A19
  misc_feature: MA Experiment 20000478 PARAMETER Experiment Name: Zm_5mM_SA_P Parameter: Timepoint (hr) Value: 72
  misc_feature: MA Experiment 20000478 PARAMETER Experiment Name: Zm_5mM_SA_P Parameter: Tissue Value: Aerial
  misc_feature: MA Experiment 20000478 PARAMETER Experiment Name: Zm_5mM_SA_P Parameter: Treatment Value: 5mM SA vs. No Treatment
  misc_feature: MA Experiment ID: 20000479 Result: Up-regulated in Transcription
  misc_feature: MA Experiment 20000479 PARAMETER Experiment Name: Zm_Drought_P Parameter: Age (day) Value: 10
  misc_feature: MA Experiment 20000479 PARAMETER Experiment Name: Zm_Drought_P Parameter: Organism Value: Zea mays
  misc_feature: MA Experiment 20000479 PARAMETER Experiment Name: Zm_Drought_P Parameter: Plant Line Value: 35A19
  misc_feature: MA Experiment 20000479 PARAMETER Experiment Name: Zm_Drought_P Parameter: Timepoint (hr) Value: 48
  misc_feature: MA Experiment 20000479 PARAMETER Experiment Name: Zm_Drought_P Parameter: Tissue Value: Aerial
  misc_feature: MA Experiment 20000479 PARAMETER Experiment Name: Zm_Drought_P Parameter: Treatment Value: Drought vs. No Drought
  misc_feature: MA Experiment ID: 20000480 Result: Up-regulated in Transcription
  misc_feature: MA Experiment 20000480 PARAMETER Experiment Name: Zm_Drought_P Parameter: Age (day) Value: 11
  misc_feature: MA Experiment 20000480 PARAMETER Experiment Name: Zm_Drought_P Parameter: Organism Value: Zea mays
  misc_feature: MA Experiment 20000480 PARAMETER Experiment Name: Zm_Drought_P Parameter: Plant Line Value: 35A19
  misc_feature: MA Experiment 20000480 PARAMETER Experiment Name: Zm_Drought_P Parameter: Timepoint (hr) Value: 72
  misc_feature: MA Experiment 20000480 PARAMETER Experiment Name: Zm_Drought_P Parameter: Tissue Value: Aerial
  misc_feature: MA Experiment 20000480 PARAMETER Experiment Name: Zm_Drought_P Parameter: Treatment Value: Drought vs. No Drought
  misc_feature: MA Experiment ID: 20000488 Result: Up-regulated in Transcription
  misc_feature: MA Experiment 20000488 PARAMETER Experiment Name: Zm_50mM_NH4NO3_L_to_H_P Parameter: Organism Value: Zea mays
  misc_feature: MA Experiment 20000488 PARAMETER Experiment Name: Zm_50mM_NH4NO3_L_to_H_P Parameter: Timepoint (hr) Value: 8
  misc_feature: MA Experiment 20000488 PARAMETER Experiment Name: Zm_50mM_NH4NO3_L_to_H_P Parameter: Tissue Value: Leaves
  misc_feature: MA Experiment 20000488 PARAMETER Experiment Name: Zm_50mM_NH4NO3_L_to_H_P Parameter: Treatment Value: 50mM NH4NO3 vs. 100mM Mannitol
  misc_feature: MA Experiment ID: 20000626 Result: Up-regulated in Transcription
  misc_feature: MA Experiment 20000626 PARAMETER Experiment Name: Zm_Herbicide-Treatments_P Parameter: Timepoint (hr) Value: 12
  misc_feature: MA Experiment 20000626 PARAMETER Experiment Name: Zm_Herbicide-Treatments_P Parameter: Tissue Value: Aerial
  misc_feature: MA Experiment 20000626 PARAMETER Experiment Name: Zm_Herbicide-Treatments_P Parameter: Treatment Value: Roundup vs. No Treatment
  misc_feature: MA Experiment ID: 20001605 Result: Up-regulated in Transcription
  misc_feature: MA Experiment 20001605 PARAMETER Experiment Name: Zm_50ppm_KNO3_L-to-H_P Parameter: Age (day) Value: 19
  misc_feature: MA Experiment 20001605 PARAMETER Experiment Name: Zm_50ppm_KNO3_L-to-H_P Parameter: Organism Value: Zea mays
  misc_feature: MA Experiment 20001605 PARAMETER Experiment Name: Zm_50ppm_KNO3_L-to-H_P Parameter: Plant Line Value: 35A19
  misc_feature: MA Experiment 20001605 PARAMETER Experiment Name: Zm_50ppm_KNO3_L-to-H_P Parameter: Timepoint (hr) Value: 4
  misc_feature: MA Experiment 20001605 PARAMETER Experiment Name: Zm_50ppm_KNO3_L-to-H_P Parameter: Tissue Value: Shoots
  misc_feature: MA Experiment 20001605 PARAMETER Experiment Name: Zm_50ppm_KNO3_L-to-H_P Parameter: Treatment Value: 50ppm KNO3 vs. 50ppm KCl
  misc_feature: MA Experiment ID: 20001606 Result: Up-regulated in Transcription
  misc_feature: MA Experiment 20001606 PARAMETER Experiment Name: Zm_50ppm_KNO3_L-to-H_P Parameter: Age (day) Value: 19
  misc_feature: MA Experiment 20001606 PARAMETER Experiment Name: Zm_50ppm_KNO3_L-to-H_P Parameter: Organism Value: Zea mays
  misc_feature: MA Experiment 20001606 PARAMETER Experiment Name: Zm_50ppm_KNO3_L-to-H_P Parameter: Plant Line Value: 35A19
  misc_feature: MA Experiment 20001606 PARAMETER Experiment Name: Zm_50ppm_KNO3_L-to-H_P Parameter: Timepoint (hr) Value: 8
  misc_feature: MA Experiment 20001606 PARAMETER Experiment Name: Zm_50ppm_KNO3_L-to-H_P Parameter: Tissue Value: Shoots
  misc_feature: MA Experiment 20001606 PARAMETER Experiment Name: Zm_50ppm_KNO3_L-to-H_P Parameter: Treatment Value: 50ppm KNO3 vs. 50ppm KCl
  misc_feature: MA Experiment ID: 20001610 Result: Up-regulated in Transcription
  misc_feature: MA Experiment 20001610 PARAMETER Experiment Name: Zm_50ppm_KNO3_L-to-H_P Parameter: Age (day) Value: 19
  misc_feature: MA Experiment 20001610 PARAMETER Experiment Name: Zm_50ppm_KNO3_L-to-H_P Parameter: Organism Value: Zea mays
  misc_feature: MA Experiment 20001610 PARAMETER Experiment Name: Zm_50ppm_KNO3_L-to-H_P Parameter: Plant Line Value: 35A19
  misc_feature: MA Experiment 20001610 PARAMETER Experiment Name: Zm_50ppm_KNO3_L-to-H_P Parameter: Timepoint (hr) Value: 2
  misc_feature: MA Experiment 20001610 PARAMETER Experiment Name: Zm_50ppm_KNO3_L-to-H_P Parameter: Tissue Value: Roots
  misc_feature: MA Experiment 20001610 PARAMETER Experiment Name: Zm_50ppm_KNO3_L-to-H_P Parameter: Treatment Value: 50ppm KNO3 vs. 50ppm KCl
  misc_feature: MA Experiment ID: 20001612 Result: Up-regulated in Transcription
  misc_feature: MA Experiment 20001612 PARAMETER Experiment Name: Zm_50ppm_KNO3_L-to-H_P Parameter: Age (day) Value: 19
  misc_feature: MA Experiment 20001612 PARAMETER Experiment Name: Zm_50ppm_KNO3_L-to-H_P Parameter: Organism Value: Zea mays
  misc_feature: MA Experiment 20001612 PARAMETER Experiment Name: Zm_50ppm_KNO3_L-to-H_P Parameter: Plant Line Value: 35A19
  misc_feature: MA Experiment 20001612 PARAMETER Experiment Name: Zm_50ppm_KNO3_L-to-H_P Parameter: Timepoint (hr) Value: 8
  misc_feature: MA Experiment 20001612 PARAMETER Experiment Name: Zm_50ppm_KNO3_L-to-H_P Parameter: Tissue Value: Roots
  misc_feature: MA Experiment 20001612 PARAMETER Experiment Name: Zm_50ppm_KNO3_L-to-H_P Parameter: Treatment Value: 50ppm KNO3 vs. 50ppm KCl
  misc_feature: MA Experiment ID: 20001613 Result: Up-regulated in Transcription
  misc_feature: MA Experiment 20001613 PARAMETER Experiment Name: Zm_50ppm_KNO3_L-to-H_P Parameter: Age (day) Value: 20
  misc_feature: MA Experiment 20001613 PARAMETER Experiment Name: Zm_50ppm_KNO3_L-to-H_P Parameter: Organism Value: Zea mays
  misc_feature: MA Experiment 20001613 PARAMETER Experiment Name: Zm_50ppm_KNO3_L-to-H_P Parameter: Plant Line Value: 35A19
  misc_feature: MA Experiment 20001613 PARAMETER Experiment Name: Zm_50ppm_KNO3_L-to-H_P Parameter: Timepoint (hr) Value: 24
  misc_feature: MA Experiment 20001613 PARAMETER Experiment Name: Zm_50ppm_KNO3_L-to-H_P Parameter: Tissue Value: Roots
  misc_feature: MA Experiment 20001613 PARAMETER Experiment Name: Zm_50ppm_KNO3_L-to-H_P Parameter: Treatment Value: 50ppm KNO3 vs. 50ppm KCl
acgccttaaaaacgagatccctggggtcaccactggtcaactgcgtcactgcgccgaatcactagaaaccccaacaaacggaatttcacacatccagcgagcaataccgcaccgcaggtaagatcaaagaggaggcgatggctggcggcgggcaggcggcgatttcgttcatgacgcggatggcgaaggtggcggcggggttgggcgtggcggcgtccgcagcctccacgtccttctacacggtggacggcggagagcgcgccgtcatcttcgatcgcgtccgcggcgtgctcccgcgtacgatgtcagagggcacccatttgctggtccccatccttcagaagcccttcattttcgacatccgcactcgccctcacagcttctcctccacctccggcaccaaggacctccagatggtcagcctcacgctccgcgttctgtcgcgacccgacgtcgaacacctcccggacatcttcacctccctcggcctcgagtacgacgagaaggtcctcccatccatcggcaacgaggtgctcaaggccgtcgtcgcgcagttcaacgccgaccagctcctcaccgagcgtccccacgtctccgcgctcgtccgcgaatcgctcaccaagcgcgcccgcgagttcaacatcgtcctcgacgacgtcgccatcacccacctagcctacgggcaggagttcgcgcaggccgtcgagaagaagcaggttgcgcagcaggaggccgagcgctccaggttcctcgtcgcgcgcgctgagcaggagaggcgcgctgctatcgtccgcgccgagggggagagcgagtccgcgcgccttatctccgaggccacgaccactgcgggcaacggcctgatcgagctcaggaggatcgaggcggccaaggagatcgcaagcgttctgtcgcgcacgcccaacgtctcctacatccccgccggcgacaatggccagatgctgctcgggcttaacgccgcccggtgaatggatcgtctttttccgcgcttcagaatgtcaggacgagatgaaactgttcttggtggggaggagggaaagtttgtttctgtagagcttctagaagtgttgctaagagtctgttttttattaatgaaatggctgggaagtctgtttgtgctcaatagagtgtttcttctgtgaaataaaactggtctatgagatggtgtggcgagctctttgctttgctttgctctctgcaattcagttgtatcccatacatgctgtctttatctctgaaataaaacttttcgagcg

SEQ ID NO: 13397 - protein, 282 aa, Zea mays subsp. mays
  peptide (1)..(282): Ceres Seq. ID no. 12411281
  misc_feature (8)..(280): Homolog of NCBI NO: 40746306 NR Description: conserved hypothetical protein [Aspergillus
  misc_feature (9)..(282): Homolog of NCBI NO: 32421789 NR Description: hypothetical protein [Neurospora crassa] hypothetical protein [Neurospora crassa]
  misc_feature (1)..(282): Homolog of NCBI NO: 7716460 NR Description: prohibitin [Zea mays]
  misc_feature (4)..(280): Homolog of NCBI NO: 7716458 NR Description: prohibitin [Zea mays]
  misc_feature (4)..(281): Homolog of NCBI NO: 38567717 NR Description: B1358B12.15 [Oryza sativa (japonica
  misc_feature (3)..(282): Homolog of NCBI NO: 7489185 NR Description: prohibitin - common tobacco
  misc_feature (3)..(279): Homolog of NCBI NO: 15237488 NR Description: prohibitin (gb|AAC49691.1); protein id: supported by cDNA: 37298., supported by cDNA: gi_15450837, by cDNA: gi_1946330, supported by cDNA: gi_4097691 [Arabidopsis
  misc_feature (3)..(282): Homolog of NCBI NO: 21592895 NR Description: prohibitin, putative [Arabidopsis thaliana]
  misc_feature (3)..(282): Homolog of NCBI NO: 15232129 NR Description: prohibitin, putative; protein id: At3g27280.1, by cDNA: 33731. [Arabidopsis thaliana]
  misc_feature (3)..(282): Homolog of NCBI NO: 27765032 NR Description: At3g27280 [Arabidopsis thaliana]
MAGGGQAAISFMTRMAKVAAGLGVAASAASTSFYTVDGGERAVIFDRVRGVLPRTMSEGTHLLVPILQKPFIFDIRTRPHSFSSTSGTKDLQMVSLTLRVLSRPDVEHLPDIFTSLGLEYDEKVLPSIGNEVLKAVVAQFNADQLLTERPHVSALVRESLTKRAREFNIVLDDVAITHLAYGQEFAQAVEKKQVAQQEAERSRFLVARAEQERRAAIVRAEGESESARLISEATTTAGNGLIELRRIEAAKEIASVLSRTPNVSYIPAGDNGQMLLGLNAAR

SEQ ID NO: 13398 - protein, 271 aa, Zea mays subsp. mays
  peptide (1)..(271): Ceres Seq. ID no. 12411282
  misc_feature (1)..(271): Homolog of NCBI NO: 7716460 NR Description: prohibitin [Zea mays]
  misc_feature (1)..(269): Homolog of NCBI NO: 7716458 NR Description: prohibitin [Zea mays]
  misc_feature (1)..(270): Homolog of NCBI NO: 38567717 NR Description: B1358B12.15 [Oryza sativa (japonica
  misc_feature (1)..(271): Homolog of NCBI NO: 7489185 NR Description: prohibitin - common tobacco
  misc_feature (1)..(268): Homolog of NCBI NO: 15237488 NR Description: prohibitin (gb|AAC49691.1); protein id: supported by cDNA: 37298., supported by cDNA: gi_15450837, by cDNA: gi_1946330, supported by cDNA: gi_4097691 [Arabidopsis
  misc_feature (1)..(271): Homolog of NCBI NO: 21592895 NR Description: prohibitin, putative [Arabidopsis thaliana]
  misc_feature (1)..(271): Homolog of NCBI NO: 15232129 NR Description: prohibitin, putative; protein id: At3g27280.1, by cDNA: 33731. [Arabidopsis thaliana]
  misc_feature (1)..(271): Homolog of NCBI NO: 27765032 NR Description: At3g27280 [Arabidopsis thaliana]
  misc_feature (1)..(269): Homolog of NCBI NO: 40746306 NR Description: conserved hypothetical protein [Aspergillus
  misc_feature (1)..(271): Homolog of NCBI NO: 32421789 NR Description: hypothetical protein [Neurospora crassa] hypothetical protein [Neurospora crassa]
MTRMAKVAAGLGVAASAASTSFYTVDGGERAVIFDRVRGVLPRTMSEGTHLLVPILQKPFIFDIRTRPHSFSSTSGTKDLQMVSLTLRVLSRPDVEHLPDIFTSLGLEYDEKVLPSIGNEVLKAVVAQFNADQLLTERPHVSALVRESLTKRAREFNIVLDDVAITHLAYGQEFAQAVEKKQVAQQEAERSRFLVARAEQERRAAIVRAEGESESARLISEATTTAGNGLIELRRIEAAKEIASVLSRTPNVSYIPAGDNGQMLLGLNAAR

SEQ ID NO: 13399 - protein, 268 aa, Zea mays subsp. mays
  peptide (1)..(268): Ceres Seq. ID no. 12411283
  misc_feature (1)..(268): Homolog of NCBI NO: 7716460 NR Description: prohibitin [Zea mays]
  misc_feature (1)..(266): Homolog of NCBI NO: 7716458 NR Description: prohibitin [Zea mays]
  misc_feature (1)..(267): Homolog of NCBI NO: 38567717 NR Description: B1358B12.15 [Oryza sativa (japonica
  misc_feature (1)..(268): Homolog of NCBI NO: 7489185 NR Description: prohibitin - common tobacco
  misc_feature (1)..(265): Homolog of NCBI NO: 15237488 NR Description: prohibitin (gb|AAC49691.1); protein id: supported by cDNA: 37298., supported by cDNA: gi_15450837, by cDNA: gi_1946330, supported by cDNA: gi_4097691 [Arabidopsis
  misc_feature (1)..(268): Homolog of NCBI NO: 21592895 NR Description: prohibitin, putative [Arabidopsis thaliana]
  misc_feature (1)..(268): Homolog of NCBI NO: 15232129 NR Description: prohibitin, putative; protein id: At3g27280.1, by cDNA: 33731. [Arabidopsis thaliana]
  misc_feature (1)..(268): Homolog of NCBI NO: 27765032 NR Description: At3g27280 [Arabidopsis thaliana]
  misc_feature (1)..(266): Homolog of NCBI NO: 40746306 NR Description: conserved hypothetical protein [Aspergillus
  misc_feature (1)..(268): Homolog of NCBI NO: 32421789 NR Description: hypothetical protein [Neurospora crassa] hypothetical protein [Neurospora crassa]
MAKVAAGLGVAASAASTSFYTVDGGERAVIFDRVRGVLPRTMSEGTHLLVPILQKPFIFDIRTRPHSFSSTSGTKDLQMVSLTLRVLSRPDVEHLPDIFTSLGLEYDEKVLPSIGNEVLKAVVAQFNADQLLTERPHVSALVRESLTKRAREFNIVLDDVAITHLAYGQEFAQAVEKKQVAQQEAERSRFLVARAEQERRAAIVRAEGESESARLISEATTTAGNGLIELRRIEAAKEIASVLSRTPNVSYIPAGDNGQMLLGLNAAR

SEQ ID NO: 13400 - DNA, 1558 bp, Zea mays subsp. mays
  misc_feature (1)..(1558): Ceres Seq. ID no. 12405255
  misc_feature: MA Experiment ID: 108527 Result: Up-regulated in Transcription
  misc_feature: MA Experiment 108527 PARAMETER Experiment Name: Zm_5mM_NO_P Parameter: Age (day) Value: 8
  misc_feature: MA Experiment 108527 PARAMETER Experiment Name: Zm_5mM_NO_P Parameter: Organism Value: Zea mays
  misc_feature: MA Experiment 108527 PARAMETER Experiment Name: Zm_5mM_NO_P Parameter: Plant Line Value: 35A19
  misc_feature: MA Experiment 108527 PARAMETER Experiment Name: Zm_5mM_NO_P Parameter: Timepoint (hr) Value: 6
  misc_feature: MA Experiment 108527 PARAMETER Experiment Name: Zm_5mM_NO_P Parameter: Tissue Value: Aerial
  misc_feature: MA Experiment 108527 PARAMETER Experiment Name: Zm_5mM_NO_P Parameter: Treatment Value: 5mM NO vs. No Treatment
  misc_feature: MA Experiment ID: 108528 Result: Down-regulated in Transcription
  misc_feature: MA Experiment 108528 PARAMETER Experiment Name: Zm_Imbibed_Seeds_P Parameter: Age (day) Value: 5 vs. 2
  misc_feature: MA Experiment 108528 PARAMETER Experiment Name: Zm_Imbibed_Seeds_P Parameter: Organism Value: Zea mays
  misc_feature: MA Experiment 108528 PARAMETER Experiment Name: Zm_Imbibed_Seeds_P Parameter: Plant Line Value: 35A19
  misc_feature: MA Experiment 108528 PARAMETER Experiment Name: Zm_Imbibed_Seeds_P Parameter: Tissue Value: Aerial vs. Embryo
  misc_feature: MA Experiment ID: 108529 Result: Down-regulated in Transcription
  misc_feature: MA Experiment 108529 PARAMETER Experiment Name: Zm_Imbibed_Seeds_P Parameter: Age (day) Value: 5 vs. 2
  misc_feature: MA Experiment 108529 PARAMETER Experiment Name: Zm_Imbibed_Seeds_P Parameter: Organism Value: Zea mays
  misc_feature: MA Experiment 108529 PARAMETER Experiment Name: Zm_Imbibed_Seeds_P Parameter: Plant Line Value: 35A19
  misc_feature: MA Experiment 108529 PARAMETER Experiment Name: Zm_Imbibed_Seeds_P Parameter: Tissue Value: Roots vs. Embryo
  misc_feature: MA Experiment ID: 108530 Result: Down-regulated in Transcription
  misc_feature: MA Experiment 108530 PARAMETER Experiment Name: Zm_Imbibed_Seeds_P Parameter: Age (day) Value: 6 vs. 2
  misc_feature: MA Experiment 108530 PARAMETER Experiment Name: Zm_Imbibed_Seeds_P Parameter: Organism Value: Zea mays
  misc_feature: MA Experiment 108530 PARAMETER Experiment Name: Zm_Imbibed_Seeds_P Parameter: Plant Line Value: 35A19
  misc_feature: MA Experiment 108530 PARAMETER Experiment Name: Zm_Imbibed_Seeds_P Parameter: Tissue Value: Aerial vs. Embryo
  misc_feature: MA Experiment ID: 108532 Result: Up-regulated in Transcription
  misc_feature: MA Experiment 108532 PARAMETER Experiment Name: Zm_20uM_KNO3_H-to-L_P Parameter: Age (day) Value: 11
  misc_feature: MA Experiment 108532 PARAMETER Experiment Name: Zm_20uM_KNO3_H-to-L_P Parameter: Organism Value: Zea mays
  misc_feature: MA Experiment 108532 PARAMETER Experiment Name: Zm_20uM_KNO3_H-to-L_P Parameter: Plant Line Value: 35A19
  misc_feature: MA Experiment 108532 PARAMETER Experiment Name: Zm_20uM_KNO3_H-to-L_P Parameter: Timepoint (hr) Value: 16
  misc_feature: MA Experiment 108532 PARAMETER Experiment Name: Zm_20uM_KNO3_H-to-L_P Parameter: Tissue Value: Roots
  misc_feature: MA Experiment 108532 PARAMETER Experiment Name: Zm_20uM_KNO3_H-to-L_P Parameter: Treatment Value: 20uM KNO3 vs. 60mM KNO3
  misc_feature: MA Experiment ID: 108534 Result: Down-regulated in Transcription
  misc_feature: MA Experiment 108534 PARAMETER Experiment Name: Zm_4deg_Cold_P Parameter: Age (hr) Value: 8
  misc_feature: MA Experiment 108534 PARAMETER Experiment Name: Zm_4deg_Cold_P Parameter: Organism Value: Zea mays
  misc_feature: MA Experiment 108534 PARAMETER Experiment Name: Zm_4deg_Cold_P Parameter: Plant Line Value: 35A19
  misc_feature: MA Experiment 108534 PARAMETER Experiment Name: Zm_4deg_Cold_P Parameter: Temperature (deg C) Value: 4 vs. 22
  misc_feature: MA Experiment 108534 PARAMETER Experiment Name: Zm_4deg_Cold_P Parameter: Timepoint (hr) Value: 6
  misc_feature: MA Experiment 108534 PARAMETER Experiment Name: Zm_4deg_Cold_P Parameter: Tissue Value: Aerial
  misc_feature: MA Experiment ID: 108543 Result: Up-regulated in Transcription
  misc_feature: MA Experiment ID: 20000478 Result: Up-regulated in Transcription
  misc_feature: MA Experiment 20000478 PARAMETER Experiment Name: Zm_5mM_SA_P Parameter: Age (day) Value: 11
  misc_feature: MA Experiment 20000478 PARAMETER Experiment Name: Zm_5mM_SA_P Parameter: Organism Value: Zea mays
  misc_feature: MA Experiment 20000478 PARAMETER Experiment Name: Zm_5mM_SA_P Parameter: Plant Line Value: 35A19
  misc_feature: MA Experiment 20000478 PARAMETER Experiment Name: Zm_5mM_SA_P Parameter: Timepoint (hr) Value: 72
  misc_feature: MA Experiment 20000478 PARAMETER Experiment Name: Zm_5mM_SA_P Parameter: Tissue Value: Aerial
  misc_feature: MA Experiment 20000478 PARAMETER Experiment Name: Zm_5mM_SA_P Parameter: Treatment Value: 5mM SA vs. No Treatment
  misc_feature: MA Experiment ID: 20000488 Result: Up-regulated in Transcription
  misc_feature: MA Experiment 20000488 PARAMETER Experiment Name: Zm_50mM_NH4NO3_L_to_H_P Parameter: Organism Value: Zea mays
  misc_feature: MA Experiment 20000488 PARAMETER Experiment Name: Zm_50mM_NH4NO3_L_to_H_P Parameter: Timepoint (hr) Value: 8
  misc_feature: MA Experiment 20000488 PARAMETER Experiment Name: Zm_50mM_NH4NO3_L_to_H_P Parameter: Tissue Value: Leaves
  misc_feature: MA Experiment 20000488 PARAMETER Experiment Name: Zm_50mM_NH4NO3_L_to_H_P Parameter: Treatment Value: 50mM NH4NO3 vs. 100mM Mannitol
  misc_feature: MA Experiment ID: 20000626 Result: Up-regulated in Transcription
  misc_feature: MA Experiment 20000626 PARAMETER Experiment Name: Zm_Herbicide-Treatments_P Parameter: Timepoint (hr) Value: 12
  misc_feature: MA Experiment 20000626 PARAMETER Experiment Name: Zm_Herbicide-Treatments_P Parameter: Tissue Value: Aerial
  misc_feature: MA Experiment 20000626 PARAMETER Experiment Name: Zm_Herbicide-Treatments_P Parameter: Treatment Value: Roundup vs. No Treatment
  misc_feature: MA Experiment ID: 20000627 Result: Up-regulated in Transcription
  misc_feature: MA Experiment 20000627 PARAMETER Experiment Name: Zm_Herbicide-Treatments_P Parameter: Timepoint (hr) Value: 12
  misc_feature: MA Experiment 20000627 PARAMETER Experiment Name: Zm_Herbicide-Treatments_P Parameter: Tissue Value: Aerial
  misc_feature: MA Experiment 20000627 PARAMETER Experiment Name: Zm_Herbicide-Treatments_P Parameter: Treatment Value: Finale vs. No Treatment
aaccaaagccgccaccgttgccgtagccgtgttcttggactctgttacgtgctgccattttgccaaggctagccccctcctcctcttcttcctcttcttcttttcgcgacgatcagagaagaagatgacgatcaccattgaacagccccagctcgatgcggtggcggagaggaaagtccccggcggaggcgaccccgcggagctggtgctcgacgccggcttcgtcgtgccggacgccaacgccttcggcaataccttcaggaactacgacgcggagtcggagcggaagcagacggtagaggagttctaccgggtgaaccacgtgaggcagacgcacgagttcgtggcgcggatgcgggcggagtacgggcggctggacaagacggagatgggcatctgggagtgcatcgagctgctgaacgagttcatcgacgacagcgacccggacctggacatgccccagatcgagcacctgctgcagaccgccgaggccatccgcaaggactaccccgacgaggactggctccacctcaccggactcatccacgacctgggcaaggtgctgctgcacccaagcttcggggagctccctcagtgggctgtcgtcggtgacaccttccccgtcggctgcgcatacgacgagtgcaacgtccacttcaagtacttcaaggagaaccccgactaccacaacccgaagctcaacaccaagttgggggtctactcggagggctgcggcctcgacaaggtgctcatgtcatggggccacgacgactacatgtacctggtggccaaggagaacaagtgcacccttccttccgcggggctgttcatcatcagataccactcgttctacccactgcacaagcatggagcctacacgcacctgatggacgatgaggacaaggagaacctcaagtggctgcatgtgttcaacaagtatgacctgtacagcaagagcaacagcaggatcgacgtggaggaggtgaagccctactacatgtccctaatcgacaagtacttcccggccaagctaagatggtgagaaggggcggcctggcctggacctggatgatagatggaaccccaaggccccaccaagagctgtcgttccaagtgtccatgtaccatatacatatctctactactctataagactctattgtagaccatccgtgcaccgcggttctgccactctctgttccgcccaccaccggtcgtatgacaggtgggtcccatgtgtcagtccatcacgcttccgtccgaccgtcatccagatttccgtgatacagccgtctccacgacgagattggcgacgtcctccctgcgcccgcagcccccccccccccccggctgccgcacgcatgcccctgcttcactcacgcccggctcctccctcttcgctcgactccccacacggtcgtcggtcgtcgctcctccttgagtagaactagtatatagactacgaatacagtatgtgtgccatgtacggtcattttttacagagttgagaagagtacccatgccgtttcgaataaaagttgcctgcgtttgttccttc

SEQ ID NO: 13401 - protein, 346 aa, Zea mays subsp. mays
  peptide (1)..(346): Ceres Seq. ID no. 12405256
  misc_feature (90)..(346): Pfam Name: Family of unknown function (DUF706) Pfam Description: Family of unknown function (DUF706)
  misc_feature (42)..(346): Homolog of NCBI NO: 30683840 NR Description: expressed protein [Arabidopsis thaliana] unknown protein [Arabidopsis thaliana]
  misc_feature (42)..(346): Homolog of NCBI NO: 26451656 NR Description: unknown protein [Arabidopsis thaliana]
  misc_feature (42)..(338): Homolog of NCBI NO: 7262695 NR Description: Strong similarity to an unknown protein from
  misc_feature (42)..(346): Homolog of NCBI NO: 30687167 NR Description: expressed protein [Arabidopsis thaliana]
  misc_feature (52)..(346): Homolog of NCBI NO: 7487428 NR Description: hypothetical protein T25K17.70 - Arabidopsis >gi|4539422|emb|CAB38955.1| putative protein [Arabidopsis >gi|7269477|emb|CAB79481.1| putative protein [Arabidopsis
  misc_feature (42)..(346): Homolog of NCBI NO: 18399158 NR Description: expressed protein; protein id: At2g19800.1, by cDNA: 254633. [Arabidopsis thaliana]
  misc_feature (42)..(346): Homolog of NCBI NO: 21554393 NR Description: unknown [Arabidopsis thaliana]
  misc_feature (71)..(346): Homolog of NCBI NO: 21536858 NR Description: unknown [Arabidopsis thaliana]
  misc_feature (71)..(346): Homolog of NCBI NO: 15241891 NR Description: putative protein; protein id: At5g56640.1, by cDNA: 113619. [Arabidopsis thaliana] gene_id:MIK19.9~pir||T06010~similar to unknown protein
  misc_feature (105)..(346): Homolog of NCBI NO: 13877657 NR Description: Unknown protein [Arabidopsis thaliana]
TKAATVAVAVFLDSVTCCHFAKASPLLLFFLFFFSRRSEKKMTITIEQPQLDAVAERKVPGGGDPAELVLDAGFVVPDANAFGNTFRNYDAESERKQTVEEFYRVNHVRQTHEFVARMRAEYGRLDKTEMGIWECIELLNEFIDDSDPDLDMPQIEHLLQTAEAIRKDYPDEDWLHLTGLIHDLGKVLLHPSFGELPQWAVVGDTFPVGCAYDECNVHFKYFKENPDYHNPKLNTKLGVYSEGCGLDKVLMSWGHDDYMYLVAKENKCTLPSAGLFIIRYHSFYPLHKHGAYTHLMDDEDKENLKWLHVFNKYDLYSKSNSRIDVEEVKPYYMSLIDKYFPAKLRW

SEQ ID NO: 13402 - protein, 305 aa, Zea mays subsp. mays
  peptide (1)..(305): Ceres Seq. ID no. 12405257
  misc_feature (49)..(305): Pfam Name: Family of unknown function (DUF706) Pfam Description: Family of unknown function (DUF706)
  misc_feature (1)..(305): Homolog of NCBI NO: 30683840 NR Description: expressed protein [Arabidopsis thaliana] unknown protein [Arabidopsis thaliana]
  misc_feature (1)..(305): Homolog of NCBI NO: 26451656 NR Description: unknown protein [Arabidopsis thaliana]
  misc_feature (1)..(297): Homolog of NCBI NO: 7262695 NR Description: Strong similarity to an unknown protein from
  misc_feature (1)..(305): Homolog of NCBI NO: 30687167 NR Description: expressed protein [Arabidopsis thaliana]
  misc_feature (11)..(305): Homolog of NCBI NO: 7487428 NR Description: hypothetical protein T25K17.70 - Arabidopsis >gi|4539422|emb|CAB38955.1| putative protein [Arabidopsis >gi|7269477|emb|CAB79481.1| putative protein [Arabidopsis
  misc_feature (1)..(305): Homolog of NCBI NO: 18399158 NR Description: expressed protein; protein id: At2g19800.1, by cDNA: 254633. [Arabidopsis thaliana]
  misc_feature (1)..(305): Homolog of NCBI NO: 21554393 NR Description: unknown [Arabidopsis thaliana]
  misc_feature (30)..(305): Homolog of NCBI NO: 21536858 NR Description: unknown [Arabidopsis thaliana]
  misc_feature (30)..(305): Homolog of NCBI NO: 15241891 NR Description: putative protein; protein id: At5g56640.1, by cDNA: 113619. [Arabidopsis thaliana] gene_id:MIK19.9~pir||T06010~similar to unknown protein
  misc_feature (64)..(305): Homolog of NCBI NO: 13877657 NR Description: Unknown protein [Arabidopsis thaliana]
MTITIEQPQLDAVAERKVPGGGDPAELVLDAGFVVPDANAFGNTFRNYDAESERKQTVEEFYRVNHVRQTHEFVARMRAEYGRLDKTEMGIWECIELLNEFIDDSDPDLDMPQIEHLLQTAEAIRKDYPDEDWLHLTGLIHDLGKVLLHPSFGELPQWAVVGDTFPVGCAYDECNVHFKYFKENPDYHNPKLNTKLGVYSEGCGLDKVLMSWGHDDYMYLVAKENKCTLPSAGLFIIRYHSFYPLHKHGAYTHLMDDEDKENLKWLHVFNKYDLYSKSNSRIDVEEVKPYYMSLIDKYFPAKLRW

SEQ ID NO: 13403 - protein, 229 aa, Zea mays subsp. mays
  peptide (1)..(229): Ceres Seq. ID no. 12405258
  misc_feature (1)..(229): Pfam Name: Family of unknown function (DUF706) Pfam Description: Family of unknown function (DUF706)
  misc_feature (1)..(229): Homolog of NCBI NO: 30683840 NR Description: expressed protein [Arabidopsis thaliana] unknown protein [Arabidopsis thaliana]
  misc_feature (1)..(229): Homolog of NCBI NO: 26451656 NR Description: unknown protein [Arabidopsis thaliana]
  misc_feature (1)..(221): Homolog of NCBI NO: 7262695 NR Description: Strong similarity to an unknown protein from
  misc_feature (1)..(229): Homolog of NCBI NO: 30687167 NR Description: expressed protein [Arabidopsis thaliana]
  misc_feature (1)..(229): Homolog of NCBI NO: 7487428 NR Description: hypothetical protein T25K17.70 - Arabidopsis >gi|4539422|emb|CAB38955.1| putative protein [Arabidopsis >gi|7269477|emb|CAB79481.1| putative protein [Arabidopsis
  misc_feature (1)..(229): Homolog of NCBI NO: 18399158 NR Description: expressed protein; protein id: At2g19800.1, by cDNA: 254633. [Arabidopsis thaliana]
  misc_feature (1)..(229): Homolog of NCBI NO: 21554393 NR Description: unknown [Arabidopsis thaliana]
  misc_feature (1)..(229): Homolog of NCBI NO: 21536858 NR Description: unknown [Arabidopsis thaliana]
  misc_feature (1)..(229): Homolog of NCBI NO: 15241891 NR Description: putative protein; protein id: At5g56640.1, by cDNA: 113619. [Arabidopsis thaliana] gene_id:MIK19.9~pir||T06010~similar to unknown protein
  misc_feature (1)..(229): Homolog of NCBI NO: 13877657 NR Description: Unknown protein [Arabidopsis thaliana]
MRAEYGRLDKTEMGIWECIELLNEFIDDSDPDLDMPQIEHLLQTAEAIRKDYPDEDWLHLTGLIHDLGKVLLHPSFGELPQWAVVGDTFPVGCAYDECNVHFKYFKENPDYHNPKLNTKLGVYSEGCGLDKVLMSWGHDDYMYLVAKENKCTLPSAGLFIIRYHSFYPLHKHGAYTHLMDDEDKENLKWLHVFNKYDLYSKSNSRIDVEEVKPYYMSLIDKYFPAKLRW

SEQ ID NO: 13404 - DNA, 1347 bp, Zea mays subsp. mays
  misc_feature (1)..(1347): Ceres Seq. ID no. 12405869
  misc_feature: MA Experiment ID: 108523 Result: Up-regulated in Transcription
  misc_feature: MA Experiment 108523 PARAMETER Experiment Name: Zm_42deg_Heat_P Parameter: Age (day) Value: 8
  misc_feature: MA Experiment 108523 PARAMETER Experiment Name: Zm_42deg_Heat_P Parameter: Organism Value: Zea mays
  misc_feature: MA Experiment 108523 PARAMETER Experiment Name: Zm_42deg_Heat_P Parameter: Plant Line Value: 35A19
  misc_feature: MA Experiment 108523 PARAMETER Experiment Name: Zm_42deg_Heat_P Parameter: Temperature (deg C) Value: 42 vs. 22
  misc_feature: MA Experiment 108523 PARAMETER Experiment Name: Zm_42deg_Heat_P Parameter: Timepoint (hr) Value: 6
  misc_feature: MA Experiment 108523 PARAMETER Experiment Name: Zm_42deg_Heat_P Parameter: Tissue Value: Aerial
  misc_feature: MA Experiment ID: 108527 Result: Up-regulated in Transcription
  misc_feature: MA Experiment 108527 PARAMETER Experiment Name: Zm_5mM_NO_P Parameter: Age (day) Value: 8
  misc_feature: MA Experiment 108527 PARAMETER Experiment Name: Zm_5mM_NO_P Parameter: Organism Value: Zea mays
  misc_feature: MA Experiment 108527 PARAMETER Experiment Name: Zm_5mM_NO_P Parameter: Plant Line Value: 35A19
  misc_feature: MA Experiment 108527 PARAMETER Experiment Name: Zm_5mM_NO_P Parameter: Timepoint (hr) Value: 6
  misc_feature: MA Experiment 108527 PARAMETER Experiment Name: Zm_5mM_NO_P Parameter: Tissue Value: Aerial
  misc_feature: MA Experiment 108527 PARAMETER Experiment Name: Zm_5mM_NO_P Parameter: Treatment Value: 5mM NO vs. No Treatment
  misc_feature: MA Experiment ID: 108529 Result: Down-regulated in Transcription
  misc_feature: MA Experiment 108529 PARAMETER Experiment Name: Zm_Imbibed_Seeds_P Parameter: Age (day) Value: 5 vs. 2
  misc_feature: MA Experiment 108529 PARAMETER Experiment Name: Zm_Imbibed_Seeds_P Parameter: Organism Value: Zea mays
  misc_feature: MA Experiment 108529 PARAMETER Experiment Name: Zm_Imbibed_Seeds_P Parameter: Plant Line Value: 35A19
  misc_feature: MA Experiment 108529 PARAMETER Experiment Name: Zm_Imbibed_Seeds_P Parameter: Tissue Value: Roots vs. Embryo
  misc_feature: MA Experiment ID: 108532 Result: Down-regulated in Transcription
  misc_feature: MA Experiment 108532 PARAMETER Experiment Name: Zm_20uM_KNO3_H-to-L_P Parameter: Age (day) Value: 11
  misc_feature: MA Experiment 108532 PARAMETER Experiment Name: Zm_20uM_KNO3_H-to-L_P Parameter: Organism Value: Zea mays
  misc_feature: MA Experiment 108532 PARAMETER Experiment Name: Zm_20uM_KNO3_H-to-L_P Parameter: Plant Line Value: 35A19
  misc_feature: MA Experiment 108532 PARAMETER Experiment Name: Zm_20uM_KNO3_H-to-L_P Parameter: Timepoint (hr) Value: 16
  misc_feature: MA Experiment 108532 PARAMETER Experiment Name: Zm_20uM_KNO3_H-to-L_P Parameter: Tissue Value: Roots
  misc_feature: MA Experiment 108532 PARAMETER Experiment Name: Zm_20uM_KNO3_H-to-L_P Parameter: Treatment Value: 20uM KNO3 vs. 60mM KNO3
  misc_feature: MA Experiment ID: 108543 Result: Down-regulated in Transcription
  misc_feature: MA Experiment ID: 108544 Result: Up-regulated in Transcription
  misc_feature: MA Experiment ID: 108545 Result: Down-regulated in Transcription
  misc_feature: MA Experiment 108545 PARAMETER Experiment Name: Zm_Imbibed_Seeds_P Parameter: Age (day) Value: 3 vs. 2
  misc_feature: MA Experiment 108545 PARAMETER Experiment Name: Zm_Imbibed_Seeds_P Parameter: Organism Value: Zea mays
  misc_feature: MA Experiment 108545 PARAMETER Experiment Name: Zm_Imbibed_Seeds_P Parameter: Plant Line Value: 35A19
  misc_feature: MA Experiment 108545 PARAMETER Experiment Name: Zm_Imbibed_Seeds_P Parameter: Tissue Value: Aerial vs. Embryo
  misc_feature: MA Experiment ID: 108546 Result: Down-regulated in Transcription
  misc_feature: MA Experiment 108546 PARAMETER Experiment Name: Zm_Imbibed_Seeds_P Parameter: Age (day) Value: 3 vs. 2
  misc_feature: MA Experiment 108546 PARAMETER Experiment Name: Zm_Imbibed_Seeds_P Parameter: Organism Value: Zea mays
  misc_feature: MA Experiment 108546 PARAMETER Experiment Name: Zm_Imbibed_Seeds_P Parameter: Plant Line Value: 35A19
  misc_feature: MA Experiment 108546 PARAMETER Experiment Name: Zm_Imbibed_Seeds_P Parameter: Tissue Value: Roots vs. Embryo
  misc_feature: MA Experiment ID: 108559 Result: Up-regulated in Transcription
  misc_feature: MA Experiment 108559 PARAMETER Experiment Name: Zm_5mM_NO_P Parameter: Age (day) Value: 8
  misc_feature: MA Experiment 108559 PARAMETER Experiment Name: Zm_5mM_NO_P Parameter: Organism Value: Zea mays
  misc_feature: MA Experiment 108559 PARAMETER Experiment Name: Zm_5mM_NO_P Parameter: Plant Line Value: 35A19
  misc_feature: MA Experiment 108559 PARAMETER Experiment Name: Zm_5mM_NO_P Parameter: Timepoint (hr) Value: 12
  misc_feature: MA Experiment 108559 PARAMETER Experiment Name: Zm_5mM_NO_P Parameter: Tissue Value: Aerial
  misc_feature: MA Experiment 108559 PARAMETER Experiment Name: Zm_5mM_NO_P Parameter: Treatment Value: 5mM NO vs. No Treatment
  misc_feature: MA Experiment ID: 108687 Result: Up-regulated in Transcription
  misc_feature: MA Experiment 108687 PARAMETER Experiment Name: Zm_Embryos-Flowers__P Parameter: Tissue Value: Embryo vs. Aerial+
  misc_feature: MA Experiment ID: 108689 Result: Down-regulated in Transcription
  misc_feature: MA Experiment 108689 PARAMETER Experiment Name: Zm_Drought_Roots_P Parameter: Age (day) Value: 9
  misc_feature: MA Experiment 108689 PARAMETER Experiment Name: Zm_Drought_Roots_P Parameter: Organism Value: Zea mays
  misc_feature: MA Experiment 108689 PARAMETER Experiment Name: Zm_Drought_Roots_P Parameter: Plant Line Value: 35A19
  misc_feature: MA Experiment 108689 PARAMETER Experiment Name: Zm_Drought_Roots_P Parameter: Timepoint (hr) Value: 24
  misc_feature: MA Experiment 108689 PARAMETER Experiment Name: Zm_Drought_Roots_P Parameter: Tissue Value: Roots
  misc_feature: MA Experiment 108689 PARAMETER Experiment Name: Zm_Drought_Roots_P Parameter: Treatment Value: Drought vs. No Drought
  misc_feature: MA Experiment ID: 20000477 Result: Up-regulated in Transcription
  misc_feature: MA Experiment 20000477 PARAMETER Experiment Name: Zm_5mM_SA_P Parameter: Age (day) Value: 10
  misc_feature: MA Experiment 20000477 PARAMETER Experiment Name: Zm_5mM_SA_P Parameter: Organism Value: Zea mays
  misc_feature: MA Experiment 20000477 PARAMETER Experiment Name: Zm_5mM_SA_P Parameter: Plant Line Value: 35A19
  misc_feature: MA Experiment 20000477 PARAMETER Experiment Name: Zm_5mM_SA_P Parameter: Timepoint (hr) Value: 48
  misc_feature: MA Experiment 20000477 PARAMETER Experiment Name: Zm_5mM_SA_P Parameter: Tissue Value: Aerial
  misc_feature: MA Experiment 20000477 PARAMETER Experiment Name: Zm_5mM_SA_P Parameter: Treatment Value: 5mM SA vs. No Treatment
  misc_feature: MA Experiment ID: 20000479 Result: Up-regulated in Transcription
  misc_feature: MA Experiment 20000479 PARAMETER Experiment Name: Zm_Drought_P Parameter: Age (day) Value: 10
  misc_feature: MA Experiment 20000479 PARAMETER Experiment Name: Zm_Drought_P Parameter: Organism Value: Zea mays
  misc_feature: MA Experiment 20000479 PARAMETER Experiment Name: Zm_Drought_P Parameter: Plant Line Value: 35A19
  misc_feature: MA Experiment 20000479 PARAMETER Experiment Name: Zm_Drought_P Parameter: Timepoint (hr) Value: 48
  misc_feature: MA Experiment 20000479 PARAMETER Experiment Name: Zm_Drought_P Parameter: Tissue Value: Aerial
  misc_feature: MA Experiment 20000479 PARAMETER Experiment Name: Zm_Drought_P Parameter: Treatment Value: Drought vs. No Drought
  misc_feature: MA Experiment ID: 20000487 Result: Down-regulated in Transcription
  misc_feature: MA Experiment 20000487 PARAMETER Experiment Name: Zm_50mM_NH4NO3_L_to_H_P Parameter: Organism Value: Zea mays
  misc_feature: MA Experiment 20000487 PARAMETER Experiment Name: Zm_50mM_NH4NO3_L_to_H_P Parameter: Timepoint (hr) Value: 4
  misc_feature: MA Experiment 20000487 PARAMETER Experiment Name: Zm_50mM_NH4NO3_L_to_H_P Parameter: Tissue Value: Leaves
  misc_feature: MA Experiment 20000487 PARAMETER Experiment Name: Zm_50mM_NH4NO3_L_to_H_P Parameter: Treatment Value: 50mM NH4NO3 vs. 100mM Mannitol
  misc_feature: MA Experiment ID: 20000488 Result: Down-regulated in Transcription
  misc_feature: MA Experiment 20000488 PARAMETER Experiment Name: Zm_50mM_NH4NO3_L_to_H_P Parameter: Organism Value: Zea mays
  misc_feature: MA Experiment 20000488 PARAMETER Experiment Name: Zm_50mM_NH4NO3_L_to_H_P Parameter: Timepoint (hr) Value: 8
  misc_feature: MA Experiment 20000488 PARAMETER Experiment Name: Zm_50mM_NH4NO3_L_to_H_P Parameter: Tissue Value: Leaves
  misc_feature: MA Experiment 20000488 PARAMETER Experiment Name: Zm_50mM_NH4NO3_L_to_H_P Parameter: Treatment Value: 50mM NH4NO3 vs. 100mM Mannitol
  misc_feature: MA Experiment ID: 20000535 Result: Up-regulated in Transcription
  misc_feature: MA Experiment 20000535 PARAMETER Experiment Name: Zm_Hybrid_Seed_Dev_P Parameter: DAP Value: 30 vs. 12
  misc_feature: MA Experiment 20000535 PARAMETER Experiment Name: Zm_Hybrid_Seed_Dev_P Parameter: Organism Value: Zea mays
  misc_feature: MA Experiment 20000535 PARAMETER Experiment Name: Zm_Hybrid_Seed_Dev_P Parameter: Plant Line Value: 35A19
  misc_feature: MA Experiment 20000535 PARAMETER Experiment Name: Zm_Hybrid_Seed_Dev_P Parameter: Tissue Value: Embryo vs. Unfert Floret
  misc_feature: MA Experiment ID: 20001610 Result: Down-regulated in Transcription
  misc_feature: MA Experiment 20001610 PARAMETER Experiment Name: Zm_50ppm_KNO3_L-to-H_P Parameter: Age (day) Value: 19
  misc_feature: MA Experiment 20001610 PARAMETER Experiment Name: Zm_50ppm_KNO3_L-to-H_P Parameter: Organism Value: Zea mays
  misc_feature: MA Experiment 20001610 PARAMETER Experiment Name: Zm_50ppm_KNO3_L-to-H_P Parameter: Plant Line Value: 35A19
  misc_feature: MA Experiment 20001610 PARAMETER Experiment Name: Zm_50ppm_KNO3_L-to-H_P Parameter: Timepoint (hr) Value: 2
  misc_feature: MA Experiment 20001610 PARAMETER Experiment Name: Zm_50ppm_KNO3_L-to-H_P Parameter: Tissue Value: Roots
  misc_feature: MA Experiment 20001610 PARAMETER Experiment Name: Zm_50ppm_KNO3_L-to-H_P Parameter: Treatment Value: 50ppm KNO3 vs. 50ppm KCl
accaatacagcactggaccactatatatccccccgccccgcgctggggccggtccccagctagcgagcgccgccggtgccagtgcaacagaacacgcaccacacgggcgcagactgcagagacaacagatcgatcgtccaatggcgatcggcgggtcggaggccggcgggggaggcgcggggagcatgaggagcgtgctggtgacgggcggcgcggggttcatcggcacgcacacggtgctgcgcctgctggagcagggctacatcgtcaccgtcgtcgacaacttccacaactccgtccccgaggcgctcgaccgcgtccgcctcatcgccggccccgcgctctccacccgcctcgacttcatccgcggggacctgaggaacaccgatgacttggagaaggtgttcgctgccaggaggtacgacgccgtcatccacttcgctgggctgaaggccgtgggggagagcgtcgcgcacccggagatgtactacgagaacaacctcatcggcaccatcaacctctacaagagcatgaaggagcacggctgcaagaagctggttttctcgtcatccgccaccgtgtacggctggccggaggtgatcccatgcgtcgaggactccaagctgcaggccgccaacccatacggcaggaccaagcttatccttgaggatatggcgcgtgactaccaccgcgcggacacggagtggagcatcgtcctgctgcgctacttcaaccccatcggtgcgcacagctccggcgagatcggagaggaccccaaggggataccgaacaacctgctgccctacatccagcaggtcgccgtcggcaggctccccgagctcaacgtctacggccacgattaccccacccgggacggcaccgcgatcagggactacatacacgtcgtcgacctcgccgatgggcacatcgcagcgctcaagaagctcttcgactctcctgatataggttgtgtggcctacaatctgggtacagggcgcggcacatccgttctggagatggtggcggcgttcaagaaggcctccggcaaggagattcccaccaagttgtgccccaggagaccgggtgacgcgacggaggtttacgcgtccactgagaaggctgaaagagagcttgcatggagggcccaatatggaatcgaggagatgtgcagggaccaatggaactgggccaagaagaacccgtatggctactgcggcggtgcaaaaaaatagcgtaggttcgtcgcaatgaagaattgtcgatagtagttctcttctctacactaatcaatggaacatgtaataaacacggaccacctaatctctactagtttctatggtttccact

SEQ ID NO: 13405 - protein, 409 aa, Zea mays subsp. mays
  peptide (1)..(409): Ceres Seq. ID no. 12405870
  misc_feature (65)..(400): Pfam Name: NAD dependent epimerase/dehydratase family Pfam Description: NAD dependent epimerase/dehydratase family
  misc_feature (49)..(409): Homolog of NCBI NO: 26106014 NR Description: putative UDP-glucose 4-epimerase [Oryza sativa
  misc_feature (61)..(405): Homolog of NCBI NO: 11386762 NR Description: UDP-glucose 4-epimerase (Galactowaldenase)
  misc_feature (58)..(403): Homolog of NCBI NO: 15222072 NR Description: uridine diphosphate glucose epimerase; protein At1g12780.1, supported by cDNA: gi_12248020, supported by cDNA:
  misc_feature (58)..(403): Homolog of NCBI NO: 18407751 NR Description: uridine diphosphate glucose epimerase, putative; id: At1g63180.1, supported by cDNA: 1932. [Arabidopsis thaliana]
  misc_feature (58)..(403): Homolog of NCBI NO: 25292327 NR Description: hypothetical protein F16M19.8 [imported] - thaliana >gi|12323247|gb|AAG51599.1|AC010795_3 uridine
  misc_feature (58)..(403): Homolog of NCBI NO: 2129759 NR Description: UDPglucose 4-epimerase (EC 5.1.3.2) - Arabidopsis >gi|1143392|emb|CAA90941.1| uridine diphosphate glucose epimerase
  misc_feature (61)..(405): Homolog of NCBI NO: 11386774 NR Description: UDP-glucose 4-epimerase GEPI42 (Galactowaldenase)
  misc_feature (61)..(408): Homolog of NCBI NO: 11386775 NR Description: UDP-glucose 4-epimerase GEPI48 (Galactowaldenase)
  misc_feature (62)..(403): Homolog of NCBI NO: 21715990 NR Description: UDP-glucose 4-epimerase [Oryza sativa (japonica
  misc_feature (63)..(403): Homolog of NCBI NO: 15236663 NR Description: UDPglucose 4-epimerase - like protein; protein
QYSTGPLYIPPPRAGAGPQLASAAGASATEHAPHGRRLQRQQIDRPMAIGGSEAGGGGAGSMRSVLVTGGAGFIGTHTVLRLLEQGYIVTVVDNFHNSVPEALDRVRLIAGPALSTRLDFIRGDLRNTDDLEKVFAARRYDAVIHFAGLKAVGESVAHPEMYYENNLIGTINLYKSMKEHGCKKLVFSSSATVYGWPEVIPCVEDSKLQAANPYGRTKLILEDMARDYHRADTEWSIVLLRYFNPIGAHSSGEIGEDPKGIPNNLLPYIQQVAVGRLPELNVYGHDYPTRDGTAIRDYIHVVDLADGHIAALKKLFDSPDIGCVAYNLGTGRGTSVLEMVAAFKKASGKEIPTKLCPRRPGDATEVYASTEKAERELAWRAQYGIEEMCRDQWNWAKKNPYGYCGGAKK

SEQ ID NO: 13406 - protein, 363 aa, Zea mays subsp. mays
  peptide (1)..(363): Ceres Seq. ID no. 12405871
  misc_feature (19)..(354): Pfam Name: NAD dependent epimerase/dehydratase family Pfam Description: NAD dependent epimerase/dehydratase family
  misc_feature (3)..(363): Homolog of NCBI NO: 26106014 NR Description: putative UDP-glucose 4-epimerase [Oryza sativa
  misc_feature (15)..(359): Homolog of NCBI NO: 11386762 NR Description: UDP-glucose 4-epimerase (Galactowaldenase)
  misc_feature (12)..(357): Homolog of NCBI NO: 15222072 NR Description: uridine diphosphate glucose epimerase; protein At1g12780.1, supported by cDNA: gi_12248020, supported by cDNA:
  misc_feature (12)..(357): Homolog of NCBI NO: 18407751 NR Description: uridine diphosphate glucose epimerase, putative; id: At1g63180.1, supported by cDNA: 1932. [Arabidopsis thaliana]
  misc_feature (12)..(357): Homolog of NCBI NO: 25292327 NR Description: hypothetical protein F16M19.8 [imported] - thaliana >gi|12323247|gb|AAG51599.1|AC010795_3 uridine
  misc_feature (12)..(357): Homolog of NCBI NO: 2129759 NR Description: UDPglucose 4-epimerase (EC 5.1.3.2) - Arabidopsis >gi|1143392|emb|CAA90941.1| uridine diphosphate glucose epimerase
  misc_feature (15)..(359): Homolog of NCBI NO: 11386774 NR Description: UDP-glucose 4-epimerase GEPI42 (Galactowaldenase)
  misc_feature (15)..(362): Homolog of NCBI NO: 11386775 NR Description: UDP-glucose 4-epimerase GEPI48 (Galactowaldenase)
  misc_feature (16)..(357): Homolog of NCBI NO: 21715990 NR Description: UDP-glucose 4-epimerase [Oryza sativa (japonica
  misc_feature (17)..(357): Homolog of NCBI NO: 15236663 NR Description: UDPglucose 4-epimerase - like protein; protein
MAIGGSEAGGGGAGSMRSVLVTGGAGFIGTHTVLRLLEQGYIVTVVDNFHNSVPEALDRVRLIAGPALSTRLDFIRGDLRNTDDLEKVFAARRYDAVIHFAGLKAVGESVAHPEMYYENNLIGTINLYKSMKEHGCKKLVFSSSATVYGWPEVIPCVEDSKLQAANPYGRTKLILEDMARDYHRADTEWSIVLLRYFNPIGAHSSGEIGEDPKGIPNNLLPYIQQVAVGRLPELNVYGHDYPTRDGTAIRDYIHVVDLADGHIAALKKLFDSPDIGCVAYNLGTGRGTSVLEMVAAFKKASGKEIPTKLCPRRPGDATEVYASTEKAERELAWRAQYGIEEMCRDQWNWAKKNPYGYCGGAKK

SEQ ID NO: 13407 - protein, 348 aa, Zea mays subsp. mays
  peptide (1)..(348): Ceres Seq. ID no. 12405872
  misc_feature (4)..(339): Pfam Name: NAD dependent epimerase/dehydratase family Pfam Description: NAD dependent epimerase/dehydratase family
  misc_feature (1)..(348): Homolog of NCBI NO: 26106014 NR Description: putative UDP-glucose 4-epimerase [Oryza sativa
  misc_feature (1)..(344): Homolog of NCBI NO: 11386762 NR Description: UDP-glucose 4-epimerase (Galactowaldenase)
  misc_feature (1)..(342): Homolog of NCBI NO: 15222072 NR Description: uridine diphosphate glucose epimerase; protein At1g12780.1, supported by cDNA: gi_12248020, supported by cDNA:
  misc_feature (1)..(342): Homolog of NCBI NO: 18407751 NR Description: uridine diphosphate glucose epimerase, putative; id: At1g63180.1, supported by cDNA: 1932. [Arabidopsis thaliana]
  misc_feature (1)..(342): Homolog of NCBI NO: 25292327 NR Description: hypothetical protein F16M19.8 [imported] - thaliana >gi|12323247|gb|AAG51599.1|AC010795_3 uridine
  misc_feature (1)..(342): Homolog of NCBI NO: 2129759 NR Description: UDPglucose 4-epimerase (EC 5.1.3.2) - Arabidopsis >gi|1143392|emb|CAA90941.1| uridine diphosphate glucose epimerase
  misc_feature (1)..(344): Homolog of NCBI NO: 11386774 NR Description: UDP-glucose 4-epimerase GEPI42 (Galactowaldenase)
  misc_feature (1)..(347): Homolog of NCBI NO: 11386775 NR Description: UDP-glucose 4-epimerase GEPI48 (Galactowaldenase)
  misc_feature (1)..(342): Homolog of NCBI NO: 21715990 NR Description: UDP-glucose 4-epimerase [Oryza sativa (japonica
  misc_feature (2)..(342): Homolog of NCBI NO: 15236663 NR Description: UDPglucose 4-epimerase - like protein; protein
MRSVLVTGGAGFIGTHTVLRLLEQGYIVTVVDNFHNSVPEALDRVRLIAGPALSTRLDFIRGDLRNTDDLEKVFAARRYDAVIHFAGLKAVGESVAHPEMYYENNLIGTINLYKSMKEHGCKKLVFSSSATVYGWPEVIPCVEDSKLQAANPYGRTKLILEDMARDYHRADTEWSIVLLRYFNPIGAHSSGEIGEDPKGIPNNLLPYIQQVAVGRLPELNVYGHDYPTRDGTAIRDYIHVVDLADGHIAALKKLFDSPDIGCVAYNLGTGRGTSVLEMVAAFKKASGKEIPTKLCPRRPGDATEVYASTEKAERELAWRAQYGIEEMCRDQWNWAKKNPYGYCGGAKK

SEQ ID NO: 13408 - DNA, 1763 bp, Zea mays subsp. mays
  misc_feature (1)..(1763): Ceres Seq. ID no. 12347809
  misc_feature: MA Experiment ID: 108535 Result: Up-regulated in Transcription
  misc_feature: MA Experiment 108535 PARAMETER Experiment Name: Zm_Meristem_P Parameter: Age (day) Value: 8
  misc_feature: MA Experiment 108535 PARAMETER Experiment Name: Zm_Meristem_P Parameter: Organism Value: Zea mays
  misc_feature: MA Experiment 108535 PARAMETER Experiment Name: Zm_Meristem_P Parameter: Plant Line Value: 35A19
  misc_feature: MA Experiment 108535 PARAMETER Experiment Name: Zm_Meristem_P Parameter: Tissue Value: Root Meristem vs. Above Root Meristem
actattgaagcagactccacccggcgcgtcctcgtctcgtctcgtctcgcacgcacccctcactttccttgtcaatcgactcgcgatcgaatccgccccgagtcgattccgccgcggaccgaccggttcacttcccttttctcccgagatctcgactctcgagcaagtatgggtgaggcgaaggacaacgaggtgtacgaggaggacctagtcgactatgaggaggaggtggagaatgtcattgatggcgcccccaccaacggctcctcagatgtcgtcaagaaggggtacgtagggatccacagctcggggttcagagacttcctgctcaagccagagcttcttcgcgccattcaggattgcgggtttgagcatccttctgaagtgcaacatgagtgcatccctcaagctattcttggaatggatgtcatctgtcaagcaaaatctggaatgggtaagactgcagtttttgtcctgtcaactcttcagcagattgatcctgttgctggccaagtagctgcacttgtgttgtgccacacaagagaattagcttaccagatttgccatgaatttgagaggtttagcaaatacctgcctgaattaagagtagctgttttctatggtggtgttcacataaaaaaccacaaggatctgctgaagaatgaatgcccccatattgtggttggcacgcctggaaggatactagctctagctagagataaggaccttcccttgaagaatgtgcggcatttcattcttgatgaatgtgacaagatgctcgaatcacttgacatgcgcagagatgtccaggagatcttcaaaatgactccgcatgataagcaagtgatgatgttttcagcaacactcagcaaggagattcgacctgtttgcaagaggttcatgcaagatcctatggaaatttatgttgatgatgaggctaaactgacccttcatggtctagttcagcactatatcaaattaagtgaggcagagaagaaccgaaagttgaacgatcttttagatgcactcgacttcaaccaagttgtgatatttgttaaaagtgttagtagagctgcagaactcaacaaattgctctgcgagtgcaatttcccctcaatctgtatacattctggaatgacacaggaagagaggttgacacggtacaagaacttcaaggaaggacacaagaggattcttgtggctactgatttggttggtaggggaatcgacattgaacgtgtcaacattgtcgtaaactatgatatgcctgattccgctgatacatacctgcatagggttggtcgggctggacgttttggtaccaagggacttgcaataacatttgtttcttcttcatctgattctgatgttctcaatcaagtgcaggagaggtttgaggttgacataaaggagctgcctgagcagattgacacgtcgacatacatgccatcttgatgatcgaggtgaaccagtgtttagtttgagctggaaaggagagcttgtttgaaatatacaccttagatcgctgttggacaaccttagcaccttgtttgaaagatgttccatttgtacttaaccagcagtctagtggattaagcagtaggcgtcgcaacagctgttacatgctacctaggattttatttgcaactctgtaatgttttctatgctccgactgctaattgttctgtttgagactgccctctgggtgcatgttttactagtaaattactcgcaccatgcccgagtcttcggagcatgtgttt

SEQ ID NO: 13409 - protein, 484 aa, Zea mays subsp. mays
  peptide (1)..(484): Ceres Seq. ID no. 12347810
  misc_feature (116)..(323): Pfam Name: DEAD/DEAH box helicase Pfam Description: DEAD/DEAH box helicase
  misc_feature (57)..(484): Homolog of NCBI NO: 18416493 NR Description: DEAD/DEAH box RNA helicase, putative; protein id: supported by cDNA: gi_14190380, supported by cDNA: gi_16323359 thaliana] >gi|14190381|gb|AAK55671.1|AF378868_1
  misc_feature (57)..(484): Homolog of NCBI NO: 18416486 NR Description: DEAD/DEAH box RNA helicase, putative; protein id:
  misc_feature (56)..(484): Homolog of NCBI NO: 11358797 NR Description: RNA helicase RH15 [imported] - Arabidopsis (fragment) >gi|3776005|emb|CAA09205.1| RNA helicase [Arabidopsis
  misc_feature (57)..(481): Homolog of NCBI NO: 8953382 NR Description: DEAD BOX RNA helicase RH15 [Arabidopsis thaliana]
  misc_feature (57)..(481): Homolog of NCBI NO: 8953379 NR Description: DEAD BOX RNA helicase RH15-like protein
  misc_feature (57)..(460): Homolog of NCBI NO: 34913868 NR Description: putative DEAD BOX RNA helicase [Oryza sativa
  misc_feature (141)..(484): Homolog of NCBI NO: 30683509 NR Description: DEAD/DEAH box helicase, putative [Arabidopsis
  misc_feature (62)..(482): Homolog of NCBI NO: 4758112 NR Description: HLA-B associated transcript-1; DEAD-box protein;
  misc_feature (62)..(482): Homolog of NCBI NO: 30585031 NR Description: Homo sapiens HLA-B associated transcript 1
  misc_feature (62)..(482): Homolog of NCBI NO: 28278325 NR Description: Unknown (protein for MGC:55433) [Danio rerio]
TIEADSTRRVLVSSRLARTPHFPCQSTRDRIRPESIPPRTDRFTSLFSRDLDSRASMGEAKDNEVYEEDLVDYEEEVENVIDGAPTNGSSDVVKKGYVGIHSSGFRDFLLKPELLRAIQDCGFEHPSEVQHECIPQAILGMDVICQAKSGMGKTAVFVLSTLQQIDPVAGQVAALVLCHTRELAYQICHEFERFSKYLPELRVAVFYGGVHIKNHKDLLKNECPHIVVGTPGRILALARDKDLPLKNVRHFILDECDKMLESLDMRRDVQEIFKMTPHDKQVMMFSATLSKEIRPVCKRFMQDPMEIYVDDEAKLTLHGLVQHYIKLSEAEKNRKLNDLLDALDFNQVVIFVKSVSRAAELNKLLCECNFPSICIHSGMTQEERLTRYKNFKEGHKRILVATDLVGRGIDIERVNIVVNYDMPDSADTYLHRVGRAGRFGTKGLAITFVSSSSDSDVLNQVQERFEVDIKELPEQIDTSTYMPS

SEQ ID NO: 13410 - protein, 428 aa, Zea mays subsp. mays
  peptide (1)..(428): Ceres Seq. ID no. 12347811
  misc_feature (60)..(267): Pfam Name: DEAD/DEAH box helicase Pfam Description: DEAD/DEAH box helicase
  misc_feature (1)..(428): Homolog of NCBI NO: 18416493 NR Description: DEAD/DEAH box RNA helicase, putative; protein id: supported by cDNA: gi_14190380, supported by cDNA: gi_16323359 thaliana] >gi|14190381|gb|AAK55671.1|AF378868_1
  misc_feature (1)..(428): Homolog of NCBI NO: 18416486 NR Description: DEAD/DEAH box RNA helicase, putative; protein id:
  misc_feature (1)..(428): Homolog of NCBI NO: 11358797 NR Description: RNA helicase RH15 [imported] - Arabidopsis (fragment) >gi|3776005|emb|CAA09205.1| RNA helicase [Arabidopsis
  misc_feature (1)..(425): Homolog of NCBI NO: 8953382 NR Description: DEAD BOX RNA helicase RH15 [Arabidopsis thaliana]
  misc_feature (1)..(425): Homolog of NCBI NO: 8953379 NR Description: DEAD BOX RNA helicase RH15-like protein
  misc_feature (1)..(404): Homolog of NCBI NO: 34913868 NR Description: putative DEAD BOX RNA helicase [Oryza sativa
  misc_feature (85)..(428): Homolog of NCBI NO: 30683509 NR Description: DEAD/DEAH box helicase, putative [Arabidopsis
  misc_feature (6)..(426): Homolog of NCBI NO: 4758112 NR Description: HLA-B associated transcript-1; DEAD-box protein;
  misc_feature (6)..(426): Homolog of NCBI NO: 30585031 NR Description: Homo sapiens HLA-B associated transcript 1
  misc_feature (6)..(426): Homolog of NCBI NO: 28278325 NR Description: Unknown (protein for MGC:55433) [Danio rerio]
MGEAKDNEVYEEDLVDYEEEVENVIDGAPTNGSSDVVKKGYVGIHSSGFRDFLLKPELLRAIQDCGFEHPSEVQHECIPQAILGMDVICQAKSGMGKTAVFVLSTLQQIDPVAGQVAALVLCHTRELAYQICHEFERFSKYLPELRVAVFYGGVHIKNHKDLLKNECPHIVVGTPGRILALARDKDLPLKNVRHFILDECDKMLESLDMRRDVQEIFKMTPHDKQVMMFSATLSKEIRPVCKRFMQDPMEIYVDDEAKLTLHGLVQHYIKLSEAEKNRKLNDLLDALDFNQVVIFVKSVSRAAELNKLLCECNFPSICIHSGMTQEERLTRYKNFKEGHKRILVATDLVGRGIDIERVNIVVNYDMPDSADTYLHRVGRAGRFGTKGLAITFVSSSSDSDVLNQVQERFEVDIKELPEQIDTSTYMPS

SEQ ID NO: 13411 - protein, 344 aa, Zea mays subsp. mays
  peptide (1)..(344): Ceres Seq. ID no. 12347812
  misc_feature (1)..(183): Pfam Name: DEAD/DEAH box helicase Pfam Description: DEAD/DEAH box helicase
  misc_feature (1)..(344): Homolog of NCBI NO: 18416493 NR Description: DEAD/DEAH box RNA helicase, putative; protein id: supported by cDNA: gi_14190380, supported by cDNA: gi_16323359 thaliana] >gi|14190381|gb|AAK55671.1|AF378868_1
  misc_feature (1)..(344): Homolog of NCBI NO: 18416486 NR Description: DEAD/DEAH box RNA helicase, putative; protein id:
  misc_feature (1)..(344): Homolog of NCBI NO: 11358797 NR Description: RNA helicase RH15 [imported] - Arabidopsis (fragment) >gi|3776005|emb|CAA09205.1| RNA helicase [Arabidopsis
  misc_feature (1)..(341): Homolog of NCBI NO: 8953382 NR Description: DEAD BOX RNA helicase RH15 [Arabidopsis thaliana]
  misc_feature (1)..(341): Homolog of NCBI NO: 8953379 NR Description: DEAD BOX RNA helicase RH15-like protein
  misc_feature (1)..(320): Homolog of NCBI NO: 34913868 NR Description: putative DEAD BOX RNA helicase [Oryza sativa
  misc_feature (1)..(344): Homolog of NCBI NO: 30683509 NR Description: DEAD/DEAH box helicase, putative [Arabidopsis
  misc_feature (1)..(342): Homolog of NCBI NO: 4758112 NR Description: HLA-B associated transcript-1; DEAD-box protein;
  misc_feature (1)..(342): Homolog of NCBI NO: 30585031 NR Description: Homo sapiens HLA-B associated transcript 1
  misc_feature (1)..(342): Homolog of NCBI NO: 28278325 NR Description: Unknown (protein for MGC:55433) [Danio rerio]
MDVICQAKSGMGKTAVFVLSTLQQIDPVAGQVAALVLCHTRELAYQICHEFERFSKYLPELRVAVFYGGVHIKNHKDLLKNECPHIVVGTPGRILALARDKDLPLKNVRHFILDECDKMLESLDMRRDVQEIFKMTPHDKQVMMFSATLSKEIRPVCKRFMQDPMEIYVDDEAKLTLHGLVQHYIKLSEAEKNRKLNDLLDALDFNQVVIFVKSVSRAAELNKLLCECNFPSICIHSGMTQEERLTRYKNFKEGHKRILVATDLVGRGIDIERVNIVVNYDMPDSADTYLHRVGRAGRFGTKGLAITFVSSSSDSDVLNQVQERFEVDIKELPEQIDTSTYMPS

SEQ ID NO: 13412 - DNA, 1466 bp, Zea mays subsp. mays
  misc_feature (1)..(1466): Ceres Seq. ID no. 12411276
  misc_feature: MA Experiment ID: 108544 Result: Up-regulated in Transcription
  misc_feature: MA Experiment ID: 20000477 Result: Up-regulated in Transcription
  misc_feature: MA Experiment 20000477 PARAMETER Experiment Name: Zm_5mM_SA_P Parameter: Age (day) Value: 10
  misc_feature: MA Experiment 20000477 PARAMETER Experiment Name: Zm_5mM_SA_P Parameter: Organism Value: Zea mays
  misc_feature: MA Experiment 20000477 PARAMETER Experiment Name: Zm_5mM_SA_P Parameter: Plant Line Value: 35A19
  misc_feature: MA Experiment 20000477 PARAMETER Experiment Name: Zm_5mM_SA_P Parameter: Timepoint (hr) Value: 48
  misc_feature: MA Experiment 20000477 PARAMETER Experiment Name: Zm_5mM_SA_P Parameter: Tissue Value: Aerial
  misc_feature: MA Experiment 20000477 PARAMETER Experiment Name: Zm_5mM_SA_P Parameter: Treatment Value: 5mM SA vs. No Treatment
  misc_feature: MA Experiment ID: 20000478 Result: Up-regulated in Transcription
  misc_feature: MA Experiment 20000478 PARAMETER Experiment Name: Zm_5mM_SA_P Parameter: Age (day) Value: 11
  misc_feature: MA Experiment 20000478 PARAMETER Experiment Name: Zm_5mM_SA_P Parameter: Organism Value: Zea mays
  misc_feature: MA Experiment 20000478 PARAMETER Experiment Name: Zm_5mM_SA_P Parameter: Plant Line Value: 35A19
  misc_feature: MA Experiment 20000478 PARAMETER Experiment Name: Zm_5mM_SA_P Parameter: Timepoint (hr) Value: 72
  misc_feature: MA Experiment 20000478 PARAMETER Experiment Name: Zm_5mM_SA_P Parameter: Tissue Value: Aerial
  misc_feature: MA Experiment 20000478 PARAMETER Experiment Name: Zm_5mM_SA_P Parameter: Treatment Value: 5mM SA vs. No Treatment
  misc_feature: MA Experiment ID: 20000626 Result: Up-regulated in Transcription
  misc_feature: MA Experiment 20000626 PARAMETER Experiment Name: Zm_Herbicide-Treatments_P Parameter: Timepoint (hr) Value: 12
  misc_feature: MA Experiment 20000626 PARAMETER Experiment Name: Zm_Herbicide-Treatments_P Parameter: Tissue Value: Aerial
  misc_feature: MA Experiment 20000626 PARAMETER Experiment Name: Zm_Herbicide-Treatments_P Parameter: Treatment Value: Roundup vs. No Treatment
aaggaagacgcctctctagattggatcgaattccttcgtttctctcctcaccgaggacggcggagagagacgaggaggaaaggcccggcgcgacggagaagctgaatatctgatatgggtgaaaccatgggaaggagaacagtcagtggccttcttgtcaccaaaggaggctcaattcttgtcttcagggaggaaagcccacgccacaaggccaccgcatgttgtacccgcctctggtgcagcagtaagcttttcccgaacaaagacacgaatacacgcagggcatccagggaaacatcggctcttcagagatcacaagtgtctaggaaatccaactggatgtcccatcaaggaagtatttcttatgatcgaagcaccagtaggaatacagcaagtacttttggtgagactcacaacaaaccaagagaaaaagaaaatctcgggtgtgatctaccggctcggttgaaagaaaggatcaatacatccaggaaaagctcattgggtggactgggaagtcctaacaaatcatcaacaaacacatcaagcagtagccgatcggtttcaagatcagtatgtcggccagcatcgagaatgagaaaggatggaggaaggggcgcagaatctatgaggatgcatagagccagagatagtggtggtagctcttggggagatgtgttgacaagaaattctgaccaagattcttcacacaggtctctatctcgaaacgtgttgaggcataggagcagatctcagcaagggccaatatcatcattggaggataatttagatgattccagtgaatactggcattttgatacagatgacagtgaagaggttgaggatgactatgcctttaatgatcagcataggggaatgagaatggacattgataacatgtcttatgaggacctacttgcgcttggggagagaataggtactgtaagcactggtctttcagatgatgcgctttctgagtgtctgaagagaaacctctatgtgcccacaacttcaagcagcaatgaagatggtgacatcaaatgcatcatatgtctggaggagtactcttctggtgtggaggtggccaagatggcatgcgagcattactaccataccacttgtatccaacagtggcttcagcaaaagaactggtgcccgatttgtaaatgtgacgcttctgccattagctcatagtgttcttgacagtaacagaagtatcagttcattgtaatcaaataggattacacaagtttttttggttctagaacaaattattcacttcaatcctatactgctcttcaattcacactacacttgtcataggaagcaggaaaataagtcctagaagaaaggattttctcagttttgatgttgaagttgaagagtagatgatagtgttgccattctttacatacaaaagcgtcaaaaattcagcattaatagtgcagtttttgtttgccatcgttttc

SEQ ID NO: 13413 - protein, 358 aa, Zea mays subsp. mays
  peptide (1)..(358): Ceres Seq. ID no. 12411277
  misc_feature (309)..(349): Pfam Name: Zinc finger, C3HC4 type (RING finger) Pfam Description: Zinc finger, C3HC4 type (RING finger)
  misc_feature (5)..(355): Homolog of NCBI NO: 40253261 NR Description: DNA binding zinc finger protein-like [Oryza
  misc_feature (1)..(350): Homolog of NCBI NO: 38344153 NR Description: OSJNBa0041A02.20 [Oryza sativa (japonica
  misc_feature (44)..(355): Homolog of NCBI NO: 30689641 NR Description: RING finger-related protein [Arabidopsis thaliana]
  misc_feature (245)..(353): Homolog of NCBI NO: 10129643 NR Description: Pspzf zinc finger protein-like [Arabidopsis
  misc_feature (245)..(353): Homolog of NCBI NO: 20466428 NR Description: Pspzf zinc finger protein-like [Arabidopsis
  misc_feature (245)..(353): Homolog of NCBI NO: 22326712 NR Description: Pspzf zinc finger protein - like; protein id:
  misc_feature (201)..(357): Homolog of NCBI NO: 7486381 NR Description: hypothetical protein F3L17.20 - Arabidopsis >gi|5262756|emb|CAB45904.1| putative protein [Arabidopsis >gi|7270048|emb|CAB79863.1| putative protein [Arabidopsis
  misc_feature (201)..(357): Homolog of NCBI NO: 18417809 NR Description: putative protein; protein id: At4g31450.1, by cDNA: gi_15983461 [Arabidopsis thaliana] AT4g31450/F3L17_20 [Arabidopsis thaliana]
  misc_feature (85)..(350): Homolog of NCBI NO: 4240031 NR Description: DNA binding zinc finger protein (Pspzf) [Pisum
  misc_feature (198)..(354): Homolog of NCBI NO: 34896014 NR Description: ESTs C25947(C11252) correspond to a region of the predicted to Lotus japonicus gene encoding RING finger protein (Y09539)
MGETMGRRTVSGLLVTKGGSILVFREESPRHKATACCTRLWCSSKLFPNKDTNTRRASRETSALQRSQVSRKSNWMSHQGSISYDRSTSRNTASTFGETHNKPREKENLGCDLPARLKERINTSRKSSLGGLGSPNKSSTNTSSSSRSVSRSVCRPASRMRKDGGRGAESMRMHRARDSGGSSWGDVLTRNSDQDSSHRSLSRNVLRHRSRSQQGPISSLEDNLDDSSEYWHFDTDDSEEVEDDYAFNDQHRGMRMDIDNMSYEDLLALGERIGTVSTGLSDDALSECLKRNLYVPTTSSSNEDGDIKCIICLEEYSSGVEVAKMACEHYYHTTCIQQWLQQKNWCPICKCDASAISS

SEQ ID NO: 13414 - protein, 354 aa, Zea mays subsp. mays
  peptide (1)..(354): Ceres Seq. ID no. 12411278
  misc_feature (305)..(345): Pfam Name: Zinc finger, C3HC4 type (RING finger) Pfam Description: Zinc finger, C3HC4 type (RING finger)
  misc_feature (1)..(351): Homolog of NCBI NO: 40253261 NR Description: DNA binding zinc finger protein-like [Oryza
  misc_feature (1)..(346): Homolog of NCBI NO: 38344153 NR Description: OSJNBa0041A02.20 [Oryza sativa (japonica
  misc_feature (40)..(351): Homolog of NCBI NO: 30689641 NR Description: RING finger-related protein [Arabidopsis thaliana]
  misc_feature (241)..(349): Homolog of NCBI NO: 10129643 NR Description: Pspzf zinc finger protein-like [Arabidopsis
  misc_feature (241)..(349): Homolog of NCBI NO: 20466428 NR Description: Pspzf zinc finger protein-like [Arabidopsis
  misc_feature (241)..(349): Homolog of NCBI NO: 22326712 NR Description: Pspzf zinc finger protein - like; protein id:
  misc_feature (197)..(353): Homolog of NCBI NO: 7486381 NR Description: hypothetical protein F3L17.20 - Arabidopsis >gi|5262756|emb|CAB45904.1| putative protein [Arabidopsis >gi|7270048|emb|CAB79863.1| putative protein [Arabidopsis
  misc_feature (197)..(353): Homolog of NCBI NO: 18417809 NR Description: putative protein; protein id: At4g31450.1, by cDNA: gi_15983461 [Arabidopsis thaliana] AT4g31450/F3L17_20 [Arabidopsis thaliana]
  misc_feature (81)..(346): Homolog of NCBI NO: 4240031 NR Description: DNA binding zinc finger protein (Pspzf) [Pisum
  misc_feature (194)..(350): Homolog of NCBI NO: 34896014 NR Description: ESTs C25947(C11252) correspond to a region of the predicted to Lotus japonicus gene encoding RING finger protein (Y09539)
MGRRTVSGLLVTKGGSILVFREESPRHKATACCTRLWCSSKLFPNKDTNTRRASRETSALQRSQVSRKSNWMSHQGSISYDRSTSRNTASTFGETHNKPREKENLGCDLPARLKERINTSRKSSLGGLGSPNKSSTNTSSSSRSVSRSVCRPASRMRKDGGRGAESMRMHRARDSGGSSWGDVLTRNSDQDSSHRSLSRNVLRHRSRSQQGPISSLEDNLDDSSEYWHFDTDDSEEVEDDYAFNDQHRGMRMDIDNMSYEDLLALGERIGTVSTGLSDDALSECLKRNLYVPTTSSSNEDGDIKCIICLEEYSSGVEVAKMACEHYYHTTCIQQWLQQKNWCPICKCDASAISS

SEQ ID NO: 13415 - protein, 283 aa, Zea mays subsp. mays
  peptide (1)..(283): Ceres Seq. ID no. 12411279
  misc_feature (234)..(274): Pfam Name: Zinc finger, C3HC4 type (RING finger) Pfam Description: Zinc finger, C3HC4 type (RING finger)
  misc_feature (1)..(280): Homolog of NCBI NO: 40253261 NR Description: DNA binding zinc finger protein-like [Oryza
  misc_feature (1)..(275): Homolog of NCBI NO: 38344153 NR Description: OSJNBa0041A02.20 [Oryza sativa (japonica
  misc_feature (1)..(280): Homolog of NCBI NO: 30689641 NR Description: RING finger-related protein [Arabidopsis thaliana]
  misc_feature (170)..(278): Homolog of NCBI NO: 10129643 NR Description: Pspzf zinc finger protein-like [Arabidopsis
  misc_feature (170)..(278): Homolog of NCBI NO: 20466428 NR Description: Pspzf zinc finger protein-like [Arabidopsis
  misc_feature (170)..(278): Homolog of NCBI NO: 22326712 NR Description: Pspzf zinc finger protein - like; protein id:
  misc_feature (126)..(282): Homolog of NCBI NO: 7486381 NR Description: hypothetical protein F3L17.20 - Arabidopsis >gi|5262756|emb|CAB45904.1| putative protein [Arabidopsis >gi|7270048|emb|CAB79863.1| putative protein [Arabidopsis
  misc_feature (126)..(282): Homolog of NCBI NO: 18417809 NR Description: putative protein; protein id: At4g31450.1, by cDNA: gi_15983461 [Arabidopsis thaliana] AT4g31450/F3L17_20 [Arabidopsis thaliana]
  misc_feature (10)..(275): Homolog of NCBI NO: 4240031 NR Description: DNA binding zinc finger protein (Pspzf) [Pisum
  misc_feature (123)..(279): Homolog of NCBI NO: 34896014 NR Description: ESTs C25947(C11252) correspond to a region of the predicted to Lotus japonicus gene encoding RING finger protein (Y09539)
MSHQGSISYDRSTSRNTASTFGETHNKPREKENLGCDLPARLKERINTSRKSSLGGLGSPNKSSTNTSSSSRSVSRSVCRPASRMRKDGGRGAESMRMHRARDSGGSSWGDVLTRNSDQDSSHRSLSRNVLRHRSRSQQGPISSLEDNLDDSSEYWHFDTDDSEEVEDDYAFNDQHRGMRMDIDNMSYEDLLALGERIGTVSTGLSDDALSECLKRNLYVPTTSSSNEDGDIKCIICLEEYSSGVEVAKMACEHYYHTTCIQQWLQQKNWCPICKCDASAISS

SEQ ID NO: 13416 - DNA, 1339 bp, Zea mays subsp. mays
  misc_feature (1)..(1339): Ceres Seq. ID no. 12411272
  misc_feature: MA Experiment ID: 108528 Result: Down-regulated in Transcription
  misc_feature: MA Experiment 108528 PARAMETER Experiment Name: Zm_Imbibed_Seeds_P Parameter: Age (day) Value: 5 vs. 2
  misc_feature: MA Experiment 108528 PARAMETER Experiment Name: Zm_Imbibed_Seeds_P Parameter: Organism Value: Zea mays
  misc_feature: MA Experiment 108528 PARAMETER Experiment Name: Zm_Imbibed_Seeds_P Parameter: Plant Line Value: 35A19
  misc_feature: MA Experiment 108528 PARAMETER Experiment Name: Zm_Imbibed_Seeds_P Parameter: Tissue Value: Aerial vs. Embryo
  misc_feature: MA Experiment ID: 20000108 Result: Up-regulated in Transcription
  misc_feature: MA Experiment 20000108 PARAMETER Experiment Name: Zm_Root-Tips_P Parameter: Age (day) Value: 12
  misc_feature: MA Experiment 20000108 PARAMETER Experiment Name: Zm_Root-Tips_P Parameter: Organism Value: Zea mays
  misc_feature: MA Experiment 20000108 PARAMETER Experiment Name: Zm_Root-Tips_P Parameter: Tissue Value: Root tips vs. Root mid region    35
  misc_feature: MA Experiment 20000108 PARAMETER Experiment Name: Zm_Root-Tips_P Parameter: Tissue Value: Root tips vs. Root mid region   Sequence Listing-Misc Features (4)
  misc_feature: MA Experiment ID: 20000534 Result: Down-regulated in Transcription
  misc_feature: MA Experiment 20000534 PARAMETER Experiment Name: Zm_Hybrid_Pollen_P Parameter: Age (day) Value: 8
  misc_feature: MA Experiment 20000534 PARAMETER Experiment Name: Zm_Hybrid_Pollen_P Parameter: Organism Value: Zea mays
  misc_feature: MA Experiment 20000534 PARAMETER Experiment Name: Zm_Hybrid_Pollen_P Parameter: Plant Line Value: 35A19
  misc_feature: MA Experiment 20000534 PARAMETER Experiment Name: Zm_Hybrid_Pollen_P Parameter: Tissue Value: Pollen vs. Aerial
aatagaagcgagcgagcgagcagcagtaggcagcggcgcgggcgaggagcagaccagcacccagcgccctcgtcggggggcggcacgtgcagcttcaccagccgccgcctttcccccgtctgcctctgcctctgcctctccccctaacccccttccatttctccaccccaccccgctcccgcttccgcttcctcgccacttagttcgttgccaccacgccgcggctgcgttcgcattgggggcacgcaatggagcagtacgagaaggtggagaagatcggggagggcacgtacggggtggtgtacaaggcgctggacaaggccaccaacgagacgatcgcgctcaagaagatccgcctcgagcaggaggacgagggcgtcccgtccaccgccatccgcgagatctctctcctcaaggagatgaaccacggcaacatcgtcagattacatgatgttgtccacagcgagaagcgcatataccttgtcttcgagtacctggatctggacctcaagaagttcatggactcctgcccggagtttgctaagaatcccactttgatcaagtcatacctctaccagatactccacggtgttgcgtactgccattctcatagagttcttcatcgagacttgaaacctcaaaacttattgatagatcggcgcactaatgcactgaagcttgcagactttggtttagccagggcatttggaattcctgtccgtacatttactcatgaggtagtgacattatggtacagagctccagaaattctgcttggagcgcggcagtattccacaccagttgatgtgtggtctgtgggctgtatctttgcggaaatggtgaaccaaaagccactattccctggcgattctgagatcgacgaactttttaagatattcaggatactaggtacaccgaatgagcagagttggccaggagtcagttgtttgcctgacttcaagacagctttccccaggtggcaagctcaggacctggcaacagtagtcccaaatcttgaccctgctgggttggaccttctctctaaaatgcttcgatacgagccaagcaaaagaatcacagcgaggcaagcacttgagcatgagtacttcaaggaccttgaagtggtacagtgacctgctaaatgtgcttgacgttgcattgacatttgtatgagctgagtcgctcattcctttttatgaacgcctgtactcttctcattctctccctgcatttttgtcattcagctggatatttcgaatctggtgtgttttgagatgtattaaagaacgtcaaatagattaccgccttggtctctgtccattgaaagtaaatatccgtc

SEQ ID NO: 13417 - protein, 294 aa, Zea mays subsp. mays
  peptide (1)..(294): Ceres Seq. ID no. 12411273
  misc_feature (4)..(287): Pfam Name: Protein kinase domain Pfam Description: Protein kinase domain
  misc_feature (1)..(294): Homolog of NCBI NO: 115923 NR Description: Cell division control protein 2 homolog (p34cdc2)
  misc_feature (1)..(294): Homolog of NCBI NO: 100915 NR Description: protein kinase (EC 2.7.1.37) cdc2 homolog A -
  misc_feature (1)..(294): Homolog of NCBI NO: 100916 NR Description: protein kinase (EC 2.7.1.37) cdc2 homolog B -
  misc_feature (1)..(294): Homolog of NCBI NO: 231706 NR Description: CELL DIVISION CONTROL PROTEIN 2 HOMOLOG 1
  misc_feature (1)..(294): Homolog of NCBI NO: 4096103 NR Description: p34cdc2 [Triticum aestivum]
  misc_feature (1)..(293): Homolog of NCBI NO: 541800 NR Description: protein kinase (EC 2.7.1.37) cdc2 - Norway spruce
  misc_feature (1)..(293): Homolog of NCBI NO: 25989351 NR Description: cyclin-dependent kinase [Helianthus tuberosus]
  misc_feature (1)..(293): Homolog of NCBI NO: 17224978 NR Description: cyclin dependent kinase [Helianthus annuus]
  misc_feature (1)..(293): Homolog of NCBI NO: 8671339 NR Description: cdc2Pnc [Pinus contorta]
  misc_feature (1)..(294): Homolog of NCBI NO: 2956719 NR Description: cyclin dependent kinase 2 [Sphaerechinus
MEQYEKVEKIGEGTYGVVYKALDKATNETIALKKIRLEQEDEGVPSTAIREISLLKEMNHGNIVRLHDVVHSEKRIYLVFEYLDLDLKKFMDSCPEFAKNPTLIKSYLYQILHGVAYCHSHRVLHRDLKPQNLLIDRRTNALKLADFGLARAFGIPVRTFTHEVVTLWYRAPEILLGARQYSTPVDVWSVGCIFAEMVNQKPLFPGDSEIDELFKIFRILGTPNEQSWPGVSCLPDFKTAFPRWQAQDLATVVPNLDPAGLDLLSKMLRYEPSKRITARQALEHEYFKDLEVVQ

SEQ ID NO: 13418 - protein, 237 aa, Zea mays subsp. mays
  peptide (1)..(237): Ceres Seq. ID no. 12411274
  misc_feature (1)..(230): Pfam Name: Protein kinase domain Pfam Description: Protein kinase domain
  misc_feature (1)..(237): Homolog of NCBI NO: 115923 NR Description: Cell division control protein 2 homolog (p34cdc2)
  misc_feature (1)..(237): Homolog of NCBI NO: 100915 NR Description: protein kinase (EC 2.7.1.37) cdc2 homolog A -
  misc_feature (1)..(237): Homolog of NCBI NO: 100916 NR Description: protein kinase (EC 2.7.1.37) cdc2 homolog B -
  misc_feature (1)..(237): Homolog of NCBI NO: 231706 NR Description: CELL DIVISION CONTROL PROTEIN 2 HOMOLOG 1
  misc_feature (1)..(237): Homolog of NCBI NO: 4096103 NR Description: p34cdc2 [Triticum aestivum]
  misc_feature (1)..(236): Homolog of NCBI NO: 541800 NR Description: protein kinase (EC 2.7.1.37) cdc2 - Norway spruce
  misc_feature (1)..(236): Homolog of NCBI NO: 25989351 NR Description: cyclin-dependent kinase [Helianthus tuberosus]
  misc_feature (1)..(236): Homolog of NCBI NO: 17224978 NR Description: cyclin dependent kinase [Helianthus annuus]
  misc_feature (1)..(236): Homolog of NCBI NO: 8671339 NR Description: cdc2Pnc [Pinus contorta]
  misc_feature (1)..(237): Homolog of NCBI NO: 2956719 NR Description: cyclin dependent kinase 2 [Sphaerechinus
MNHGNIVRLHDVVHSEKRIYLVFEYLDLDLKKFMDSCPEFAKNPTLIKSYLYQILHGVAYCHSHRVLHRDLKPQNLLIDRRTNALKLADFGLARAFGIPVRTFTHEVVTLWYRAPEILLGARQYSTPVDVWSVGCIFAEMVNQKPLFPGDSEIDELFKIFRILGTPNEQSWPGVSCLPDFKTAFPRWQAQDLATVVPNLDPAGLDLLSKMLRYEPSKRITARQALEHEYFKDLEVVQ

SEQ ID NO: 13419 - protein, 204 aa, Zea mays subsp. mays
  peptide (1)..(204): Ceres Seq. ID no. 12411275
  misc_feature (1)..(197): Pfam Name: Protein kinase domain Pfam Description: Protein kinase domain
  misc_feature (1)..(204): Homolog of NCBI NO: 115923 NR Description: Cell division control protein 2 homolog (p34cdc2)
  misc_feature (1)..(204): Homolog of NCBI NO: 100915 NR Description: protein kinase (EC 2.7.1.37) cdc2 homolog A -
  misc_feature (1)..(204): Homolog of NCBI NO: 100916 NR Description: protein kinase (EC 2.7.1.37) cdc2 homolog B -
  misc_feature (1)..(204): Homolog of NCBI NO: 231706 NR Description: CELL DIVISION CONTROL PROTEIN 2 HOMOLOG 1
  misc_feature (1)..(204): Homolog of NCBI NO: 4096103 NR Description: p34cdc2 [Triticum aestivum]
  misc_feature (1)..(203): Homolog of NCBI NO: 541800 NR Description: protein kinase (EC 2.7.1.37) cdc2 - Norway spruce
  misc_feature (1)..(203): Homolog of NCBI NO: 25989351 NR Description: cyclin-dependent kinase [Helianthus tuberosus]
  misc_feature (1)..(203): Homolog of NCBI NO: 17224978 NR Description: cyclin dependent kinase [Helianthus annuus]
  misc_feature (1)..(203): Homolog of NCBI NO: 8671339 NR Description: cdc2Pnc [Pinus contorta]
  misc_feature (1)..(204): Homolog of NCBI NO: 2956719 NR Description: cyclin dependent kinase 2 [Sphaerechinus
MDSCPEFAKNPTLIKSYLYQILHGVAYCHSHRVLHRDLKPQNLLIDRRTNALKLADFGLARAFGIPVRTFTHEVVTLWYRAPEILLGARQYSTPVDVWSVGCIFAEMVNQKPLFPGDSEIDELFKIFRILGTPNEQSWPGVSCLPDFKTAFPRWQAQDLATVVPNLDPAGLDLLSKMLRYEPSKRITARQALEHEYFKDLEVVQ

SEQ ID NO: 13420 - DNA, 742 bp, Zea mays subsp. mays
  misc_feature (1)..(742): Ceres Seq. ID no. 13500480
  misc_feature: MA Experiment ID: 108529 Result: Up-regulated in Transcription
  misc_feature: MA Experiment 108529 PARAMETER Experiment Name: Zm_Imbibed_Seeds_P Parameter: Age (day) Value: 5 vs. 2
  misc_feature: MA Experiment 108529 PARAMETER Experiment Name: Zm_Imbibed_Seeds_P Parameter: Organism Value: Zea mays
  misc_feature: MA Experiment 108529 PARAMETER Experiment Name: Zm_Imbibed_Seeds_P Parameter: Plant Line Value: 35A19
  misc_feature: MA Experiment 108529 PARAMETER Experiment Name: Zm_Imbibed_Seeds_P Parameter: Tissue Value: Roots vs. Embryo
  misc_feature: MA Experiment ID: 108530 Result: Up-regulated in Transcription
  misc_feature: MA Experiment 108530 PARAMETER Experiment Name: Zm_Imbibed_Seeds_P Parameter: Age (day) Value: 6 vs. 2
  misc_feature: MA Experiment 108530 PARAMETER Experiment Name: Zm_Imbibed_Seeds_P Parameter: Organism Value: Zea mays
  misc_feature: MA Experiment 108530 PARAMETER Experiment Name: Zm_Imbibed_Seeds_P Parameter: Plant Line Value: 35A19
  misc_feature: MA Experiment 108530 PARAMETER Experiment Name: Zm_Imbibed_Seeds_P Parameter: Tissue Value: Aerial vs. Embryo
  misc_feature: MA Experiment ID: 108556 Result: Up-regulated in Transcription
  misc_feature: MA Experiment 108556 PARAMETER Experiment Name: Zm_Drought_P Parameter: Age (day) Value: 9
  misc_feature: MA Experiment 108556 PARAMETER Experiment Name: Zm_Drought_P Parameter: Organism Value: Zea mays
  misc_feature: MA Experiment 108556 PARAMETER Experiment Name: Zm_Drought_P Parameter: Plant Line Value: 35A19
  misc_feature: MA Experiment 108556 PARAMETER Experiment Name: Zm_Drought_P Parameter: Timepoint (hr) Value: 24
  misc_feature: MA Experiment 108556 PARAMETER Experiment Name: Zm_Drought_P Parameter: Tissue Value: Aerial
  misc_feature: MA Experiment 108556 PARAMETER Experiment Name: Zm_Drought_P Parameter: Treatment Value: Drought vs. No Drought
  misc_feature: MA Experiment ID: 108559 Result: Down-regulated in Transcription
  misc_feature: MA Experiment 108559 PARAMETER Experiment Name: Zm_5mM_NO_P Parameter: Age (day) Value: 8
  misc_feature: MA Experiment 108559 PARAMETER Experiment Name: Zm_5mM_NO_P Parameter: Organism Value: Zea mays
  misc_feature: MA Experiment 108559 PARAMETER Experiment Name: Zm_5mM_NO_P Parameter: Plant Line Value: 35A19
  misc_feature: MA Experiment 108559 PARAMETER Experiment Name: Zm_5mM_NO_P Parameter: Timepoint (hr) Value: 12
  misc_feature: MA Experiment 108559 PARAMETER Experiment Name: Zm_5mM_NO_P Parameter: Tissue Value: Aerial
  misc_feature: MA Experiment 108559 PARAMETER Experiment Name: Zm_5mM_NO_P Parameter: Treatment Value: 5mM NO vs. No Treatment
  misc_feature: MA Experiment ID: 108597 Result: Up-regulated in Transcription
  misc_feature: MA Experiment 108597 PARAMETER Experiment Name: Zm_100uM_ABA_P Parameter: Age (day) Value: 9
  misc_feature: MA Experiment 108597 PARAMETER Experiment Name: Zm_100uM_ABA_P Parameter: Organism Value: Zea mays
  misc_feature: MA Experiment 108597 PARAMETER Experiment Name: Zm_100uM_ABA_P Parameter: Plant Line Value: 35A19
  misc_feature: MA Experiment 108597 PARAMETER Experiment Name: Zm_100uM_ABA_P Parameter: Timepoint (hr) Value: 24
  misc_feature: MA Experiment 108597 PARAMETER Experiment Name: Zm_100uM_ABA_P Parameter: Tissue Value: Aerial
  misc_feature: MA Experiment 108597 PARAMETER Experiment Name: Zm_100uM_ABA_P Parameter: Treatment Value: 100uM ABA vs. No Treatment
  misc_feature: MA Experiment ID: 108689 Result: Up-regulated in Transcription
  misc_feature: MA Experiment 108689 PARAMETER Experiment Name: Zm_Drought_Roots_P Parameter: Age (day) Value: 9
  misc_feature: MA Experiment 108689 PARAMETER Experiment Name: Zm_Drought_Roots_P Parameter: Organism Value: Zea mays
  misc_feature: MA Experiment 108689 PARAMETER Experiment Name: Zm_Drought_Roots_P Parameter: Plant Line Value: 35A19
  misc_feature: MA Experiment 108689 PARAMETER Experiment Name: Zm_Drought_Roots_P Parameter: Timepoint (hr) Value: 24
  misc_feature: MA Experiment 108689 PARAMETER Experiment Name: Zm_Drought_Roots_P Parameter: Tissue Value: Roots
  misc_feature: MA Experiment 108689 PARAMETER Experiment Name: Zm_Drought_Roots_P Parameter: Treatment Value: Drought vs. No Drought
  misc_feature: MA Experiment ID: 20000478 Result: Up-regulated in Transcription
  misc_feature: MA Experiment 20000478 PARAMETER Experiment Name: Zm_5mM_SA_P Parameter: Age (day) Value: 11
  misc_feature: MA Experiment 20000478 PARAMETER Experiment Name: Zm_5mM_SA_P Parameter: Organism Value: Zea mays
  misc_feature: MA Experiment 20000478 PARAMETER Experiment Name: Zm_5mM_SA_P Parameter: Plant Line Value: 35A19
  misc_feature: MA Experiment 20000478 PARAMETER Experiment Name: Zm_5mM_SA_P Parameter: Timepoint (hr) Value: 72
  misc_feature: MA Experiment 20000478 PARAMETER Experiment Name: Zm_5mM_SA_P Parameter: Tissue Value: Aerial
  misc_feature: MA Experiment 20000478 PARAMETER Experiment Name: Zm_5mM_SA_P Parameter: Treatment Value: 5mM SA vs. No Treatment
  misc_feature: MA Experiment ID: 20000479 Result: Up-regulated in Transcription
  misc_feature: MA Experiment 20000479 PARAMETER Experiment Name: Zm_Drought_P Parameter: Age (day) Value: 10
  misc_feature: MA Experiment 20000479 PARAMETER Experiment Name: Zm_Drought_P Parameter: Organism Value: Zea mays
  misc_feature: MA Experiment 20000479 PARAMETER Experiment Name: Zm_Drought_P Parameter: Plant Line Value: 35A19
  misc_feature: MA Experiment 20000479 PARAMETER Experiment Name: Zm_Drought_P Parameter: Timepoint (hr) Value: 48
  misc_feature: MA Experiment 20000479 PARAMETER Experiment Name: Zm_Drought_P Parameter: Tissue Value: Aerial
  misc_feature: MA Experiment 20000479 PARAMETER Experiment Name: Zm_Drought_P Parameter: Treatment Value: Drought vs. No Drought
  misc_feature: MA Experiment ID: 20000480 Result: Up-regulated in Transcription
  misc_feature: MA Experiment 20000480 PARAMETER Experiment Name: Zm_Drought_P Parameter: Age (day) Value: 11
  misc_feature: MA Experiment 20000480 PARAMETER Experiment Name: Zm_Drought_P Parameter: Organism Value: Zea mays
  misc_feature: MA Experiment 20000480 PARAMETER Experiment Name: Zm_Drought_P Parameter: Plant Line Value: 35A19
  misc_feature: MA Experiment 20000480 PARAMETER Experiment Name: Zm_Drought_P Parameter: Timepoint (hr) Value: 72
  misc_feature: MA Experiment 20000480 PARAMETER Experiment Name: Zm_Drought_P Parameter: Tissue Value: Aerial
  misc_feature: MA Experiment 20000480 PARAMETER Experiment Name: Zm_Drought_P Parameter: Treatment Value: Drought vs. No Drought
taatcgaaaaactatatacgtatatagacgtggtcaggatgacgtcgtcctccgtcttcttcctcctgctcgcttgcttcgccacatgcgccggcgccgccacgttcacggtacgaaacaactgcgggttcacggtgtggccagcaggcatcccggtcggcggcggcacgcagctgaacccgggctcgacgtggactgtcaacgtgcaggccgggaccagcggaggcaggatctggggccgcaccggctgctccttcagcggcggccggggccgctgcgcgacgggcgactgcggaggcgcctactcctgcagcctgtccgggcagcccccggcgacgctggcggagttcaccatcggcggcggcggcaaccacgactactacgatatctcggtgatcgacggctacaacctgcccatggacttctcgtgcagcactggcgccgccctgcggtgcagggactccggctgccccgacgcgtaccaccagcccaatgaccctaagacccgttcgtgcaacggcaatagcaactaccaggtcgtcttctgcccctgatgaacatgcatgcagcttgccatgagcccatgcatgcatgagagcgtattaattgttcgtcaactcacatgcacgtacctactagtgaagttgataaataagacgatcgatatctgactcgtccaatgcagcatgtgtgtatggtgtgatccttatactttcctacatatatggaactttttaaaggg

SEQ ID NO: 13421 - protein, 183 aa, Zea mays subsp. mays
  peptide (1)..(183): Ceres Seq. ID no. 13500481
  misc_feature (39)..(183): Pfam Name: Thaumatin family Pfam Description: Thaumatin family
  misc_feature (14)..(183): Homolog of NCBI NO: 1710786 NR Description: Thaumatin-like pathogenesis-related protein 4
  misc_feature (14)..(183): Homolog of NCBI NO: 1710785 NR Description: Thaumatin-like pathogenesis-related protein 3
  misc_feature (14)..(183): Homolog of NCBI NO: 1710783 NR Description: Thaumatin-like pathogenesis-related protein 1
  misc_feature (14)..(183): Homolog of NCBI NO: 1710784 NR Description: Thaumatin-like pathogenesis-related protein 2
  misc_feature (14)..(183): Homolog of NCBI NO: 444344 NR Description: thaumatin-like protein
  misc_feature (15)..(183): Homolog of NCBI NO: 7442164 NR Description: pathogenesis related protein-5 - maize
  misc_feature (13)..(183): Homolog of NCBI NO: 417525 NR Description: Pathogenesis-related protein 1A/1B precursor
  misc_feature (13)..(183): Homolog of NCBI NO: 14334171 NR Description: thaumatin-like protein [Triticum aestivum]
  misc_feature (13)..(183): Homolog of NCBI NO: 417526 NR Description: Pathogenesis-related protein 1C precursor
  misc_feature (13)..(183): Homolog of NCBI NO: 135917 NR Description: Thaumatin-like protein PWIR2 precursor
IEKLYTYIDVVRMTSSSVFFLLLACFATCAGAATFTVRNNCGFTVWPAGIPVGGGTQLNPGSTWTVNVQAGTSGGRIWGRTGCSFSGGRGRCATGDCGGAYSCSLSGQPPATLAEFTIGGGGNHDYYDISVIDGYNLPMDFSCSTGAALRCRDSGCPDAYHQPNDPKTRSCNGNSNYQVVFCP

SEQ ID NO: 13422 - protein, 171 aa, Zea mays subsp. mays
  peptide (1)..(171): Ceres Seq. ID no. 13500482
  misc_feature (27)..(171): Pfam Name: Thaumatin family Pfam Description: Thaumatin family
  misc_feature (2)..(171): Homolog of NCBI NO: 1710786 NR Description: Thaumatin-like pathogenesis-related protein 4
  misc_feature (2)..(171): Homolog of NCBI NO: 1710785 NR Description: Thaumatin-like pathogenesis-related protein 3
  misc_feature (2)..(171): Homolog of NCBI NO: 1710783 NR Description: Thaumatin-like pathogenesis-related protein 1
  misc_feature (2)..(171): Homolog of NCBI NO: 1710784 NR Description: Thaumatin-like pathogenesis-related protein 2
  misc_feature (2)..(171): Homolog of NCBI NO: 444344 NR Description: thaumatin-like protein
  misc_feature (3)..(171): Homolog of NCBI NO: 7442164 NR Description: pathogenesis related protein-5 - maize
  misc_feature (1)..(171): Homolog of NCBI NO: 417525 NR Description: Pathogenesis-related protein 1A/1B precursor
  misc_feature (1)..(171): Homolog of NCBI NO: 14334171 NR Description: thaumatin-like protein [Triticum aestivum]
  misc_feature (1)..(171): Homolog of NCBI NO: 417526 NR Description: Pathogenesis-related protein 1C precursor
  misc_feature (1)..(171): Homolog of NCBI NO: 135917 NR Description: Thaumatin-like protein PWIR2 precursor
MTSSSVFFLLLACFATCAGAATFTVRNNCGFTVWPAGIPVGGGTQLNPGSTWTVNVQAGTSGGRIWGRTGCSFSGGRGRCATGDCGGAYSCSLSGQPPATLAEFTIGGGGNHDYYDISVIDGYNLPMDFSCSTGAALRCRDSGCPDAYHQPNDPKTRSCNGNSNYQVVFCP

SEQ ID NO: 13423 - protein, 164 aa, Zea mays subsp. mays
  peptide (1)..(164): Ceres Seq. ID no. 13500483
NRKTIYVYRRGQDDVVLRLLPPARLLRHMRRRRHVHGTKQLRVHGVASRHPGRRRHAAEPGLDVDCQRAGRDQRRQDLGPHRLLLQRRPGPLRDGRLRRRLLLQPVRAAPGDAGGVHHRRRRQPRLLRYLGDRRLQPAHGLLVQHWRRPAVQGLRLPRRVPPAQ

SEQ ID NO: 13424 - DNA, 1196 bp, Zea mays subsp. mays
  misc_feature (1)..(1196): Ceres Seq. ID no. 12367307
  misc_feature: MA Experiment ID: 108544 Result: Down-regulated in Transcription
cccagtcgtgtcgccactcgccgccatccgctccgcaggtcacgtgaaaagcagtgcagggcgcaagggcaccgccgaggcagaaaagggcggataaactgcttgaactggaagcgaccctagtccaaaccaccgcaccgacaccgactccgagccccgccgcgccgcgctacctccgctcctctcttcgcccctgccggcgtcgaggccgaagcgaaggcgagcatgcatcacgaccccaaccccttcgacgagggcagcgccgaggacaaccccttctcaaatggaggagccggaggcggcaagcagcagtacggcttccggccgactgagcccgtcgggttcggcggcgctagcaggggcgacgccgtcgttgacgtcccgctcgagaccatgggggactctcggagcaaggtgaaggagctctcgtcgtgggaatcagatctgaagcggcgagaggcggatatcaagaggagggaagaggcgctgaagaatgctggcgtgccaatggaggagaagaactggccaccattcttccccatcatccaccatgatattgccaatgagataccagcaaatgtgcagaagttgcagtatcttgcatttgcaagctggcttggaattgtgctttgtttgtcctggaacttcgttgctgtcatagtctgctggatcaaggagggagattcaaagttgtttttccttgcaacaatctatgctttgcttggaattcctctgtcatatttgatatggtacaggccactctaccgtgcaatgaggactaacagtgctttcagttttggatggtttttcctgtgttacctgatccacattggtttttgcataattgctgccattgctccaccaattgtatttcatgggaaatcattaactggtattctggctgcgattgacactttctctgaacatgtgataattgggatcttttactttgtggggtttgcactgttttgtctggagacactgctgagcattggggttcttcagaaagtgtacatgtacttcagagggaacaagtgaagccagtcatgatggagagttacgtttgttgagaaaatttggagttacttgtggctacttgtagcacatgttcattcgatggttttgtgcatacctgtcagtacaccttgaatctataatttcttatgtcagttattggtgccgagaattgttttttt

SEQ ID NO: 13425 - protein, 270 aa, Zea mays subsp. mays
  peptide (1)..(270): Ceres Seq. ID no. 12367308
  misc_feature (96)..(270): Pfam Name: SCAMP family Pfam Description: SCAMP family
  misc_feature (1)..(270): Homolog of NCBI NO: 38347080 NR Description: OSJNBa0006A01.21 [Oryza sativa (japonica
  misc_feature (2)..(270): Homolog of NCBI NO: 15222550 NR Description: secretory carrier membrane protein, putative; id: At1g32050.1, supported by cDNA: 34837. [Arabidopsis thaliana]
  misc_feature (14)..(260): Homolog of NCBI NO: 38567965 NR Description: OSJNBa0093F12.6 [Oryza sativa (japonica
  misc_feature (3)..(269): Homolog of NCBI NO: 15219893 NR Description: secretory carrier membrane protein; protein id: supported by cDNA: 27197., supported by cDNA: gi_15027862, by cDNA: gi_19310672, supported by cDNA: gi_7109227 [Arabidopsis
  misc_feature (3)..(268): Homolog of NCBI NO: 3941289 NR Description: similarity to SCAMP37 [Pisum sativum]
  misc_feature (3)..(269): Homolog of NCBI NO: 15226410 NR Description: putative secretory carrier-associated membrane protein id: At2g20840.1 [Arabidopsis thaliana]
  misc_feature (3)..(269): Homolog of NCBI NO: 7109232 NR Description: secretory carrier membrane protein [Oryza sativa]
  misc_feature (3)..(269): Homolog of NCBI NO: 15220305 NR Description: secretory carrier membrane protein, putative;
  misc_feature (4)..(269): Homolog of NCBI NO: 34899754 NR Description: putative secretory carrier membrane protein
  misc_feature (3)..(269): Homolog of NCBI NO: 18379111 NR Description: expressed protein; protein id: At1g03550.1, by cDNA: 30006. [Arabidopsis thaliana] F21B7.17 [Arabidopsis thaliana] >gi|21592580|gb|AAM64529.1|
MHHDPNPFDEGSAEDNPFSNGGAGGGKQQYGFRPTEPVGFGGASRGDAVVDVPLETMGDSRSKVKELSSWESDLKRREADIKRREEALKNAGVPMEEKNWPPFFPIIHHDIANEIPANVQKLQYLAFASWLGIVLCLSWNFVAVIVCWIKEGDSKLFFLATIYALLGIPLSYLIWYRPLYRAMRTNSAFSFGWFFLCYLIHIGFCIIAAIAPPIVFHGKSLTGILAAIDTFSEHVIIGIFYFVGFALFCLETLLSIGVLQKVYMYFRGNK

SEQ ID NO: 13426 - protein, 214 aa, Zea mays subsp. mays
  peptide (1)..(214): Ceres Seq. ID no. 12367309
  misc_feature (40)..(214): Pfam Name: SCAMP family Pfam Description: SCAMP family
  misc_feature (1)..(214): Homolog of NCBI NO: 38347080 NR Description: OSJNBa0006A01.21 [Oryza sativa (japonica
  misc_feature (1)..(214): Homolog of NCBI NO: 15222550 NR Description: secretory carrier membrane protein, putative; id: At1g32050.1, supported by cDNA: 34837. [Arabidopsis thaliana]
  misc_feature (1)..(204): Homolog of NCBI NO: 38567965 NR Description: OSJNBa0093F12.6 [Oryza sativa (japonica
  misc_feature (1)..(213): Homolog of NCBI NO: 15219893 NR Description: secretory carrier membrane protein; protein id: supported by cDNA: 27197., supported by cDNA: gi_15027862, by cDNA: gi_19310672, supported by cDNA: gi_7109227 [Arabidopsis
  misc_feature (1)..(212): Homolog of NCBI NO: 3941289 NR Description: similarity to SCAMP37 [Pisum sativum]
  misc_feature (1)..(213): Homolog of NCBI NO: 15226410 NR Description: putative secretory carrier-associated membrane protein id: At2g20840.1 [Arabidopsis thaliana]
  misc_feature (1)..(213): Homolog of NCBI NO: 7109232 NR Description: secretory carrier membrane protein [Oryza sativa]
  misc_feature (1)..(213): Homolog of NCBI NO: 15220305 NR Description: secretory carrier membrane protein, putative;
  misc_feature (1)..(213): Homolog of NCBI NO: 34899754 NR Description: putative secretory carrier membrane protein
  misc_feature (1)..(213): Homolog of NCBI NO: 18379111 NR Description: expressed protein; protein id: At1g03550.1, by cDNA: 30006. [Arabidopsis thaliana] F21B7.17 [Arabidopsis thaliana] >gi|21592580|gb|AAM64529.1|
MGDSRSKVKELSSWESDLKRREADIKRREEALKNAGVPMEEKNWPPFFPIIHHDIANEIPANVQKLQYLAFASWLGIVLCLSWNFVAVIVCWIKEGDSKLFFLATIYALLGIPLSYLIWYRPLYRAMRTNSAFSFGWFFLCYLIHIGFCIIAAIAPPIVFHGKSLTGILAAIDTFSEHVIIGIFYFVGFALFCLETLLSIGVLQKVYMYFRGNK

SEQ ID NO: 13427 - protein, 176 aa, Zea mays subsp. mays
  peptide (1)..(176): Ceres Seq. ID no. 12367310
  misc_feature (2)..(176): Pfam Name: SCAMP family Pfam Description: SCAMP family
  misc_feature (1)..(175): Homolog of NCBI NO: 15219893 NR Description: secretory carrier membrane protein; protein id: supported by cDNA: 27197., supported by cDNA: gi_15027862, by cDNA: gi_19310672, supported by cDNA: gi_7109227 [Arabidopsis
  misc_feature (1)..(174): Homolog of NCBI NO: 3941289 NR Description: similarity to SCAMP37 [Pisum sativum]
  misc_feature (1)..(175): Homolog of NCBI NO: 15226410 NR Description: putative secretory carrier-associated membrane protein id: At2g20840.1 [Arabidopsis thaliana]
  misc_feature (1)..(175): Homolog of NCBI NO: 7109232 NR Description: secretory carrier membrane protein [Oryza sativa]
  misc_feature (1)..(176): Homolog of NCBI NO: 15222550 NR Description: secretory carrier membrane protein, putative; id: At1g32050.1, supported by cDNA: 34837. [Arabidopsis thaliana]
  misc_feature (1)..(166): Homolog of NCBI NO: 38567965 NR Description: OSJNBa0093F12.6 [Oryza sativa (japonica
  misc_feature (1)..(176): Homolog of NCBI NO: 38347080 NR Description: OSJNBa0006A01.21 [Oryza sativa (japonica
  misc_feature (1)..(175): Homolog of NCBI NO: 15220305 NR Description: secretory carrier membrane protein, putative;
  misc_feature (1)..(175): Homolog of NCBI NO: 34899754 NR Description: putative secretory carrier membrane protein
  misc_feature (1)..(175): Homolog of NCBI NO: 18379111 NR Description: expressed protein; protein id: At1g03550.1, by cDNA: 30006. [Arabidopsis thaliana] F21B7.17 [Arabidopsis thaliana] >gi|21592580|gb|AAM64529.1|
MEEKNWPPFFPIIHHDIANEIPANVQKLQYLAFASWLGIVLCLSWNFVAVIVCWIKEGDSKLFFLATIYALLGIPLSYLIWYRPLYRAMRTNSAFSFGWFFLCYLIHIGFCIIAAIAPPIVFHGKSLTGILAAIDTFSEHVIIGIFYFVGFALFCLETLLSIGVLQKVYMYFRGNK

SEQ ID NO: 13428 - DNA, 1267 bp, Zea mays subsp. mays
  misc_feature (1)..(1267): Ceres Seq. ID no. 12407374
  misc_feature: MA Experiment ID: 108535 Result: Up-regulated in Transcription
  misc_feature: MA Experiment 108535 PARAMETER Experiment Name: Zm_Meristem_P Parameter: Age (day) Value: 8
  misc_feature: MA Experiment 108535 PARAMETER Experiment Name: Zm_Meristem_P Parameter: Organism Value: Zea mays
  misc_feature: MA Experiment 108535 PARAMETER Experiment Name: Zm_Meristem_P Parameter: Plant Line Value: 35A19
  misc_feature: MA Experiment 108535 PARAMETER Experiment Name: Zm_Meristem_P Parameter: Tissue Value: Root Meristem vs. Above Root Meristem
  misc_feature: MA Experiment ID: 108544 Result: Down-regulated in Transcription
  misc_feature: MA Experiment ID: 20000492 Result: Up-regulated in Transcription
  misc_feature: MA Experiment 20000492 PARAMETER Experiment Name: Zm_Hybrid_Seed_Dev_P Parameter: DAP Value: 12
  misc_feature: MA Experiment 20000492 PARAMETER Experiment Name: Zm_Hybrid_Seed_Dev_P Parameter: Organism Value: Zea mays
  misc_feature: MA Experiment 20000492 PARAMETER Experiment Name: Zm_Hybrid_Seed_Dev_P Parameter: Plant Line Value: 35A19
  misc_feature: MA Experiment 20000492 PARAMETER Experiment Name: Zm_Hybrid_Seed_Dev_P Parameter: Tissue Value: Fert Kernel vs. Unfert Floret
  misc_feature: MA Experiment ID: 20000535 Result: Up-regulated in Transcription
  misc_feature: MA Experiment 20000535 PARAMETER Experiment Name: Zm_Hybrid_Seed_Dev_P Parameter: DAP Value: 30 vs. 12
  misc_feature: MA Experiment 20000535 PARAMETER Experiment Name: Zm_Hybrid_Seed_Dev_P Parameter: Organism Value: Zea mays
  misc_feature: MA Experiment 20000535 PARAMETER Experiment Name: Zm_Hybrid_Seed_Dev_P Parameter: Plant Line Value: 35A19
  misc_feature: MA Experiment 20000535 PARAMETER Experiment Name: Zm_Hybrid_Seed_Dev_P Parameter: Tissue Value: Embryo vs. Unfert Floret
  misc_feature: MA Experiment ID: 20000632 Result: Down-regulated in Transcription
  misc_feature: MA Experiment 20000632 PARAMETER Experiment Name: Zm_Herbicide-Treatments_P Parameter: Timepoint (hr) Value: 4
  misc_feature: MA Experiment 20000632 PARAMETER Experiment Name: Zm_Herbicide-Treatments_P Parameter: Tissue Value: Aerial
  misc_feature: MA Experiment 20000632 PARAMETER Experiment Name: Zm_Herbicide-Treatments_P Parameter: Treatment Value: Glean vs. No Treatment
accaattccccaatttttttgtttccattccacaaaaccacaaccgcgcggttttctccctccccggctcccgcggcgcaagcgcagcccacccaagcgccatggccgccgccgcccccgacgccgacgcctacgatatcccgtgggtggagaagtaccgcccctcccgcgtcgctgacgtcgtcggaaactccgatgccgtcgcccgcctggaggtcattgcccgcgacggcaacatgcccaacctcatcctctccgggcctccggggaccgggaagacgacgagcatcctggcgctggcgcatgagctcctcgggcccagctatcgtgatgccgtgctggagctcaatgcctcagatgacaggggtttggatgtttgtgcggaacaagatcaagatgtttgcacagaagaaggtcaccctacagccagggcggcacaaaatcgtgatcttggatgaggctgacagcatgacatcaggagcacagcaagctctgcgaagaacaatggagatctattcaaacaccactagatttgcacttgcatgcaacacatcatcaaagataattgaacccattcaaagccgatgtgctatcgtcaggttctcaaggctctctgatcaagagatcctcggtcgcctcatgattgttgtggcagctgagaaggtgccttatgcgccagaggggctggaagctatcatatttactgctgatggtgacatgagacaagctttgaacaacttgcaagctacatttagtgggttccgctttattaatcaagaaaacgtgttcaaggtgtgcgatcaaccacatcccttacatgtcaagaacatggtgaaaaacgtgctcgatggaaagtttgatgagccatgctctgcactgaagcaactttatgatctgggatactctcctactgacattatcactactctcttccgtgttgtcaagaattatgacatggctgaatatctgaagctggaaatgctgaaggaaacaggatttgcacacatgagaatctgtgatggtgttggatcatttcttcagctttctggtctacttgccaagtttgcgcttgtgagggaaactgcaaaagcaccatgaactcgttgtattccagatgataatagcttgtgtcatgctgtgctatcatggtaacctagttcagttaatagtgctgtcatgcgtggcttaatgtctacagacgtgatgtatctctgtaagagtgctttctgaagaaacaactatcatgtttgcccagtgtggcagatct

SEQ ID NO: 13429 - protein, 365 aa, Zea mays subsp. mays
  peptide (1)..(365): Ceres Seq. ID no. 12407375
  misc_feature (127)..(253): Pfam Name: ATPase family associated with various cellular Pfam Description: ATPase family associated with various cellular
  misc_feature (127)..(364): Homolog of NCBI NO: 15991286 NR Description: replication factor C 40kDa subunit [Oryza sativa
  misc_feature (127)..(364): Homolog of NCBI NO: 38344372 NR Description: OSJNBb0032E06.6 [Oryza sativa (japonica
  misc_feature (127)..(365): Homolog of NCBI NO: 15221697 NR Description: replication factor, putative; protein id: [Arabidopsis thaliana] >gi|25301743|pir||B96657 probable
  misc_feature (127)..(365): Homolog of NCBI NO: 1703053 NR Description: ACTIVATOR 1 40 KD SUBUNIT (REPLICATION FACTOR C
  misc_feature (127)..(354): Homolog of NCBI NO: 11177922 NR Description: replication factor C (activator 1) 2; replication C (activator 1) 2 (40kD) [Mus musculus] Activator 1 40 kDa subunit (Replication factor C 40 kDa subunit)
  misc_feature (127)..(354): Homolog of NCBI NO: 34871892 NR Description: replication factor C 2 (40kD) [Rattus norvegicus] similar to replication factor C, 40kDa subunit [Rattus
  misc_feature (127)..(354): Homolog of NCBI NO: 539678 NR Description: replication factor C - human
  misc_feature (127)..(354): Homolog of NCBI NO: 28950096 NR Description: probable REPLICATION FACTOR C (40 KDA SUBUNIT)
  misc_feature (127)..(356): Homolog of NCBI NO: 19114033 NR Description: replication factor C, activator 1 subunit
  misc_feature (155)..(354): Homolog of NCBI NO: 30584413 NR Description: Homo sapiens replication factor C (activator 1)
TNSPIFLFPFHKTTTARFSPSPAPAAQAQPTQAPWPPPPPTPTPTISRGWRSTAPPASLTSSETPMPSPAWRSLPATATCPTSSSPGLRGPGRRRASWRWRMSSSGPAIVMPCWSSMPQMTGVWMFVRNKIKMFAQKKVTLQPGRHKIVILDEADSMTSGAQQALRRTMEIYSNTTRFALACNTSSKIIEPIQSRCAIVRFSRLSDQEILGRLMIVVAAEKVPYAPEGLEAIIFTADGDMRQALNNLQATFSGFRFINQENVFKVCDQPHPLHVKNMVKNVLDGKFDEPCSALKQLYDLGYSPTDIITTLFRVVKNYDMAEYLKLEMLKETGFAHMRICDGVGSFLQLSGLLAKFALVRETAKAP

SEQ ID NO: 13430 - protein, 300 aa, Zea mays subsp. mays
  peptide (1)..(300): Ceres Seq. ID no. 12407376
  misc_feature (62)..(188): Pfam Name: ATPase family associated with various cellular Pfam Description: ATPase family associated with various cellular
  misc_feature (62)..(299): Homolog of NCBI NO: 15991286 NR Description: replication factor C 40kDa subunit [Oryza sativa
  misc_feature (62)..(299): Homolog of NCBI NO: 38344372 NR Description: OSJNBb0032E06.6 [Oryza sativa (japonica
  misc_feature (62)..(300): Homolog of NCBI NO: 15221697 NR Description: replication factor, putative; protein id: [Arabidopsis thaliana] >gi|25301743|pir||B96657 probable
  misc_feature (62)..(300): Homolog of NCBI NO: 1703053 NR Description: ACTIVATOR 1 40 KD SUBUNIT (REPLICATION FACTOR C
  misc_feature (62)..(289): Homolog of NCBI NO: 11177922 NR Description: replication factor C (activator 1) 2; replication C (activator 1) 2 (40kD) [Mus musculus] Activator 1 40 kDa subunit (Replication factor C 40 kDa subunit)
  misc_feature (62)..(289): Homolog of NCBI NO: 34871892 NR Description: replication factor C 2 (40kD) [Rattus norvegicus] similar to replication factor C, 40kDa subunit [Rattus
  misc_feature (62)..(289): Homolog of NCBI NO: 539678 NR Description: replication factor C - human
  misc_feature (62)..(289): Homolog of NCBI NO: 28950096 NR Description: probable REPLICATION FACTOR C (40 KDA SUBUNIT)
  misc_feature (62)..(291): Homolog of NCBI NO: 19114033 NR Description: replication factor C, activator 1 subunit
  misc_feature (90)..(289): Homolog of NCBI NO: 30584413 NR Description: Homo sapiens replication factor C (activator 1)
MPSPAWRSLPATATCPTSSSPGLRGPGRRRASWRWRMSSSGPAIVMPCWSSMPQMTGVWMFVRNKIKMFAQKKVTLQPGRHKIVILDEADSMTSGAQQALRRTMEIYSNTTRFALACNTSSKIIEPIQSRCAIVRFSRLSDQEILGRLMIVVAAEKVPYAPEGLEAIIFTADGDMRQALNNLQATFSGFRFINQENVFKVCDQPHPLHVKNMVKNVLDGKFDEPCSALKQLYDLGYSPTDIITTLFRVVKNYDMAEYLKLEMLKETGFAHMRICDGVGSFLQLSGLLAKFALVRETAKAP

SEQ ID NO: 13431 - protein, 264 aa, Zea mays subsp. mays
  peptide (1)..(264): Ceres Seq. ID no. 12407377
  misc_feature (26)..(152): Pfam Name: ATPase family associated with various cellular Pfam Description: ATPase family associated with various cellular
  misc_feature (26)..(263): Homolog of NCBI NO: 15991286 NR Description: replication factor C 40kDa subunit [Oryza sativa
  misc_feature (26)..(263): Homolog of NCBI NO: 38344372 NR Description: OSJNBb0032E06.6 [Oryza sativa (japonica
  misc_feature (26)..(264): Homolog of NCBI NO: 15221697 NR Description: replication factor, putative; protein id: [Arabidopsis thaliana] >gi|25301743|pir||B96657 probable
  misc_feature (26)..(264): Homolog of NCBI NO: 1703053 NR Description: ACTIVATOR 1 40 KD SUBUNIT (REPLICATION FACTOR C
  misc_feature (26)..(253): Homolog of NCBI NO: 11177922 NR Description: replication factor C (activator 1) 2; replication C (activator 1) 2 (40kD) [Mus musculus] Activator 1 40 kDa subunit (Replication factor C 40 kDa subunit)
  misc_feature (26)..(253): Homolog of NCBI NO: 34871892 NR Description: replication factor C 2 (40kD) [Rattus norvegicus] similar to replication factor C, 40kDa subunit [Rattus
  misc_feature (26)..(253): Homolog of NCBI NO: 539678 NR Description: replication factor C - human
  misc_feature (26)..(253): Homolog of NCBI NO: 28950096 NR Description: probable REPLICATION FACTOR C (40 KDA SUBUNIT)
  misc_feature (26)..(255): Homolog of NCBI NO: 19114033 NR Description: replication factor C, activator 1 subunit
  misc_feature (54)..(253): Homolog of NCBI NO: 30584413 NR Description: Homo sapiens replication factor C (activator 1)
MSSSGPAIVMPCWSSMPQMTGVWMFVRNKIKMFAQKKVTLQPGRHKIVILDEADSMTSGAQQALRRTMEIYSNTTRFALACNTSSKIIEPIQSRCAIVRFSRLSDQEILGRLMIVVAAEKVPYAPEGLEAIIFTADGDMRQALNNLQATFSGFRFINQENVFKVCDQPHPLHVKNMVKNVLDGKFDEPCSALKQLYDLGYSPTDIITTLFRVVKNYDMAEYLKLEMLKETGFAHMRICDGVGSFLQLSGLLAKFALVRETAKAP

SEQ ID NO: 13432 - DNA, 1549 bp, Zea mays subsp. mays
  misc_feature (1)..(1549): Ceres Seq. ID no. 12373460
  misc_feature: MA Experiment ID: 108527 Result: Down-regulated in Transcription
  misc_feature: MA Experiment 108527 PARAMETER Experiment Name: Zm_5mM_NO_P Parameter: Age (day) Value: 8
  misc_feature: MA Experiment 108527 PARAMETER Experiment Name: Zm_5mM_NO_P Parameter: Organism Value: Zea mays
  misc_feature: MA Experiment 108527 PARAMETER Experiment Name: Zm_5mM_NO_P Parameter: Plant Line Value: 35A19
  misc_feature: MA Experiment 108527 PARAMETER Experiment Name: Zm_5mM_NO_P Parameter: Timepoint (hr) Value: 6
  misc_feature: MA Experiment 108527 PARAMETER Experiment Name: Zm_5mM_NO_P Parameter: Tissue Value: Aerial
  misc_feature: MA Experiment 108527 PARAMETER Experiment Name: Zm_5mM_NO_P Parameter: Treatment Value: 5mM NO vs. No Treatment
  misc_feature: MA Experiment ID: 108535 Result: Down-regulated in Transcription
  misc_feature: MA Experiment 108535 PARAMETER Experiment Name: Zm_Meristem_P Parameter: Age (day) Value: 8
  misc_feature: MA Experiment 108535 PARAMETER Experiment Name: Zm_Meristem_P Parameter: Organism Value: Zea mays
  misc_feature: MA Experiment 108535 PARAMETER Experiment Name: Zm_Meristem_P Parameter: Plant Line Value: 35A19
  misc_feature: MA Experiment 108535 PARAMETER Experiment Name: Zm_Meristem_P Parameter: Tissue Value: Root Meristem vs. Above Root Meristem
  misc_feature: MA Experiment ID: 108544 Result: Down-regulated in Transcription
  misc_feature: MA Experiment ID: 108546 Result: Up-regulated in Transcription
  misc_feature: MA Experiment 108546 PARAMETER Experiment Name: Zm_Imbibed_Seeds_P Parameter: Age (day) Value: 3 vs. 2
  misc_feature: MA Experiment 108546 PARAMETER Experiment Name: Zm_Imbibed_Seeds_P Parameter: Organism Value: Zea mays
  misc_feature: MA Experiment 108546 PARAMETER Experiment Name: Zm_Imbibed_Seeds_P Parameter: Plant Line Value: 35A19
  misc_feature: MA Experiment 108546 PARAMETER Experiment Name: Zm_Imbibed_Seeds_P Parameter: Tissue Value: Roots vs. Embryo
  misc_feature: MA Experiment ID: 108556 Result: Down-regulated in Transcription
  misc_feature: MA Experiment 108556 PARAMETER Experiment Name: Zm_Drought_P Parameter: Age (day) Value: 9
  misc_feature: MA Experiment 108556 PARAMETER Experiment Name: Zm_Drought_P Parameter: Organism Value: Zea mays
  misc_feature: MA Experiment 108556 PARAMETER Experiment Name: Zm_Drought_P Parameter: Plant Line Value: 35A19
  misc_feature: MA Experiment 108556 PARAMETER Experiment Name: Zm_Drought_P Parameter: Timepoint (hr) Value: 24
  misc_feature: MA Experiment 108556 PARAMETER Experiment Name: Zm_Drought_P Parameter: Tissue Value: Aerial
  misc_feature: MA Experiment 108556 PARAMETER Experiment Name: Zm_Drought_P Parameter: Treatment Value: Drought vs. No Drought
  misc_feature: MA Experiment ID: 108559 Result: Down-regulated in Transcription
  misc_feature: MA Experiment 108559 PARAMETER Experiment Name: Zm_5mM_NO_P Parameter: Age (day) Value: 8
  misc_feature: MA Experiment 108559 PARAMETER Experiment Name: Zm_5mM_NO_P Parameter: Organism Value: Zea mays
  misc_feature: MA Experiment 108559 PARAMETER Experiment Name: Zm_5mM_NO_P Parameter: Plant Line Value: 35A19
  misc_feature: MA Experiment 108559 PARAMETER Experiment Name: Zm_5mM_NO_P Parameter: Timepoint (hr) Value: 12
  misc_feature: MA Experiment 108559 PARAMETER Experiment Name: Zm_5mM_NO_P Parameter: Tissue Value: Aerial
  misc_feature: MA Experiment 108559 PARAMETER Experiment Name: Zm_5mM_NO_P Parameter: Treatment Value: 5mM NO vs. No Treatment
  misc_feature: MA Experiment ID: 108689 Result: Down-regulated in Transcription
  misc_feature: MA Experiment 108689 PARAMETER Experiment Name: Zm_Drought_Roots_P Parameter: Age (day) Value: 9
  misc_feature: MA Experiment 108689 PARAMETER Experiment Name: Zm_Drought_Roots_P Parameter: Organism Value: Zea mays
  misc_feature: MA Experiment 108689 PARAMETER Experiment Name: Zm_Drought_Roots_P Parameter: Plant Line Value: 35A19
  misc_feature: MA Experiment 108689 PARAMETER Experiment Name: Zm_Drought_Roots_P Parameter: Timepoint (hr) Value: 24
  misc_feature: MA Experiment 108689 PARAMETER Experiment Name: Zm_Drought_Roots_P Parameter: Tissue Value: Roots
  misc_feature: MA Experiment 108689 PARAMETER Experiment Name: Zm_Drought_Roots_P Parameter: Treatment Value: Drought vs. No Drought
  misc_feature: MA Experiment ID: 20000477 Result: Down-regulated in Transcription
  misc_feature: MA Experiment 20000477 PARAMETER Experiment Name: Zm_5mM_SA_P Parameter: Age (day) Value: 10
  misc_feature: MA Experiment 20000477 PARAMETER Experiment Name: Zm_5mM_SA_P Parameter: Organism Value: Zea mays
  misc_feature: MA Experiment 20000477 PARAMETER Experiment Name: Zm_5mM_SA_P Parameter: Plant Line Value: 35A19
  misc_feature: MA Experiment 20000477 PARAMETER Experiment Name: Zm_5mM_SA_P Parameter: Timepoint (hr) Value: 48
  misc_feature: MA Experiment 20000477 PARAMETER Experiment Name: Zm_5mM_SA_P Parameter: Tissue Value: Aerial
  misc_feature: MA Experiment 20000477 PARAMETER Experiment Name: Zm_5mM_SA_P Parameter: Treatment Value: 5mM SA vs. No Treatment
  misc_feature: MA Experiment ID: 20000478 Result: Down-regulated in Transcription
  misc_feature: MA Experiment 20000478 PARAMETER Experiment Name: Zm_5mM_SA_P Parameter: Age (day) Value: 11
  misc_feature: MA Experiment 20000478 PARAMETER Experiment Name: Zm_5mM_SA_P Parameter: Organism Value: Zea mays
  misc_feature: MA Experiment 20000478 PARAMETER Experiment Name: Zm_5mM_SA_P Parameter: Plant Line Value: 35A19
  misc_feature: MA Experiment 20000478 PARAMETER Experiment Name: Zm_5mM_SA_P Parameter: Timepoint (hr) Value: 72
  misc_feature: MA Experiment 20000478 PARAMETER Experiment Name: Zm_5mM_SA_P Parameter: Tissue Value: Aerial
  misc_feature: MA Experiment 20000478 PARAMETER Experiment Name: Zm_5mM_SA_P Parameter: Treatment Value: 5mM SA vs. No Treatment
  misc_feature: MA Experiment ID: 20000479 Result: Down-regulated in Transcription
  misc_feature: MA Experiment 20000479 PARAMETER Experiment Name: Zm_Drought_P Parameter: Age (day) Value: 10
  misc_feature: MA Experiment 20000479 PARAMETER Experiment Name: Zm_Drought_P Parameter: Organism Value: Zea mays
  misc_feature: MA Experiment 20000479 PARAMETER Experiment Name: Zm_Drought_P Parameter: Plant Line Value: 35A19
  misc_feature: MA Experiment 20000479 PARAMETER Experiment Name: Zm_Drought_P Parameter: Timepoint (hr) Value: 48
  misc_feature: MA Experiment 20000479 PARAMETER Experiment Name: Zm_Drought_P Parameter: Tissue Value: Aerial
  misc_feature: MA Experiment 20000479 PARAMETER Experiment Name: Zm_Drought_P Parameter: Treatment Value: Drought vs. No Drought
  misc_feature: MA Experiment ID: 20000480 Result: Down-regulated in Transcription
  misc_feature: MA Experiment 20000480 PARAMETER Experiment Name: Zm_Drought_P Parameter: Age (day) Value: 11
  misc_feature: MA Experiment 20000480 PARAMETER Experiment Name: Zm_Drought_P Parameter: Organism Value: Zea mays
  misc_feature: MA Experiment 20000480 PARAMETER Experiment Name: Zm_Drought_P Parameter: Plant Line Value: 35A19
  misc_feature: MA Experiment 20000480 PARAMETER Experiment Name: Zm_Drought_P Parameter: Timepoint (hr) Value: 72
  misc_feature: MA Experiment 20000480 PARAMETER Experiment Name: Zm_Drought_P Parameter: Tissue Value: Aerial
  misc_feature: MA Experiment 20000480 PARAMETER Experiment Name: Zm_Drought_P Parameter: Treatment Value: Drought vs. No Drought
  misc_feature: MA Experiment ID: 20000534 Result: Down-regulated in Transcription
  misc_feature: MA Experiment 20000534 PARAMETER Experiment Name: Zm_Hybrid_Pollen_P Parameter: Age (day) Value: 8
  misc_feature: MA Experiment 20000534 PARAMETER Experiment Name: Zm_Hybrid_Pollen_P Parameter: Organism Value: Zea mays
  misc_feature: MA Experiment 20000534 PARAMETER Experiment Name: Zm_Hybrid_Pollen_P Parameter: Plant Line Value: 35A19
  misc_feature: MA Experiment 20000534 PARAMETER Experiment Name: Zm_Hybrid_Pollen_P Parameter: Tissue Value: Pollen vs. Aerial
  misc_feature: MA Experiment ID: 20000535 Result: Down-regulated in Transcription
  misc_feature: MA Experiment 20000535 PARAMETER Experiment Name: Zm_Hybrid_Seed_Dev_P Parameter: DAP Value: 30 vs. 12
  misc_feature: MA Experiment 20000535 PARAMETER Experiment Name: Zm_Hybrid_Seed_Dev_P Parameter: Organism Value: Zea mays
  misc_feature: MA Experiment 20000535 PARAMETER Experiment Name: Zm_Hybrid_Seed_Dev_P Parameter: Plant Line Value: 35A19
  misc_feature: MA Experiment 20000535 PARAMETER Experiment Name: Zm_Hybrid_Seed_Dev_P Parameter: Tissue Value: Embryo vs. Unfert Floret
tccctcgtcttctgccgcagacgcttcccgtgatcagaatccaagaaatggcgggtccaggtccagcgcgcaccgcgcggagcgttgctctcctgtgtttcctggtttcctgcgctgcgctcgtggacagccgtggcggagccagccggccgagccggcaggacctcgatgtcggcctcggcggcgggggcgtcggcatcggcatcggcatcggcggcggcagcccttcgtcgccttctccgacgccgccgtcgtcgcagccgcagccgtgcgacttcgagaacgagcggctgtacagggcgtacctcgtgatccagcagttccggagcacggtgacgtgcgacccgatgggcgtcacgcagagctggagcggcaccgacgtgtgcagctacaagggcttcttctgcgagcggccgcccaacgtgacggaccgggccatcgcgtccgtcgacttcaacggctacatgctgcaggcggggtccctgcggggcttcgtcgacagcctgccggacctggcgctgttccacgccaactccaacgacttcggcggcgccgtgcccgcgctgggcggcctgcagtacttctacgagctggacctgagcaacaacaagctcgcgcccgccgcgttcccggcggacgtgctgggcctcaccaacgccaccttcgtcgacatccgcttcaacagcttctacggcgagctccccgccggcgtcttctgcaagctcccgcgggtgcaggccatcttcgtcaacaacaaccgcttctccggcgccctccccgacaacatcgggcagtcgccggtgaactacctctctctggccaacaacaggttcacgggggagatacccaggtccatcgcccgcaacgccggcacgctcctcgaggtgctcttcctcaacaacagcctcagcggctgcctcccccacgagctcggcctcctggagaaggccacggtcatcgacgccggcgctaaccgcctcacgggcaccatcccggcgtcgttcgcgtgcctgcgcaaggtggagcagctcaacctggcgggcaacctcttgtacggcgaggtgcccgacgcgctctgccggctcgcgttcagcaacctcaagaacctcacgctctccgacaactacttcacgtcgctcgggtcctgctgctgggacctgatcaaggaagggaggctcaacgtcgaccgcaactgcatccagtgggcgcccaaccagcgctcgcacgaggactgcgccaagttcctccgccagcccaagtcatgcccggtcaacaactacgttccgtgccgcagcaaataccaaagctccagcgagccggccgacgacgcggcggcggagtacaggtaccggacctactcggcgctgcatccttgaggtggagtggagtggagggcacttcactgattgataaagcgcattgtccgtttcgtgtgagcgtgaaacgactggtcactcgcctgggcctggccctggcccgtttgtgctcggtgggttgtgttgatgtgttgtgtcactgtgtagaaatgttgaatgttccccttcgctcg

SEQ ID NO: 13433 - protein, 457 aa, Zea mays subsp. mays
  peptide (1)..(457): Ceres Seq. ID no. 12373461
  misc_feature (20)..(457): Homolog of NCBI NO: 32490271 NR Description: OSJNBb0116K07.13 [Oryza sativa (japonica
  misc_feature (92)..(437): Homolog of NCBI NO: 30680322 NR Description: extensin-related protein [Arabidopsis thaliana]
  misc_feature (87)..(429): Homolog of NCBI NO: 32488397 NR Description: OSJNBa0043A12.27 [Oryza sativa (japonica
  misc_feature (74)..(457): Homolog of NCBI NO: 15230349 NR Description: unknown protein; protein id: At3g19320.1 thaliana] >gi|11994454|dbj|BAB02456.1| contains similarity to
  misc_feature (75)..(457): Homolog of NCBI NO: 15222811 NR Description: unknown protein; protein id: At1g49750.1
  misc_feature (92)..(421): Homolog of NCBI NO: 15221178 NR Description: putative extensin; protein id: At1g12040.1, by cDNA: gi_13809917 [Arabidopsis thaliana]
  misc_feature (30)..(421): Homolog of NCBI NO: 15233499 NR Description: extensin-like protein; protein id: At4g29240.1, by cDNA: 147694. [Arabidopsis thaliana] >gi|7487113|pir||T13435
  misc_feature (92)..(418): Homolog of NCBI NO: 15230120 NR Description: disease resistance protein, putative; protein id:
  misc_feature (92)..(440): Homolog of NCBI NO: 15235186 NR Description: extensin-like protein; protein id: At4g33970.1
  misc_feature (91)..(424): Homolog of NCBI NO: 15235668 NR Description: extensin-like protein; protein id: At4g13340.1
PRLLPQTLPVIRIQEMAGPGPARTARSVALLCFLVSCAALVDSRGGASRPSRQDLDVGLGGGGVGIGIGIGGGSPSSPSPTPPSSQPQPCDFENERLYRAYLVIQQFRSTVTCDPMGVTQSWSGTDVCSYKGFFCERPPNVTDRAIASVDFNGYMLQAGSLRGFVDSLPDLALFHANSNDFGGAVPALGGLQYFYELDLSNNKLAPAAFPADVLGLTNATFVDIRFNSFYGELPAGVFCKLPRVQAIFVNNNRFSGALPDNIGQSPVNYLSLANNRFTGEIPRSIARNAGTLLEVLFLNNSLSGCLPHELGLLEKATVIDAGANRLTGTIPASFACLRKVEQLNLAGNLLYGEVPDALCRLAFSNLKNLTLSDNYFTSLGSCCWDLIKEGRLNVDRNCIQWAPNQRSHEDCAKFLRQPKSCPVNNYVPCRSKYQSSSEPADDAAAEYRYRTYSALHP

SEQ ID NO: 13434 - protein, 442 aa, Zea mays subsp. mays
  peptide (1)..(442): Ceres Seq. ID no. 12373462
  misc_feature (5)..(442): Homolog of NCBI NO: 32490271 NR Description: OSJNBb0116K07.13 [Oryza sativa (japonica
  misc_feature (77)..(422): Homolog of NCBI NO: 30680322 NR Description: extensin-related protein [Arabidopsis thaliana]
  misc_feature (72)..(414): Homolog of NCBI NO: 32488397 NR Description: OSJNBa0043A12.27 [Oryza sativa (japonica
  misc_feature (59)..(442): Homolog of NCBI NO: 15230349 NR Description: unknown protein; protein id: At3g19320.1 thaliana] >gi|11994454|dbj|BAB02456.1| contains similarity to
  misc_feature (60)..(442): Homolog of NCBI NO: 15222811 NR Description: unknown protein; protein id: At1g49750.1
  misc_feature (77)..(406): Homolog of NCBI NO: 15221178 NR Description: putative extensin; protein id: At1g12040.1, by cDNA: gi_13809917 [Arabidopsis thaliana]
  misc_feature (15)..(406): Homolog of NCBI NO: 15233499 NR Description: extensin-like protein; protein id: At4g29240.1, by cDNA: 147694. [Arabidopsis thaliana] >gi|7487113|pir||T13435
  misc_feature (77)..(403): Homolog of NCBI NO: 15230120 NR Description: disease resistance protein, putative; protein id:
  misc_feature (77)..(425): Homolog of NCBI NO: 15235186 NR Description: extensin-like protein; protein id: At4g33970.1
  misc_feature (76)..(409): Homolog of NCBI NO: 15235668 NR Description: extensin-like protein; protein id: At4g13340.1
MAGPGPARTARSVALLCFLVSCAALVDSRGGASRPSRQDLDVGLGGGGVGIGIGIGGGSPSSPSPTPPSSQPQPCDFENERLYRAYLVIQQFRSTVTCDPMGVTQSWSGTDVCSYKGFFCERPPNVTDRAIASVDFNGYMLQAGSLRGFVDSLPDLALFHANSNDFGGAVPALGGLQYFYELDLSNNKLAPAAFPADVLGLTNATFVDIRFNSFYGELPAGVFCKLPRVQAIFVNNNRFSGALPDNIGQSPVNYLSLANNRFTGEIPRSIARNAGTLLEVLFLNNSLSGCLPHELGLLEKATVIDAGANRLTGTIPASFACLRKVEQLNLAGNLLYGEVPDALCRLAFSNLKNLTLSDNYFTSLGSCCWDLIKEGRLNVDRNCIQWAPNQRSHEDCAKFLRQPKSCPVNNYVPCRSKYQSSSEPADDAAAEYRYRTYSALHP

SEQ ID NO: 13435 - protein, 342 aa, Zea mays subsp. mays
  peptide (1)..(342): Ceres Seq. ID no. 12373463
  misc_feature (1)..(342): Homolog of NCBI NO: 32490271 NR Description: OSJNBb0116K07.13 [Oryza sativa (japonica
  misc_feature (1)..(322): Homolog of NCBI NO: 30680322 NR Description: extensin-related protein [Arabidopsis thaliana]
  misc_feature (1)..(314): Homolog of NCBI NO: 32488397 NR Description: OSJNBa0043A12.27 [Oryza sativa (japonica
  misc_feature (1)..(342): Homolog of NCBI NO: 15230349 NR Description: unknown protein; protein id: At3g19320.1 thaliana] >gi|11994454|dbj|BAB02456.1| contains similarity to
  misc_feature (1)..(342): Homolog of NCBI NO: 15222811 NR Description: unknown protein; protein id: At1g49750.1
  misc_feature (1)..(306): Homolog of NCBI NO: 15221178 NR Description: putative extensin; protein id: At1g12040.1, by cDNA: gi_13809917 [Arabidopsis thaliana]
  misc_feature (1)..(306): Homolog of NCBI NO: 15233499 NR Description: extensin-like protein; protein id: At4g29240.1, by cDNA: 147694. [Arabidopsis thaliana] >gi|7487113|pir||T13435
  misc_feature (1)..(303): Homolog of NCBI NO: 15230120 NR Description: disease resistance protein, putative; protein id:
  misc_feature (1)..(325): Homolog of NCBI NO: 15235186 NR Description: extensin-like protein; protein id: At4g33970.1
  misc_feature (1)..(309): Homolog of NCBI NO: 15235668 NR Description: extensin-like protein; protein id: At4g13340.1
MGVTQSWSGTDVCSYKGFFCERPPNVTDRAIASVDFNGYMLQAGSLRGFVDSLPDLALFHANSNDFGGAVPALGGLQYFYELDLSNNKLAPAAFPADVLGLTNATFVDIRFNSFYGELPAGVFCKLPRVQAIFVNNNRFSGALPDNIGQSPVNYLSLANNRFTGEIPRSIARNAGTLLEVLFLNNSLSGCLPHELGLLEKATVIDAGANRLTGTIPASFACLRKVEQLNLAGNLLYGEVPDALCRLAFSNLKNLTLSDNYFTSLGSCCWDLIKEGRLNVDRNCIQWAPNQRSHEDCAKFLRQPKSCPVNNYVPCRSKYQSSSEPADDAAAEYRYRTYSALHP

SEQ ID NO: 13436 - DNA, 1143 bp, Zea mays subsp. mays
  misc_feature (1)..(1143): Ceres Seq. ID no. 12365155
  misc_feature: MA Experiment ID: 108528 Result: Up-regulated in Transcription
  misc_feature: MA Experiment 108528 PARAMETER Experiment Name: Zm_Imbibed_Seeds_P Parameter: Age (day) Value: 5 vs. 2
  misc_feature: MA Experiment 108528 PARAMETER Experiment Name: Zm_Imbibed_Seeds_P Parameter: Organism Value: Zea mays
  misc_feature: MA Experiment 108528 PARAMETER Experiment Name: Zm_Imbibed_Seeds_P Parameter: Plant Line Value: 35A19
  misc_feature: MA Experiment 108528 PARAMETER Experiment Name: Zm_Imbibed_Seeds_P Parameter: Tissue Value: Aerial vs. Embryo
  misc_feature: MA Experiment ID: 108530 Result: Up-regulated in Transcription
  misc_feature: MA Experiment 108530 PARAMETER Experiment Name: Zm_Imbibed_Seeds_P Parameter: Age (day) Value: 6 vs. 2
  misc_feature: MA Experiment 108530 PARAMETER Experiment Name: Zm_Imbibed_Seeds_P Parameter: Organism Value: Zea mays
  misc_feature: MA Experiment 108530 PARAMETER Experiment Name: Zm_Imbibed_Seeds_P Parameter: Plant Line Value: 35A19
  misc_feature: MA Experiment 108530 PARAMETER Experiment Name: Zm_Imbibed_Seeds_P Parameter: Tissue Value: Aerial vs. Embryo
  misc_feature: MA Experiment ID: 108545 Result: Up-regulated in Transcription
  misc_feature: MA Experiment 108545 PARAMETER Experiment Name: Zm_Imbibed_Seeds_P Parameter: Age (day) Value: 3 vs. 2
  misc_feature: MA Experiment 108545 PARAMETER Experiment Name: Zm_Imbibed_Seeds_P Parameter: Organism Value: Zea mays
  misc_feature: MA Experiment 108545 PARAMETER Experiment Name: Zm_Imbibed_Seeds_P Parameter: Plant Line Value: 35A19
  misc_feature: MA Experiment 108545 PARAMETER Experiment Name: Zm_Imbibed_Seeds_P Parameter: Tissue Value: Aerial vs. Embryo
  misc_feature: MA Experiment ID: 108547 Result: Up-regulated in Transcription
  misc_feature: MA Experiment 108547 PARAMETER Experiment Name: Zm_Imbibed_Seeds_P Parameter: Age (day) Value: 4 vs. 2
  misc_feature: MA Experiment 108547 PARAMETER Experiment Name: Zm_Imbibed_Seeds_P Parameter: Organism Value: Zea mays
  misc_feature: MA Experiment 108547 PARAMETER Experiment Name: Zm_Imbibed_Seeds_P Parameter: Plant Line Value: 35A19
  misc_feature: MA Experiment 108547 PARAMETER Experiment Name: Zm_Imbibed_Seeds_P Parameter: Tissue Value: Aerial vs. Embryo
  misc_feature: MA Experiment ID: 108597 Result: Down-regulated in Transcription
  misc_feature: MA Experiment 108597 PARAMETER Experiment Name: Zm_100uM_ABA_P Parameter: Age (day) Value: 9
  misc_feature: MA Experiment 108597 PARAMETER Experiment Name: Zm_100uM_ABA_P Parameter: Organism Value: Zea mays
  misc_feature: MA Experiment 108597 PARAMETER Experiment Name: Zm_100uM_ABA_P Parameter: Plant Line Value: 35A19
  misc_feature: MA Experiment 108597 PARAMETER Experiment Name: Zm_100uM_ABA_P Parameter: Timepoint (hr) Value: 24
  misc_feature: MA Experiment 108597 PARAMETER Experiment Name: Zm_100uM_ABA_P Parameter: Tissue Value: Aerial
  misc_feature: MA Experiment 108597 PARAMETER Experiment Name: Zm_100uM_ABA_P Parameter: Treatment Value: 100uM ABA vs. No Treatment
  misc_feature: MA Experiment ID: 20000477 Result: Down-regulated in Transcription
  misc_feature: MA Experiment 20000477 PARAMETER Experiment Name: Zm_5mM_SA_P Parameter: Age (day) Value: 10
  misc_feature: MA Experiment 20000477 PARAMETER Experiment Name: Zm_5mM_SA_P Parameter: Organism Value: Zea mays
  misc_feature: MA Experiment 20000477 PARAMETER Experiment Name: Zm_5mM_SA_P Parameter: Plant Line Value: 35A19
  misc_feature: MA Experiment 20000477 PARAMETER Experiment Name: Zm_5mM_SA_P Parameter: Timepoint (hr) Value: 48
  misc_feature: MA Experiment 20000477 PARAMETER Experiment Name: Zm_5mM_SA_P Parameter: Tissue Value: Aerial
  misc_feature: MA Experiment 20000477 PARAMETER Experiment Name: Zm_5mM_SA_P Parameter: Treatment Value: 5mM SA vs. No Treatment
  misc_feature: MA Experiment ID: 20000479 Result: Down-regulated in Transcription
  misc_feature: MA Experiment 20000479 PARAMETER Experiment Name: Zm_Drought_P Parameter: Age (day) Value: 10
  misc_feature: MA Experiment 20000479 PARAMETER Experiment Name: Zm_Drought_P Parameter: Organism Value: Zea mays
  misc_feature: MA Experiment 20000479 PARAMETER Experiment Name: Zm_Drought_P Parameter: Plant Line Value: 35A19
  misc_feature: MA Experiment 20000479 PARAMETER Experiment Name: Zm_Drought_P Parameter: Timepoint (hr) Value: 48
  misc_feature: MA Experiment 20000479 PARAMETER Experiment Name: Zm_Drought_P Parameter: Tissue Value: Aerial
  misc_feature: MA Experiment 20000479 PARAMETER Experiment Name: Zm_Drought_P Parameter: Treatment Value: Drought vs. No Drought
  misc_feature: MA Experiment ID: 20000480 Result: Down-regulated in Transcription
  misc_feature: MA Experiment 20000480 PARAMETER Experiment Name: Zm_Drought_P Parameter: Age (day) Value: 11
  misc_feature: MA Experiment 20000480 PARAMETER Experiment Name: Zm_Drought_P Parameter: Organism Value: Zea mays
  misc_feature: MA Experiment 20000480 PARAMETER Experiment Name: Zm_Drought_P Parameter: Plant Line Value: 35A19
  misc_feature: MA Experiment 20000480 PARAMETER Experiment Name: Zm_Drought_P Parameter: Timepoint (hr) Value: 72
  misc_feature: MA Experiment 20000480 PARAMETER Experiment Name: Zm_Drought_P Parameter: Tissue Value: Aerial
  misc_feature: MA Experiment 20000480 PARAMETER Experiment Name: Zm_Drought_P Parameter: Treatment Value: Drought vs. No Drought
aaaagaatcacctcctcaacctccagcccaacctccagcccgggatcgagagcaatggcgctcgccaaggccaaggagatcgttgcctccgctcccctcgtcgtcttcagcaaaacttcctgccctttctgcgtccgtgtgaagcagttgttcgagaagctcggagcaagcctacaaggccattggcaacgggtacaggctggccgacaacaagttcgccgacctgacgaacgaggagttcagggccaagatgctgggcttcggacggcctcgcagcggaggcggagccgggcactccacagcgccgagcaccgtggcttgtattggaagtggactgatgggtcgtcagggttattctgatctaccgaaaagcgtggactggcgagagaagggagctgtcgcgccggtgaagagccagggggactgtggctcttgctgggcgttctccgccgttgcggccatcgagggcatcaaccagatcaagaacgggaagctggtgtccctgtcggagcaggagctggtggactgcgacaccaaggccatcggctgcgccggcgggtacatgagctgggccttcgagttcgtcatgaagaaccgcggcctcaccaccgaacggaactacccgtatcaagggctgaacggcgcctgccagacgccgaagctgaaggagagcgcggtgagcatctccgggtacatgaacgtgacgcccagcagcgagccggacctcctgcgggccgccgcggcgcagccggtgtccgtggccgtggacgccggcagcttcgtgtggcagctctacggcggcggcgtcttcacgggaccctgcaccgccgagctgaaccacggcgtcacggtggtcgggtacggcgagacccagggggacacggacggcgacggtagcggcgtgcccgggaagaagtactggatcgtcaagaactcgtgggggcccgagtggggcgacgccggctacatcctcatgcaacgcgaagccagcgtcgcgtctggcctctgcggcatcgctatgctcccgagctacccggtcatgtgatccggcggctgccgccgtcgagacctacagctgcagctctaagaacaatcagtcattatgttggccatcttttgaacaaagggcgttcctctttcccc

SEQ ID NO: 13437 - protein, 264 aa, Zea mays subsp. mays
  peptide (1)..(264): Ceres Seq. ID no. 12365156
  misc_feature (38)..(263): Pfam Name: Papain family cysteine protease Pfam Description: Papain family cysteine protease
  misc_feature (1)..(263): Homolog of NCBI NO: 544129 NR Description: Vignain precursor (Bean endopeptidase) (Cysteine
  misc_feature (1)..(263): Homolog of NCBI NO: 1345573 NR Description: endopeptidase (EP-C1) [Phaseolus vulgaris]
  misc_feature (1)..(263): Homolog of NCBI NO: 7435774 NR Description: cysteine proteinase (EC 3.4.22.-) - kidney bean
  misc_feature (1)..(263): Homolog of NCBI NO: 445927 NR Description: Cys endopeptidase
  misc_feature (1)..(263): Homolog of NCBI NO: 118158 NR Description: Vignain precursor (Bean endopeptidase) (Cysteine
  misc_feature (1)..(262): Homolog of NCBI NO: 24285904 NR Description: cysteine proteinase precursor [Ipomoea batatas]
  misc_feature (1)..(262): Homolog of NCBI NO: 37780043 NR Description: cysteine protease 1 [Trifolium repens]
  misc_feature (1)..(262): Homolog of NCBI NO: 37780049 NR Description: cysteine protease 10 [Trifolium repens]
  misc_feature (1)..(262): Homolog of NCBI NO: 13491750 NR Description: cysteine protease [Ipomoea batatas]
  misc_feature (1)..(262): Homolog of NCBI NO: 40806498 NR Description: putative cysteine protease 1 [Iris hollandica]
MLGFGRPRSGGGAGHSTAPSTVACIGSGLMGRQGYSDLPKSVDWREKGAVAPVKSQGDCGSCWAFSAVAAIEGINQIKNGKLVSLSEQELVDCDTKAIGCAGGYMSWAFEFVMKNRGLTTERNYPYQGLNGACQTPKLKESAVSISGYMNVTPSSEPDLLRAAAAQPVSVAVDAGSFVWQLYGGGVFTGPCTAELNHGVTVVGYGETQGDTDGDGSGVPGKKYWIVKNSWGPEWGDAGYILMQREASVASGLCGIAMLPSYPVM

SEQ ID NO: 13438 - protein, 235 aa, Zea mays subsp. mays
  peptide (1)..(235): Ceres Seq. ID no. 12365157
  misc_feature (9)..(234): Pfam Name: Papain family cysteine protease Pfam Description: Papain family cysteine protease
  misc_feature (1)..(234): Homolog of NCBI NO: 544129 NR Description: Vignain precursor (Bean endopeptidase) (Cysteine
  misc_feature (1)..(234): Homolog of NCBI NO: 1345573 NR Description: endopeptidase (EP-C1) [Phaseolus vulgaris]
  misc_feature (1)..(234): Homolog of NCBI NO: 7435774 NR Description: cysteine proteinase (EC 3.4.22.-) - kidney bean
  misc_feature (1)..(234): Homolog of NCBI NO: 445927 NR Description: Cys endopeptidase
  misc_feature (1)..(234): Homolog of NCBI NO: 118158 NR Description: Vignain precursor (Bean endopeptidase) (Cysteine
  misc_feature (1)..(233): Homolog of NCBI NO: 24285904 NR Description: cysteine proteinase precursor [Ipomoea batatas]
  misc_feature (1)..(233): Homolog of NCBI NO: 37780043 NR Description: cysteine protease 1 [Trifolium repens]
  misc_feature (1)..(233): Homolog of NCBI NO: 37780049 NR Description: cysteine protease 10 [Trifolium repens]
  misc_feature (1)..(233): Homolog of NCBI NO: 13491750 NR Description: cysteine protease [Ipomoea batatas]
  misc_feature (1)..(233): Homolog of NCBI NO: 40806498 NR Description: putative cysteine protease 1 [Iris hollandica]
MGRQGYSDLPKSVDWREKGAVAPVKSQGDCGSCWAFSAVAAIEGINQIKNGKLVSLSEQELVDCDTKAIGCAGGYMSWAFEFVMKNRGLTTERNYPYQGLNGACQTPKLKESAVSISGYMNVTPSSEPDLLRAAAAQPVSVAVDAGSFVWQLYGGGVFTGPCTAELNHGVTVVGYGETQGDTDGDGSGVPGKKYWIVKNSWGPEWGDAGYILMQREASVASGLCGIAMLPSYPVM

SEQ ID NO: 13439 - protein, 160 aa, Zea mays subsp. mays
  peptide (1)..(160): Ceres Seq. ID no. 12365158
  misc_feature (1)..(159): Pfam Name: Papain family cysteine protease Pfam Description: Papain family cysteine protease
  misc_feature (1)..(159): Homolog of NCBI NO: 544129 NR Description: Vignain precursor (Bean endopeptidase) (Cysteine
  misc_feature (1)..(159): Homolog of NCBI NO: 1345573 NR Description: endopeptidase (EP-C1) [Phaseolus vulgaris]
  misc_feature (1)..(159): Homolog of NCBI NO: 7435774 NR Description: cysteine proteinase (EC 3.4.22.-) - kidney bean
  misc_feature (1)..(159): Homolog of NCBI NO: 445927 NR Description: Cys endopeptidase
  misc_feature (1)..(159): Homolog of NCBI NO: 118158 NR Description: Vignain precursor (Bean endopeptidase) (Cysteine
  misc_feature (1)..(158): Homolog of NCBI NO: 24285904 NR Description: cysteine proteinase precursor [Ipomoea batatas]
  misc_feature (1)..(158): Homolog of NCBI NO: 37780043 NR Description: cysteine protease 1 [Trifolium repens]
  misc_feature (1)..(158): Homolog of NCBI NO: 37780049 NR Description: cysteine protease 10 [Trifolium repens]
  misc_feature (1)..(158): Homolog of NCBI NO: 13491750 NR Description: cysteine protease [Ipomoea batatas]
  misc_feature (1)..(158): Homolog of NCBI NO: 40806498 NR Description: putative cysteine protease 1 [Iris hollandica]
MSWAFEFVMKNRGLTTERNYPYQGLNGACQTPKLKESAVSISGYMNVTPSSEPDLLRAAAAQPVSVAVDAGSFVWQLYGGGVFTGPCTAELNHGVTVVGYGETQGDTDGDGSGVPGKKYWIVKNSWGPEWGDAGYILMQREASVASGLCGIAMLPSYPVM

SEQ ID NO: 13440 - DNA, 1562 bp, Zea mays subsp. mays
  misc_feature (1)..(1562): Ceres Seq. ID no. 12365090
  misc_feature: MA Experiment ID: 108522 Result: Up-regulated in Transcription
  misc_feature: MA Experiment 108522 PARAMETER Experiment Name: Zm_42deg_Heat_P Parameter: Age (day) Value: 8
  misc_feature: MA Experiment 108522 PARAMETER Experiment Name: Zm_42deg_Heat_P Parameter: Organism Value: Zea mays
  misc_feature: MA Experiment 108522 PARAMETER Experiment Name: Zm_42deg_Heat_P Parameter: Plant Line Value: 35A19
  misc_feature: MA Experiment 108522 PARAMETER Experiment Name: Zm_42deg_Heat_P Parameter: Temperature (deg C) Value: 42 vs. 22
  misc_feature: MA Experiment 108522 PARAMETER Experiment Name: Zm_42deg_Heat_P Parameter: Timepoint (hr) Value: 1
  misc_feature: MA Experiment 108522 PARAMETER Experiment Name: Zm_42deg_Heat_P Parameter: Tissue Value: Aerial
  misc_feature: MA Experiment ID: 108523 Result: Up-regulated in Transcription
  misc_feature: MA Experiment 108523 PARAMETER Experiment Name: Zm_42deg_Heat_P Parameter: Age (day) Value: 8
  misc_feature: MA Experiment 108523 PARAMETER Experiment Name: Zm_42deg_Heat_P Parameter: Organism Value: Zea mays
  misc_feature: MA Experiment 108523 PARAMETER Experiment Name: Zm_42deg_Heat_P Parameter: Plant Line Value: 35A19
  misc_feature: MA Experiment 108523 PARAMETER Experiment Name: Zm_42deg_Heat_P Parameter: Temperature (deg C) Value: 42 vs. 22
  misc_feature: MA Experiment 108523 PARAMETER Experiment Name: Zm_42deg_Heat_P Parameter: Timepoint (hr) Value: 6
  misc_feature: MA Experiment 108523 PARAMETER Experiment Name: Zm_42deg_Heat_P Parameter: Tissue Value: Aerial
  misc_feature: MA Experiment ID: 108556 Result: Up-regulated in Transcription
  misc_feature: MA Experiment 108556 PARAMETER Experiment Name: Zm_Drought_P Parameter: Age (day) Value: 9
  misc_feature: MA Experiment 108556 PARAMETER Experiment Name: Zm_Drought_P Parameter: Organism Value: Zea mays
  misc_feature: MA Experiment 108556 PARAMETER Experiment Name: Zm_Drought_P Parameter: Plant Line Value: 35A19
  misc_feature: MA Experiment 108556 PARAMETER Experiment Name: Zm_Drought_P Parameter: Timepoint (hr) Value: 24
  misc_feature: MA Experiment 108556 PARAMETER Experiment Name: Zm_Drought_P Parameter: Tissue Value: Aerial
  misc_feature: MA Experiment 108556 PARAMETER Experiment Name: Zm_Drought_P Parameter: Treatment Value: Drought vs. No Drought
  misc_feature: MA Experiment ID: 20000479 Result: Up-regulated in Transcription
  misc_feature: MA Experiment 20000479 PARAMETER Experiment Name: Zm_Drought_P Parameter: Age (day) Value: 10
  misc_feature: MA Experiment 20000479 PARAMETER Experiment Name: Zm_Drought_P Parameter: Organism Value: Zea mays
  misc_feature: MA Experiment 20000479 PARAMETER Experiment Name: Zm_Drought_P Parameter: Plant Line Value: 35A19
  misc_feature: MA Experiment 20000479 PARAMETER Experiment Name: Zm_Drought_P Parameter: Timepoint (hr) Value: 48
  misc_feature: MA Experiment 20000479 PARAMETER Experiment Name: Zm_Drought_P Parameter: Tissue Value: Aerial
  misc_feature: MA Experiment 20000479 PARAMETER Experiment Name: Zm_Drought_P Parameter: Treatment Value: Drought vs. No Drought
  misc_feature: MA Experiment ID: 20000535 Result: Up-regulated in Transcription
  misc_feature: MA Experiment 20000535 PARAMETER Experiment Name: Zm_Hybrid_Seed_Dev_P Parameter: DAP Value: 30 vs. 12
  misc_feature: MA Experiment 20000535 PARAMETER Experiment Name: Zm_Hybrid_Seed_Dev_P Parameter: Organism Value: Zea mays
  misc_feature: MA Experiment 20000535 PARAMETER Experiment Name: Zm_Hybrid_Seed_Dev_P Parameter: Plant Line Value: 35A19
  misc_feature: MA Experiment 20000535 PARAMETER Experiment Name: Zm_Hybrid_Seed_Dev_P Parameter: Tissue Value: Embryo vs. Unfert Floret
aagcccagctgacaacaccggcctccgagaagcagcgcaggcgcagggcattccagaacgttcggcggcggcgaggcgacacgcccaccaccagtcagccgccccgccacagccatgcgcctccacgccggcgcacgcctcgcgctcctgctcgcccgccgctccctctcctcctccccccgtatcccgcgggtgcacacagggatacggagcgaggcgccctcccggagctctcccttctatccgccgagcagcgcccgcaggtccttccacgggaccaggccggtggcggcaagggactactacgatgtgctcggcgtcagcaagagcgccagccaggcggagatcaaaaaggcctattatgggcttgcaaagaagctccatccagacacaaataaaggtgatgcggatgcagaacgcaagtttcaagaggttcaacgagcttatgagactctaaaggatgaacaaaaaagatcattatatgatcaggttggccctgatcagtatgagaaaactgcttctggcggaggcggaactggcttcgagggtggttttggaaatccatttgaggatatttttggtggtggcggtggcggtggtggaatgaatgatttctttaggaacatttttggggatagggactttagaggacgagatgttaaggttgcactcgaactatcatttatggaagcagttcaagggtgcagcaaaacggtcaccttccaaacgtctgtaacatgtgaaatctgtggtggagccggtgtgcctcctggaaccacacctgaaacatgtctatcttgcaggggttcaggatttatattcatgcaaaccgggcccttcaggatgcaatcaacctgcacaaaatgtggtggttctgggaaaactgtgaaggaattctgcaaggcatgcagaggaaacaaagttgtgcctggaaggaaatcagtccgccttgacatactgcctggtttggataatgaggataccataaaggtggttcgatcaggtggagaagacccagatggccgtccaggtgatctttatgtgaccctcgaggttcgtgaggatcctgttttccgaagagagaaaggtgatattcatgttgatgctgtcctgaatgtgactcaggcaattttgggagggacagttcaagtcccaactctcagtggagacgttgttctaaaggtcaagcccggtactcaacctggtcagaaggtagttctgagaggaaaagggatcaagacaagaaactcaccgcactacggagatcaatatgtccatttcaatgtcaacatccccgaaaatttgacgtctagacagcgggagctgatcgaggaattcgcgaaggaggagcaaggcgaagacgagaaggacgccaaggcagcagctggagcatcggggggatagccggttttaggagccacagtagtgccttttagctggtatttataccgtgaccatagacctgtctcaaattcgcagcgaaaaaaatatatagataggtctttgtttcggattttgtagctggaataaatggataatacgtctagaactgattttctgcc

SEQ ID NO: 13441 - protein, 429 aa, Zea mays subsp. mays
  peptide (1)..(429): Ceres Seq. ID no. 12365091
  misc_feature (289)..(394): Pfam Name: DnaJ C terminal region Pfam Description: DnaJ C terminal region
  misc_feature (50)..(427): Homolog of NCBI NO: 18422864 NR Description: DnaJ protein-like; protein id: At5g48030.1, by cDNA: 14006. [Arabidopsis thaliana]
  misc_feature (50)..(427): Homolog of NCBI NO: 21429604 NR Description: GFA2 [Arabidopsis thaliana]
  misc_feature (50)..(427): Homolog of NCBI NO: 21553367 NR Description: DnaJ protein-like [Arabidopsis thaliana]
  misc_feature (50)..(427): Homolog of NCBI NO: 10177754 NR Description: DnaJ protein-like [Arabidopsis thaliana]
  misc_feature (235)..(394): Homolog of NCBI NO: 34897976 NR Description: DnaJ protein-like~contains EST AU181927(C61864)
  misc_feature (61)..(421): Homolog of NCBI NO: 15675997 NR Description: dnaJ protein [Neisseria meningitidis MC58] DnaJ protein [Neisseria meningitidis Z2491]
  misc_feature (58)..(428): Homolog of NCBI NO: 15599954 NR Description: DnaJ protein [Pseudomonas aeruginosa PA01]
  misc_feature (58)..(415): Homolog of NCBI NO: 34497100 NR Description: heat shock protein dnaJ; chaperone with DnaK violaceum ATCC 12472] >gi|34102957|gb|AAQ59321.1| heat shock
  misc_feature (58)..(415): Homolog of NCBI NO: 15640872 NR Description: dnaJ protein [Vibrio cholerae]
  misc_feature (54)..(420): Homolog of NCBI NO: 26451496 NR Description: putative AtJ1 [Arabidopsis thaliana]
MRLHAGARLALLLARRSLSSSPRIPRVHTGIRSEAPSRSSPFYPPSSARRSFHGTRPVAARDYYDVLGVSKSASQAEIKKAYYGLAKKLHPDTNKGDADAERKFQEVQRAYETLKDEQKRSLYDQVGPDQYEKTASGGGGTGFEGGFGNPFEDIFGGGGGGGGMNDFFRNIFGDRDFRGRDVKVALELSFMEAVQGCSKTVTFQTSVTCEICGGAGVPPGTTPETCLSCRGSGFIFMQTGPFRMQSTCTKCGGSGKTVKEFCKACRGNKVVPGRKSVRLDILPGLDNEDTIKVVRSGGEDPDGRPGDLYVTLEVREDPVFRREKGDIHVDAVLNVTQAILGGTVQVPTLSGDVVLKVKPGTQPGQKVVLRGKGIKTRNSPHYGDQYVHFNVNIPENLTSRQRELIEEFAKEEQGEDEKDAKAAAGASGG

SEQ ID NO: 13442 - protein, 266 aa, Zea mays subsp. mays
  peptide (1)..(266): Ceres Seq. ID no. 12365092
  misc_feature (126)..(231): Pfam Name: DnaJ C terminal region Pfam Description: DnaJ C terminal region
  misc_feature (1)..(257): Homolog of NCBI NO: 26451496 NR Description: putative AtJ1 [Arabidopsis thaliana]
  misc_feature (1)..(264): Homolog of NCBI NO: 18422864 NR Description: DnaJ protein-like; protein id: At5g48030.1, by cDNA: 14006. [Arabidopsis thaliana]
  misc_feature (1)..(264): Homolog of NCBI NO: 21429604 NR Description: GFA2 [Arabidopsis thaliana]
  misc_feature (1)..(264): Homolog of NCBI NO: 21553367 NR Description: DnaJ protein-like [Arabidopsis thaliana]
  misc_feature (1)..(264): Homolog of NCBI NO: 10177754 NR Description: DnaJ protein-like [Arabidopsis thaliana]
  misc_feature (72)..(231): Homolog of NCBI NO: 34897976 NR Description: DnaJ protein-like~contains EST AU181927(C61864)
  misc_feature (1)..(258): Homolog of NCBI NO: 15675997 NR Description: dnaJ protein [Neisseria meningitidis MC58] DnaJ protein [Neisseria meningitidis Z2491]
  misc_feature (1)..(265): Homolog of NCBI NO: 15599954 NR Description: DnaJ protein [Pseudomonas aeruginosa PA01]
  misc_feature (1)..(252): Homolog of NCBI NO: 34497100 NR Description: heat shock protein dnaJ; chaperone with DnaK violaceum ATCC 12472] >gi|34102957|gb|AAQ59321.1| heat shock
  misc_feature (1)..(252): Homolog of NCBI NO: 15640872 NR Description: dnaJ protein [Vibrio cholerae]
MNDFFRNIFGDRDFRGRDVKVALELSFMEAVQGCSKTVTFQTSVTCEICGGAGVPPGTTPETCLSCRGSGFIFMQTGPFRMQSTCTKCGGSGKTVKEFCKACRGNKVVPGRKSVRLDILPGLDNEDTIKVVRSGGEDPDGRPGDLYVTLEVREDPVFRREKGDIHVDAVLNVTQAILGGTVQVPTLSGDVVLKVKPGTQPGQKVVLRGKGIKTRNSPHYGDQYVHFNVNIPENLTSRQRELIEEFAKEEQGEDEKDAKAAAGASGG

SEQ ID NO: 13443 - protein, 239 aa, Zea mays subsp. mays
  peptide (1)..(239): Ceres Seq. ID no. 12365093
  misc_feature (99)..(204): Pfam Name: DnaJ C terminal region Pfam Description: DnaJ C terminal region
  misc_feature (1)..(237): Homolog of NCBI NO: 18422864 NR Description: DnaJ protein-like; protein id: At5g48030.1, by cDNA: 14006. [Arabidopsis thaliana]
  misc_feature (1)..(237): Homolog of NCBI NO: 21429604 NR Description: GFA2 [Arabidopsis thaliana]
  misc_feature (1)..(237): Homolog of NCBI NO: 21553367 NR Description: DnaJ protein-like [Arabidopsis thaliana]
  misc_feature (1)..(237): Homolog of NCBI NO: 10177754 NR Description: DnaJ protein-like [Arabidopsis thaliana]
  misc_feature (45)..(204): Homolog of NCBI NO: 34897976 NR Description: DnaJ protein-like~contains EST AU181927(C61864)
  misc_feature (1)..(231): Homolog of NCBI NO: 15675997 NR Description: dnaJ protein [Neisseria meningitidis MC58] DnaJ protein [Neisseria meningitidis Z2491]
  misc_feature (1)..(238): Homolog of NCBI NO: 15599954 NR Description: DnaJ protein [Pseudomonas aeruginosa PA01]
  misc_feature (1)..(225): Homolog of NCBI NO: 34497100 NR Description: heat shock protein dnaJ; chaperone with DnaK violaceum ATCC 12472] >gi|34102957|gb|AAQ59321.1| heat shock
  misc_feature (1)..(225): Homolog of NCBI NO: 15640872 NR Description: dnaJ protein [Vibrio cholerae]
  misc_feature (1)..(230): Homolog of NCBI NO: 26451496 NR Description: putative AtJ1 [Arabidopsis thaliana]
MEAVQGCSKTVTFQTSVTCEICGGAGVPPGTTPETCLSCRGSGFIFMQTGPFRMQSTCTKCGGSGKTVKEFCKACRGNKVVPGRKSVRLDILPGLDNEDTIKVVRSGGEDPDGRPGDLYVTLEVREDPVFRREKGDIHVDAVLNVTQAILGGTVQVPTLSGDVVLKVKPGTQPGQKVVLRGKGIKTRNSPHYGDQYVHFNVNIPENLTSRQRELIEEFAKEEQGEDEKDAKAAAGASGG

SEQ ID NO: 13444 - DNA, 1191 bp, Zea mays subsp. mays; identical to SEQ ID NO: 11054
  misc_feature (1)..(1191): Ceres Seq. ID no. 13634967
  misc_feature: MA Experiment ID: 108528 Result: Down-regulated in Transcription
  misc_feature: MA Experiment 108528 PARAMETER Experiment Name: Zm_Imbibed_Seeds_P Parameter: Age (day) Value: 5 vs. 2
  misc_feature: MA Experiment 108528 PARAMETER Experiment Name: Zm_Imbibed_Seeds_P Parameter: Organism Value: Zea mays
  misc_feature: MA Experiment 108528 PARAMETER Experiment Name: Zm_Imbibed_Seeds_P Parameter: Plant Line Value: 35A19
  misc_feature: MA Experiment 108528 PARAMETER Experiment Name: Zm_Imbibed_Seeds_P Parameter: Tissue Value: Aerial vs. Embryo
  misc_feature: MA Experiment ID: 108529 Result: Down-regulated in Transcription
  misc_feature: MA Experiment 108529 PARAMETER Experiment Name: Zm_Imbibed_Seeds_P Parameter: Age (day) Value: 5 vs. 2
  misc_feature: MA Experiment 108529 PARAMETER Experiment Name: Zm_Imbibed_Seeds_P Parameter: Organism Value: Zea mays
  misc_feature: MA Experiment 108529 PARAMETER Experiment Name: Zm_Imbibed_Seeds_P Parameter: Plant Line Value: 35A19
  misc_feature: MA Experiment 108529 PARAMETER Experiment Name: Zm_Imbibed_Seeds_P Parameter: Tissue Value: Roots vs. Embryo
  misc_feature: MA Experiment ID: 108546 Result: Down-regulated in Transcription
  misc_feature: MA Experiment 108546 PARAMETER Experiment Name: Zm_Imbibed_Seeds_P Parameter: Age (day) Value: 3 vs. 2
  misc_feature: MA Experiment 108546 PARAMETER Experiment Name: Zm_Imbibed_Seeds_P Parameter: Organism Value: Zea mays
  misc_feature: MA Experiment 108546 PARAMETER Experiment Name: Zm_Imbibed_Seeds_P Parameter: Plant Line Value: 35A19
  misc_feature: MA Experiment 108546 PARAMETER Experiment Name: Zm_Imbibed_Seeds_P Parameter: Tissue Value: Roots vs. Embryo
  misc_feature: MA Experiment ID: 20000478 Result: Up-regulated in Transcription
  misc_feature: MA Experiment 20000478 PARAMETER Experiment Name: Zm_5mM_SA_P Parameter: Age (day) Value: 11
  misc_feature: MA Experiment 20000478 PARAMETER Experiment Name: Zm_5mM_SA_P Parameter: Organism Value: Zea mays
  misc_feature: MA Experiment 20000478 PARAMETER Experiment Name: Zm_5mM_SA_P Parameter: Plant Line Value: 35A19
  misc_feature: MA Experiment 20000478 PARAMETER Experiment Name: Zm_5mM_SA_P Parameter: Timepoint (hr) Value: 72
  misc_feature: MA Experiment 20000478 PARAMETER Experiment Name: Zm_5mM_SA_P Parameter: Tissue Value: Aerial
  misc_feature: MA Experiment 20000478 PARAMETER Experiment Name: Zm_5mM_SA_P Parameter: Treatment Value: 5mM SA vs. No Treatment
  misc_feature: MA Experiment ID: 20000492 Result: Up-regulated in Transcription
  misc_feature: MA Experiment 20000492 PARAMETER Experiment Name: Zm_Hybrid_Seed_Dev_P Parameter: DAP Value: 12
  misc_feature: MA Experiment 20000492 PARAMETER Experiment Name: Zm_Hybrid_Seed_Dev_P Parameter: Organism Value: Zea mays
  misc_feature: MA Experiment 20000492 PARAMETER Experiment Name: Zm_Hybrid_Seed_Dev_P Parameter: Plant Line Value: 35A19
  misc_feature: MA Experiment 20000492 PARAMETER Experiment Name: Zm_Hybrid_Seed_Dev_P Parameter: Tissue Value: Fert Kernel vs. Unfert Floret
  misc_feature: MA Experiment ID: 20000535 Result: Down-regulated in Transcription
  misc_feature: MA Experiment 20000535 PARAMETER Experiment Name: Zm_Hybrid_Seed_Dev_P Parameter: DAP Value: 30 vs. 12
  misc_feature: MA Experiment 20000535 PARAMETER Experiment Name: Zm_Hybrid_Seed_Dev_P Parameter: Organism Value: Zea mays
  misc_feature: MA Experiment 20000535 PARAMETER Experiment Name: Zm_Hybrid_Seed_Dev_P Parameter: Plant Line Value: 35A19
  misc_feature: MA Experiment 20000535 PARAMETER Experiment Name: Zm_Hybrid_Seed_Dev_P Parameter: Tissue Value: Embryo vs. Unfert Floret

SEQ ID NO: 13445 - protein, 128 aa, Zea mays subsp. mays; identical to SEQ ID NO: 11055
  peptide (1)..(128): Ceres Seq. ID no. 13634968
  misc_feature (1)..(75): Pfam Name: K-box region Pfam Description: K-box region
  misc_feature (1)..(75): Pfam Name: K-box region Pfam Description: K-box region
  misc_feature (1)..(128): Homolog of NCBI NO: 1006768 NR Description: ZMM2 [Zea mays]
  misc_feature (1)..(128): Homolog of NCBI NO: 2130078 NR Description: MADS-box protein 3 - rice
  misc_feature (1)..(128): Homolog of NCBI NO: 34903684 NR Description: putative MADS-box protein [Oryza sativa (japonica
  misc_feature (1)..(128): Homolog of NCBI NO: 19698536 NR Description: AGAMOUS-like protein 1 HvAG1 [Hordeum vulgare
  misc_feature (1)..(128): Homolog of NCBI NO: 29372746 NR Description: putative MADS-domain transcription factor [Zea
  misc_feature (1)..(128): Homolog of NCBI NO: 2130078 NR Description: MADS-box protein 3 - rice
  misc_feature (1)..(128): Homolog of NCBI NO: 19698536 NR Description: AGAMOUS-like protein 1 HvAG1 [Hordeum vulgare
  misc_feature (1)..(127): Homolog of NCBI NO: 3913007 NR Description: AGAMOUS protein (NAG1) >gi|7446523|pir||T03592
  misc_feature (1)..(119): Homolog of NCBI NO: 24636577 NR Description: MADS box transcription factor [Triticum aestivum]
  misc_feature (1)..(125): Homolog of NCBI NO: 19698538 NR Description: AGAMOUS-like protein 2 HvAG2 [Hordeum vulgare
  misc_feature (1)..(128): Homolog of NCBI NO: 18650789 NR Description: MADS-box transcription factor [Phalaenopsis
  misc_feature (1)..(128): Homolog of NCBI NO: 7446524 NR Description: hypothetical protein - maize
  misc_feature (1)..(128): Homolog of NCBI NO: 29372746 NR Description: putative MADS-domain transcription factor [Zea
  misc_feature (1)..(128): Homolog of NCBI NO: 34903684 NR Description: putative MADS-box protein [Oryza sativa (japonica
  misc_feature (1)..(128): Homolog of NCBI NO: 1006768 NR Description: ZMM2 [Zea mays]
  misc_feature (1)..(128): Homolog of NCBI NO: 7446524 NR Description: hypothetical protein - maize
  misc_feature (1)..(128): Homolog of NCBI NO: 18650789 NR Description: MADS-box transcription factor [Phalaenopsis
  misc_feature (1)..(125): Homolog of NCBI NO: 19698538 NR Description: AGAMOUS-like protein 2 HvAG2 [Hordeum vulgare
  misc_feature (1)..(119): Homolog of NCBI NO: 24636577 NR Description: MADS box transcription factor [Triticum aestivum]
  misc_feature (1)..(127): Homolog of NCBI NO: 3913007 NR Description: AGAMOUS protein (NAG1) >gi|7446523|pir||T03592

SEQ ID NO: 13446 - protein, 108 aa, Zea mays subsp. mays; identical to SEQ ID NO: 11056
  peptide (1)..(108): Ceres Seq. ID no. 13634969
  misc_feature (1)..(55): Pfam Name: K-box region Pfam Description: K-box region
  misc_feature (1)..(55): Pfam Name: K-box region Pfam Description: K-box region
  misc_feature (1)..(108): Homolog of NCBI NO: 1006768 NR Description: ZMM2 [Zea mays]
  misc_feature (1)..(108): Homolog of NCBI NO: 2130078 NR Description: MADS-box protein 3 - rice
  misc_feature (1)..(108): Homolog of NCBI NO: 34903684 NR Description: putative MADS-box protein [Oryza sativa (japonica
  misc_feature (1)..(108): Homolog of NCBI NO: 19698536 NR Description: AGAMOUS-like protein 1 HvAG1 [Hordeum vulgare
  misc_feature (1)..(108): Homolog of NCBI NO: 29372746 NR Description: putative MADS-domain transcription factor [Zea
  misc_feature (1)..(108): Homolog of NCBI NO: 2130078 NR Description: MADS-box protein 3 - rice
  misc_feature (1)..(108): Homolog of NCBI NO: 19698536 NR Description: AGAMOUS-like protein 1 HvAG1 [Hordeum vulgare
  misc_feature (1)..(107): Homolog of NCBI NO: 3913007 NR Description: AGAMOUS protein (NAG1) >gi|7446523|pir||T03592
  misc_feature (1)..(99): Homolog of NCBI NO: 24636577 NR Description: MADS box transcription factor [Triticum aestivum]
  misc_feature (1)..(105): Homolog of NCBI NO: 19698538 NR Description: AGAMOUS-like protein 2 HvAG2 [Hordeum vulgare
  misc_feature (1)..(108): Homolog of NCBI NO: 18650789 NR Description: MADS-box transcription factor [Phalaenopsis
  misc_feature (1)..(108): Homolog of NCBI NO: 7446524 NR Description: hypothetical protein - maize
  misc_feature (1)..(108): Homolog of NCBI NO: 29372746 NR Description: putative MADS-domain transcription factor [Zea
  misc_feature (1)..(108): Homolog of NCBI NO: 34903684 NR Description: putative MADS-box protein [Oryza sativa (japonica
  misc_feature (1)..(108): Homolog of NCBI NO: 1006768 NR Description: ZMM2 [Zea mays]
  misc_feature (1)..(108): Homolog of NCBI NO: 7446524 NR Description: hypothetical protein - maize
  misc_feature (1)..(108): Homolog of NCBI NO: 18650789 NR Description: MADS-box transcription factor [Phalaenopsis
  misc_feature (1)..(105): Homolog of NCBI NO: 19698538 NR Description: AGAMOUS-like protein 2 HvAG2 [Hordeum vulgare
  misc_feature (1)..(99): Homolog of NCBI NO: 24636577 NR Description: MADS box transcription factor [Triticum aestivum]
  misc_feature (1)..(107): Homolog of NCBI NO: 3913007 NR Description: AGAMOUS protein (NAG1) >gi|7446523|pir||T03592

SEQ ID NO: 13447 - protein, 100 aa, Zea mays subsp. mays; identical to SEQ ID NO: 11057
  peptide (1)..(100): Ceres Seq. ID no. 13634970
  misc_feature (1)..(100): Homolog of NCBI NO: 1006768 NR Description: ZMM2 [Zea mays]
  misc_feature (1)..(100): Homolog of NCBI NO: 2130078 NR Description: MADS-box protein 3 - rice
  misc_feature (1)..(100): Homolog of NCBI NO: 34903684 NR Description: putative MADS-box protein [Oryza sativa (japonica
  misc_feature (1)..(100): Homolog of NCBI NO: 19698536 NR Description: AGAMOUS-like protein 1 HvAG1 [Hordeum vulgare
  misc_feature (1)..(100): Homolog of NCBI NO: 29372746 NR Description: putative MADS-domain transcription factor [Zea
  misc_feature (1)..(100): Homolog of NCBI NO: 7446524 NR Description: hypothetical protein - maize
  misc_feature (1)..(100): Homolog of NCBI NO: 18650789 NR Description: MADS-box transcription factor [Phalaenopsis
  misc_feature (1)..(97): Homolog of NCBI NO: 19698538 NR Description: AGAMOUS-like protein 2 HvAG2 [Hordeum vulgare
  misc_feature (1)..(91): Homolog of NCBI NO: 24636577 NR Description: MADS box transcription factor [Triticum aestivum]
  misc_feature (1)..(99): Homolog of NCBI NO: 3913007 NR Description: AGAMOUS protein (NAG1) >gi|7446523|pir||T03592
  misc_feature (1)..(100): Homolog of NCBI NO: 1006768 NR Description: ZMM2 [Zea mays]
  misc_feature (1)..(100): Homolog of NCBI NO: 2130078 NR Description: MADS-box protein 3 - rice
  misc_feature (1)..(100): Homolog of NCBI NO: 34903684 NR Description: putative MADS-box protein [Oryza sativa (japonica
  misc_feature (1)..(100): Homolog of NCBI NO: 19698536 NR Description: AGAMOUS-like protein 1 HvAG1 [Hordeum vulgare
  misc_feature (1)..(100): Homolog of NCBI NO: 29372746 NR Description: putative MADS-domain transcription factor [Zea
  misc_feature (1)..(100): Homolog of NCBI NO: 7446524 NR Description: hypothetical protein - maize
  misc_feature (1)..(100): Homolog of NCBI NO: 18650789 NR Description: MADS-box transcription factor [Phalaenopsis
  misc_feature (1)..(97): Homolog of NCBI NO: 19698538 NR Description: AGAMOUS-like protein 2 HvAG2 [Hordeum vulgare
  misc_feature (1)..(91): Homolog of NCBI NO: 24636577 NR Description: MADS box transcription factor [Triticum aestivum]
  misc_feature (1)..(99): Homolog of NCBI NO: 3913007 NR Description: AGAMOUS protein (NAG1) >gi|7446523|pir||T03592

SEQ ID NO: 13448 - DNA, 1273 bp, Zea mays subsp. mays
  misc_feature (1)..(1273): Ceres Seq. ID no. 12351874
  misc_feature: MA Experiment ID: 108535 Result: Down-regulated in Transcription
  misc_feature: MA Experiment 108535 PARAMETER Experiment Name: Zm_Meristem_P Parameter: Age (day) Value: 8
  misc_feature: MA Experiment 108535 PARAMETER Experiment Name: Zm_Meristem_P Parameter: Organism Value: Zea mays
  misc_feature: MA Experiment 108535 PARAMETER Experiment Name: Zm_Meristem_P Parameter: Plant Line Value: 35A19
  misc_feature: MA Experiment 108535 PARAMETER Experiment Name: Zm_Meristem_P Parameter: Tissue Value: Root Meristem vs. Above Root Meristem
  misc_feature: MA Experiment ID: 20000108 Result: Down-regulated in Transcription
  misc_feature: MA Experiment 20000108 PARAMETER Experiment Name: Zm_Root-Tips_P Parameter: Age (day) Value: 12
  misc_feature: MA Experiment 20000108 PARAMETER Experiment Name: Zm_Root-Tips_P Parameter: Organism Value: Zea mays
  misc_feature: MA Experiment 20000108 PARAMETER Experiment Name: Zm_Root-Tips_P Parameter: Tissue Value: Root tips vs. Root mid region    35
  misc_feature: MA Experiment 20000108 PARAMETER Experiment Name: Zm_Root-Tips_P Parameter: Tissue Value: Root tips vs. Root mid region   Sequence Listing-Misc Features (4)
  misc_feature: MA Experiment ID: 20000535 Result: Down-regulated in Transcription
  misc_feature: MA Experiment 20000535 PARAMETER Experiment Name: Zm_Hybrid_Seed_Dev_P Parameter: DAP Value: 30 vs. 12
  misc_feature: MA Experiment 20000535 PARAMETER Experiment Name: Zm_Hybrid_Seed_Dev_P Parameter: Organism Value: Zea mays
  misc_feature: MA Experiment 20000535 PARAMETER Experiment Name: Zm_Hybrid_Seed_Dev_P Parameter: Plant Line Value: 35A19
  misc_feature: MA Experiment 20000535 PARAMETER Experiment Name: Zm_Hybrid_Seed_Dev_P Parameter: Tissue Value: Embryo vs. Unfert Floret
atcgtccccgcctgcacctcgcgagcatccaaagctgtacttgcggcaagttctcgcaaaatcctactcccaccgccgactcgtacctccgctcccctcctccccaacccttccacgcttgcttctccgggagggaaggcacacgggaggtcgccccgccacccatcgcaaaagccacgcgccaccaaactcttttttccctcacccagtcgctttcgcgttcagcgcgagctgagccagccagtgggtcggtcgctggaggcggagccataaaggcgtcagcgacggcagcatgatgagcggcagatcgggcgggagggacgccgagggcgagtgggaggttcggcccggcgggatgctggtgcagcgcagggacggtgaggcggccggccccgtcatcaggatcagggtctcccacggcgccaacttccgcgaggtcgtcgtgccggcgcaggctaccttcggtgagttgaagaggatccttgttcagactactggcttggagcctgagaggcagaggctcttcttccgtgggaaggagaagagtgacagagagttcctgcacacggcaggtgttaaggatggagcaaagctgcttctgctcgagaagcctgcccctgccaacatagagcagaaggttgagcctgtgattatggatgaaagcatgatgaaggcatgtgcggctgttgctcgtgttagagttgaagttgataagctgtctgctaaggtgtgtgacttggagaagaatgtactaggagggagaaaggttgaggataaagaatttgttgtcttgacggagctgcttatgatgcagctgctgaaactcgatggcattgaagctgaaggagaagcaagggcacagaggaaggctgaggtgcgccgagttcagtcccttgtggagaccttggataagctgaaagcaagaaatgcaaaccccttcagcgatcataataaggctgtttcagtaacaacgcagtgggagacgtttgagaacggcatgggcagcttgagtgctccacctccccgtgtttcttcaacgcaagctaacactgactgggagcagttcgactaggctcagatgaagctgttgatgtatcatgaaatctgtgagatcggtatggacattcctttccgaggcagcgaggtgttgtgtatatgcaccacgtttgataacttttggcgtcccaagtgcctgtgattctgtgaatgttaccagatcgtgccactgccatactaccatgtgaattgcatcgctcattgagggtcatattcc

SEQ ID NO: 13449 - protein, 259 aa, Zea mays subsp. mays
  peptide (1)..(259): Ceres Seq. ID no. 12351875
  misc_feature (128)..(209): Pfam Name: BAG domain Pfam Description: BAG domain
  misc_feature (58)..(259): Homolog of NCBI NO: 34907972 NR Description: P0446G04.18 [Oryza sativa (japonica
  misc_feature (4)..(58): Homolog of NCBI NO: 34907972 NR Description: P0446G04.18 [Oryza sativa (japonica
  misc_feature (12)..(259): Homolog of NCBI NO: 15231035 NR Description: putative protein; protein id: At3g51780.1, by cDNA: 21630., supported by cDNA: gi_19699282 [Arabidopsis
  misc_feature (12)..(259): Homolog of NCBI NO: 19699283 NR Description: At3g51780/ORF3 [Arabidopsis thaliana]
  misc_feature (12)..(259): Homolog of NCBI NO: 21554254 NR Description: unknown [Arabidopsis thaliana]
  misc_feature (1)..(213): Homolog of NCBI NO: 25553557 NR Description: OSJNBa0038F22.4 [Oryza sativa (japonica
  misc_feature (1)..(213): Homolog of NCBI NO: 34898024 NR Description: ESTs AU082174(S13676),AU032395(R3986) correspond a region of the predicted gene.~Similar to Arabidopsis thaliana
  misc_feature (1)..(213): Homolog of NCBI NO: 15242267 NR Description: putative protein; protein id: At5g52060.1 thaliana] >gi|10177741|dbj|BAB11054.1| contains similarity to
  misc_feature (7)..(233): Homolog of NCBI NO: 21537107 NR Description: unknown [Arabidopsis thaliana]
  misc_feature (1)..(233): Homolog of NCBI NO: 6624711 NR Description: hypothetical protein [Oryza sativa (indica
MMSGRSGGRDAEGEWEVRPGGMLVQRRDGEAAGPVIRIRVSHGANFREVVVPAQATFGELKRILVQTTGLEPERQRLFFRGKEKSDREFLHTAGVKDGAKLLLLEKPAPANIEQKVEPVIMDESMMKACAAVARVRVEVDKLSAKVCDLEKNVLGGRKVEDKEFVVLTELLMMQLLKLDGIEAEGEARAQRKAEVRRVQSLVETLDKLKARNANPFSDHNKAVSVTTQWETFENGMGSLSAPPPRVSSTQANTDWEQFD

SEQ ID NO: 13450 - protein, 258 aa, Zea mays subsp. mays
  peptide (1)..(258): Ceres Seq. ID no. 12351876
  misc_feature (127)..(208): Pfam Name: BAG domain Pfam Description: BAG domain
  misc_feature (57)..(258): Homolog of NCBI NO: 34907972 NR Description: P0446G04.18 [Oryza sativa (japonica
  misc_feature (3)..(57): Homolog of NCBI NO: 34907972 NR Description: P0446G04.18 [Oryza sativa (japonica
  misc_feature (11)..(258): Homolog of NCBI NO: 15231035 NR Description: putative protein; protein id: At3g51780.1, by cDNA: 21630., supported by cDNA: gi_19699282 [Arabidopsis
  misc_feature (11)..(258): Homolog of NCBI NO: 19699283 NR Description: At3g51780/ORF3 [Arabidopsis thaliana]
  misc_feature (11)..(258): Homolog of NCBI NO: 21554254 NR Description: unknown [Arabidopsis thaliana]
  misc_feature (1)..(212): Homolog of NCBI NO: 25553557 NR Description: OSJNBa0038F22.4 [Oryza sativa (japonica
  misc_feature (1)..(212): Homolog of NCBI NO: 34898024 NR Description: ESTs AU082174(S13676),AU032395(R3986) correspond a region of the predicted gene.~Similar to Arabidopsis thaliana
  misc_feature (1)..(212): Homolog of NCBI NO: 15242267 NR Description: putative protein; protein id: At5g52060.1 thaliana] >gi|10177741|dbj|BAB11054.1| contains similarity to
  misc_feature (6)..(232): Homolog of NCBI NO: 21537107 NR Description: unknown [Arabidopsis thaliana]
  misc_feature (1)..(232): Homolog of NCBI NO: 6624711 NR Description: hypothetical protein [Oryza sativa (indica
MSGRSGGRDAEGEWEVRPGGMLVQRRDGEAAGPVIRIRVSHGANFREVVVPAQATFGELKRILVQTTGLEPERQRLFFRGKEKSDREFLHTAGVKDGAKLLLLEKPAPANIEQKVEPVIMDESMMKACAAVARVRVEVDKLSAKVCDLEKNVLGGRKVEDKEFVVLTELLMMQLLKLDGIEAEGEARAQRKAEVRRVQSLVETLDKLKARNANPFSDHNKAVSVTTQWETFENGMGSLSAPPPRVSSTQANTDWEQFD

SEQ ID NO: 13451 - protein, 238 aa, Zea mays subsp. mays
  peptide (1)..(238): Ceres Seq. ID no. 12351877
  misc_feature (107)..(188): Pfam Name: BAG domain Pfam Description: BAG domain
  misc_feature (37)..(238): Homolog of NCBI NO: 34907972 NR Description: P0446G04.18 [Oryza sativa (japonica
  misc_feature (1)..(37): Homolog of NCBI NO: 34907972 NR Description: P0446G04.18 [Oryza sativa (japonica
  misc_feature (1)..(238): Homolog of NCBI NO: 15231035 NR Description: putative protein; protein id: At3g51780.1, by cDNA: 21630., supported by cDNA: gi_19699282 [Arabidopsis
  misc_feature (1)..(238): Homolog of NCBI NO: 21554254 NR Description: unknown [Arabidopsis thaliana]
  misc_feature (1)..(238): Homolog of NCBI NO: 19699283 NR Description: At3g51780/ORF3 [Arabidopsis thaliana]
  misc_feature (1)..(192): Homolog of NCBI NO: 25553557 NR Description: OSJNBa0038F22.4 [Oryza sativa (japonica
  misc_feature (1)..(192): Homolog of NCBI NO: 34898024 NR Description: ESTs AU082174(S13676),AU032395(R3986) correspond a region of the predicted gene.~Similar to Arabidopsis thaliana
  misc_feature (1)..(192): Homolog of NCBI NO: 15242267 NR Description: putative protein; protein id: At5g52060.1 thaliana] >gi|10177741|dbj|BAB11054.1| contains similarity to
  misc_feature (1)..(212): Homolog of NCBI NO: 21537107 NR Description: unknown [Arabidopsis thaliana]
  misc_feature (1)..(212): Homolog of NCBI NO: 6624711 NR Description: hypothetical protein [Oryza sativa (indica
MLVQRRDGEAAGPVIRIRVSHGANFREVVVPAQATFGELKRILVQTTGLEPERQRLFFRGKEKSDREFLHTAGVKDGAKLLLLEKPAPANIEQKVEPVIMDESMMKACAAVARVRVEVDKLSAKVCDLEKNVLGGRKVEDKEFVVLTELLMMQLLKLDGIEAEGEARAQRKAEVRRVQSLVETLDKLKARNANPFSDHNKAVSVTTQWETFENGMGSLSAPPPRVSSTQANTDWEQFD

SEQ ID NO: 13452 - DNA, 1526 bp, Zea mays subsp. mays
  misc_feature (1)..(1526): Ceres Seq. ID no. 12411257
  misc_feature: MA Experiment ID: 108556 Result: Down-regulated in Transcription
  misc_feature: MA Experiment 108556 PARAMETER Experiment Name: Zm_Drought_P Parameter: Age (day) Value: 9
  misc_feature: MA Experiment 108556 PARAMETER Experiment Name: Zm_Drought_P Parameter: Organism Value: Zea mays
  misc_feature: MA Experiment 108556 PARAMETER Experiment Name: Zm_Drought_P Parameter: Plant Line Value: 35A19
  misc_feature: MA Experiment 108556 PARAMETER Experiment Name: Zm_Drought_P Parameter: Timepoint (hr) Value: 24
  misc_feature: MA Experiment 108556 PARAMETER Experiment Name: Zm_Drought_P Parameter: Tissue Value: Aerial
  misc_feature: MA Experiment 108556 PARAMETER Experiment Name: Zm_Drought_P Parameter: Treatment Value: Drought vs. No Drought
  misc_feature: MA Experiment ID: 108689 Result: Down-regulated in Transcription
  misc_feature: MA Experiment 108689 PARAMETER Experiment Name: Zm_Drought_Roots_P Parameter: Age (day) Value: 9
  misc_feature: MA Experiment 108689 PARAMETER Experiment Name: Zm_Drought_Roots_P Parameter: Organism Value: Zea mays
  misc_feature: MA Experiment 108689 PARAMETER Experiment Name: Zm_Drought_Roots_P Parameter: Plant Line Value: 35A19
  misc_feature: MA Experiment 108689 PARAMETER Experiment Name: Zm_Drought_Roots_P Parameter: Timepoint (hr) Value: 24
  misc_feature: MA Experiment 108689 PARAMETER Experiment Name: Zm_Drought_Roots_P Parameter: Tissue Value: Roots
  misc_feature: MA Experiment 108689 PARAMETER Experiment Name: Zm_Drought_Roots_P Parameter: Treatment Value: Drought vs. No Drought
  misc_feature: MA Experiment ID: 20000480 Result: Down-regulated in Transcription
  misc_feature: MA Experiment 20000480 PARAMETER Experiment Name: Zm_Drought_P Parameter: Age (day) Value: 11
  misc_feature: MA Experiment 20000480 PARAMETER Experiment Name: Zm_Drought_P Parameter: Organism Value: Zea mays
  misc_feature: MA Experiment 20000480 PARAMETER Experiment Name: Zm_Drought_P Parameter: Plant Line Value: 35A19
  misc_feature: MA Experiment 20000480 PARAMETER Experiment Name: Zm_Drought_P Parameter: Timepoint (hr) Value: 72
  misc_feature: MA Experiment 20000480 PARAMETER Experiment Name: Zm_Drought_P Parameter: Tissue Value: Aerial
  misc_feature: MA Experiment 20000480 PARAMETER Experiment Name: Zm_Drought_P Parameter: Treatment Value: Drought vs. No Drought
  misc_feature: MA Experiment ID: 20000535 Result: Down-regulated in Transcription
  misc_feature: MA Experiment 20000535 PARAMETER Experiment Name: Zm_Hybrid_Seed_Dev_P Parameter: DAP Value: 30 vs. 12
  misc_feature: MA Experiment 20000535 PARAMETER Experiment Name: Zm_Hybrid_Seed_Dev_P Parameter: Organism Value: Zea mays
  misc_feature: MA Experiment 20000535 PARAMETER Experiment Name: Zm_Hybrid_Seed_Dev_P Parameter: Plant Line Value: 35A19
  misc_feature: MA Experiment 20000535 PARAMETER Experiment Name: Zm_Hybrid_Seed_Dev_P Parameter: Tissue Value: Embryo vs. Unfert Floret
aagagaccagggctgaactgctgaagctgagataggattgagaatcgctgccagtggaaagcggcactagcagcagggcagaagcaagaaccagcaagaaaggggagagagaaagcggaaggactttttctcggattggatccttcgcttttgggggaaggagaaggcccctctctgtcctctctccatccttgcggagggcgctagcaggcagcagcggaaggaggaagagatgttcccgcctggcctgatccaccaccgccctgacgcccccgttcccggcgatggggcgacgcgctccggccccggcgggccgagccttgtactgacggcggaccccaagcccaggctgcggtggacggccgacctccacgagcgtttcgtcgacgccgtggcccagctcggcggacccgagaaagcaacaccaaaaactatcttaaggacaatgggcgtcaagggtcttactctttttcacttgaagagccatcttcagaaatacagattagggaaacaatctggtaaggagggatcagagcaatctaaagatgcatcctatcttctagatgctcaaagtggaatgagcgtgtcccctagagttcctgcccaggatatgaaagaaagccaagaagttaaagaagcactgagagcgcagatggaagtccaaagaagactgcatgaacaagtggaggtccaaaagcgcgtgcagatcagaatggaagcgtttcagaagtacatcgacagtatcctggagagcgcgtgcaagatggtcaccgaacagttcgcttcaagtggcttcagcatctctgaccctgatctcccggagatatcccctggaggggtggtcatgtgtggcggccccacggacacgttgagctcgtcggtgttcaaccagctttccgtcagctccatcggctcgcacagtccaggaggcaaaccttccccttccccatcaggcatggaatgtccgccgctgctcctccacaagtcgcatgagctcaagcggaggtcctcttgaactgacaaatcggcgaagcctgagggcgcggtgatggctgtctttgctagtgttgtcggatatggtggtactggtggtgacaagggaaattggtggtccagtcttgtggtagctgactttctccaggtagcaagatattgctgtgtttgtttgatcagtcaaagcatcaaacagacagacctacgttcatgtgaactgcctcatgcatgtgctagattgaaaaaaaaagttatcatattttgtcatgagattatgattctactagctagcatccttagcacacttgagatgttgttgactcgtgtcctagtgtcctctgtgttgatccatgtatgcacagcgattcatgttgggagttgggactgggacatgttaacaccagatgtttcaagcttcgtactttgcctcagttgtccatgcatgcagcaggcatcccagtacttcacctgctgttgaacttgaagactagtgtattcagcttatgaaagattcatgctgagtttgtaccccc

SEQ ID NO: 13453 - protein, 260 aa, Zea mays subsp. mays
  peptide (1)..(260): Ceres Seq. ID no. 12411258
  misc_feature (39)..(90): Pfam Name: Myb-like DNA-binding domain Pfam Description: Myb-like DNA-binding domain
  misc_feature (1)..(259): Homolog of NCBI NO: 29647444 NR Description: P0410E11.32 [Oryza sativa (japonica
  misc_feature (10)..(226): Homolog of NCBI NO: 18414049 NR Description: putative protein; protein id: At4g13640.1, by cDNA: 38327. [Arabidopsis thaliana]
  misc_feature (16)..(199): Homolog of NCBI NO: 18404044 NR Description: transfactor, putative; protein id: At3g24120.1, by cDNA: 6626., supported by cDNA: gi_15215653, supported by gi_20334891 [Arabidopsis thaliana] >gi|15215654|gb|AAK91372.1|
  misc_feature (16)..(199): Homolog of NCBI NO: 11994231 NR Description: contains similarity to transfactor~gene_id:MUJ8.2
  misc_feature (26)..(186): Homolog of NCBI NO: 25406584 NR Description: hypothetical protein T8K14.15 [imported] - thaliana >gi|4835766|gb|AAD30233.1|AC007202_15 Contains
  misc_feature (30)..(226): Homolog of NCBI NO: 7485694 NR Description: hypothetical protein F18A5.30 - Arabidopsis >gi|4455293|emb|CAB36828.1| putative protein [Arabidopsis >gi|7268068|emb|CAB78406.1| putative protein [Arabidopsis
  misc_feature (26)..(186): Homolog of NCBI NO: 30699418 NR Description: transfactor -related [Arabidopsis thaliana]
  misc_feature (30)..(185): Homolog of NCBI NO: 32470629 NR Description: putative phosphate starvation response regulator
  misc_feature (30)..(177): Homolog of NCBI NO: 11994415 NR Description: contains similarity to
  misc_feature (23)..(198): Homolog of NCBI NO: 6223653 NR Description: transfactor-like [Arabidopsis thaliana]
MFPPGLIHHRPDAPVPGDGATRSGPGGPSLVLTADPKPRLRWTADLHERFVDAVAQLGGPEKATPKTILRTMGVKGLTLFHLKSHLQKYRLGKQSGKEGSEQSKDASYLLDAQSGMSVSPRVPAQDMKESQEVKEALRAQMEVQRRLHEQVEVQKRVQIRMEAFQKYIDSILESACKMVTEQFASSGFSISDPDLPEISPGGVVMCGGPTDTLSSSVFNQLSVSSIGSHSPGGKPSPSPSGMECPPLLLHKSHELKRRSS

SEQ ID NO: 13454 - protein, 189 aa, Zea mays subsp. mays
  peptide (1)..(189): Ceres Seq. ID no. 12411259
  misc_feature (1)..(188): Homolog of NCBI NO: 29647444 NR Description: P0410E11.32 [Oryza sativa (japonica
  misc_feature (1)..(155): Homolog of NCBI NO: 18414049 NR Description: putative protein; protein id: At4g13640.1, by cDNA: 38327. [Arabidopsis thaliana]
  misc_feature (1)..(128): Homolog of NCBI NO: 18404044 NR Description: transfactor, putative; protein id: At3g24120.1, by cDNA: 6626., supported by cDNA: gi_15215653, supported by gi_20334891 [Arabidopsis thaliana] >gi|15215654|gb|AAK91372.1|
  misc_feature (1)..(128): Homolog of NCBI NO: 11994231 NR Description: contains similarity to transfactor~gene_id:MUJ8.2
  misc_feature (1)..(115): Homolog of NCBI NO: 25406584 NR Description: hypothetical protein T8K14.15 [imported] - thaliana >gi|4835766|gb|AAD30233.1|AC007202_15 Contains
  misc_feature (1)..(155): Homolog of NCBI NO: 7485694 NR Description: hypothetical protein F18A5.30 - Arabidopsis >gi|4455293|emb|CAB36828.1| putative protein [Arabidopsis >gi|7268068|emb|CAB78406.1| putative protein [Arabidopsis
  misc_feature (1)..(115): Homolog of NCBI NO: 30699418 NR Description: transfactor -related [Arabidopsis thaliana]
  misc_feature (1)..(114): Homolog of NCBI NO: 32470629 NR Description: putative phosphate starvation response regulator
  misc_feature (1)..(106): Homolog of NCBI NO: 11994415 NR Description: contains similarity to
  misc_feature (1)..(127): Homolog of NCBI NO: 6223653 NR Description: transfactor-like [Arabidopsis thaliana]
MGVKGLTLFHLKSHLQKYRLGKQSGKEGSEQSKDASYLLDAQSGMSVSPRVPAQDMKESQEVKEALRAQMEVQRRLHEQVEVQKRVQIRMEAFQKYIDSILESACKMVTEQFASSGFSISDPDLPEISPGGVVMCGGPTDTLSSSVFNQLSVSSIGSHSPGGKPSPSPSGMECPPLLLHKSHELKRRSS

SEQ ID NO: 13455 - protein, 145 aa, Zea mays subsp. mays
  peptide (1)..(145): Ceres Seq. ID no. 12411260
  misc_feature (1)..(144): Homolog of NCBI NO: 29647444 NR Description: P0410E11.32 [Oryza sativa (japonica
  misc_feature (1)..(111): Homolog of NCBI NO: 18414049 NR Description: putative protein; protein id: At4g13640.1, by cDNA: 38327. [Arabidopsis thaliana]
  misc_feature (1)..(84): Homolog of NCBI NO: 18404044 NR Description: transfactor, putative; protein id: At3g24120.1, by cDNA: 6626., supported by cDNA: gi_15215653, supported by gi_20334891 [Arabidopsis thaliana] >gi|15215654|gb|AAK91372.1|
  misc_feature (1)..(84): Homolog of NCBI NO: 11994231 NR Description: contains similarity to transfactor~gene_id:MUJ8.2
  misc_feature (1)..(71): Homolog of NCBI NO: 25406584 NR Description: hypothetical protein T8K14.15 [imported] - thaliana >gi|4835766|gb|AAD30233.1|AC007202_15 Contains
  misc_feature (1)..(111): Homolog of NCBI NO: 7485694 NR Description: hypothetical protein F18A5.30 - Arabidopsis >gi|4455293|emb|CAB36828.1| putative protein [Arabidopsis >gi|7268068|emb|CAB78406.1| putative protein [Arabidopsis
  misc_feature (1)..(71): Homolog of NCBI NO: 30699418 NR Description: transfactor -related [Arabidopsis thaliana]
  misc_feature (1)..(70): Homolog of NCBI NO: 32470629 NR Description: putative phosphate starvation response regulator
  misc_feature (1)..(62): Homolog of NCBI NO: 11994415 NR Description: contains similarity to
  misc_feature (1)..(83): Homolog of NCBI NO: 6223653 NR Description: transfactor-like [Arabidopsis thaliana]
MSVSPRVPAQDMKESQEVKEALRAQMEVQRRLHEQVEVQKRVQIRMEAFQKYIDSILESACKMVTEQFASSGFSISDPDLPEISPGGVVMCGGPTDTLSSSVFNQLSVSSIGSHSPGGKPSPSPSGMECPPLLLHKSHELKRRSS

SEQ ID NO: 13456 - DNA, 1328 bp, Zea mays subsp. mays
  misc_feature (1)..(1328): Ceres Seq. ID no. 12341356
  misc_feature: MA Experiment ID: 108534 Result: Down-regulated in Transcription
  misc_feature: MA Experiment 108534 PARAMETER Experiment Name: Zm_4deg_Cold_P Parameter: Age (hr) Value: 8
  misc_feature: MA Experiment 108534 PARAMETER Experiment Name: Zm_4deg_Cold_P Parameter: Organism Value: Zea mays
  misc_feature: MA Experiment 108534 PARAMETER Experiment Name: Zm_4deg_Cold_P Parameter: Plant Line Value: 35A19
  misc_feature: MA Experiment 108534 PARAMETER Experiment Name: Zm_4deg_Cold_P Parameter: Temperature (deg C) Value: 4 vs. 22
  misc_feature: MA Experiment 108534 PARAMETER Experiment Name: Zm_4deg_Cold_P Parameter: Timepoint (hr) Value: 6
  misc_feature: MA Experiment 108534 PARAMETER Experiment Name: Zm_4deg_Cold_P Parameter: Tissue Value: Aerial
accggatgacccagcgtgcctcgtgcgcgcctcccttgtctgcaaggcttggcggaagctcctctctagccgcatcttcctccgccgctaccgcagattccacggcgcgccgcccctgcttggcttcctctacaacatctacgacgaacgcccctgtgctcgattcgtcgtcgccgccgacgccgccaccacattccccttctctgcaccggcgttcgaccaattcgatttgtggttcattgagtgccgccacgggcgcgcgctgctacaaactttcgagcggcatgcgcccgcgcgcctcgtcgtctgggacctcatcacgggcgaccagcagcacataccaattcccgtgcccgggtacccttacttctgccgcaccgcagctgttctctgcgccgcggatggctgcgaccatcttgactgccacgggggccgatacctcgtcgtcgtcataggcgcctacgaagaagatactctcaggtgggcgagcgtttactcatcagagactggcgtatgggctacgtcatcctccattcaaattgatgcctacgtcgagcaaaggcccagcctccttgccggtgacgcgctctactttagcgcacaggaaggcaaaatgattgtcaaatacgacctcaatggacagagcctacatgtgatcaatgcgccggatatgtttgagccaacagagggcattgctgtgaccgtggaggacggtggtttgggactcgccggagtgaaggatggcaacctccacctttggtcatggcaggttggtcctggcggcattgcggaatgggtgcaaggcagaatcgtaaagttgaggacgctcttccctattcttaaaccgctggactcacttgatgtgattggcttccaagagggcacagataccattttcattagcatagatatggaggtcttcgcagtcatgctcagatcggagcaggtgaagaaggtaggcaagacgggctccaaatatgccatggcaccctatgtgagcttctacactccagatcttgcgaagggcagattgctatcaccatgaagatgcagtgatccatccattaacatggccgtggcactattgacttcttaaggagatgatgagttaaagtgtttttccagtttggacggttatggaaaaaaagcaagttaccatgttcattcagaaaagtttagtttcttacctgtgcagtttaagtaaggaactgtaagaacaggatatcatcgtcaaaatggctagtctattagttaggctgttcaagagattggttggttttattgtggccttttcgctattgttattttataagggatgccctgtgtcc

SEQ ID NO: 13457 - protein, 347 aa, Zea mays subsp. mays
  peptide (1)..(347): Ceres Seq. ID no. 12341357
  misc_feature (1)..(347): Homolog of NCBI NO: 34915420 NR Description: contains EST C98814(E3124)~similar to Oryza sativa
  misc_feature (1)..(347): Homolog of NCBI NO: 33146558 NR Description: unknown protein [Oryza sativa (japonica
  misc_feature (1)..(336): Homolog of NCBI NO: 34915424 NR Description: hypothetical protein~similar to Oryza sativa
  misc_feature (1)..(243): Homolog of NCBI NO: 34915428 NR Description: hypothetical protein~similar to Oryza sativa
  misc_feature (288)..(347): Homolog of NCBI NO: 34915428 NR Description: hypothetical protein~similar to Oryza sativa
  misc_feature (1)..(346): Homolog of NCBI NO: 34394503 NR Description: unknown protein [Oryza sativa (japonica
  misc_feature (1)..(337): Homolog of NCBI NO: 34914028 NR Description: OJ1014_G12.29 [Oryza sativa (japonica
  misc_feature (1)..(337): Homolog of NCBI NO: 34394504 NR Description: unknown protein [Oryza sativa (japonica
  misc_feature (127)..(344): Homolog of NCBI NO: 34394502 NR Description: hypothetical protein [Oryza sativa (japonica
  misc_feature (2)..(91): Homolog of NCBI NO: 34394502 NR Description: hypothetical protein [Oryza sativa (japonica
PDDPACLVRASLVCKAWRKLLSSRIFLRRYRRFHGAPPLLGFLYNIYDERPCARFVVAADAATTFPFSAPAFDQFDLWFIECRHGRALLQTFERHAPARLVVWDLITGDQQHIPIPVPGYPYFCRTAAVLCAADGCDHLDCHGGRYLVVVIGAYEEDTLRWASVYSSETGVWATSSSIQIDAYVEQRPSLLAGDALYFSAQEGKMIVKYDLNGQSLHVINAPDMFEPTEGIAVTVEDGGLGLAGVKDGNLHLWSWQVGPGGIAEWVQGRIVKLRTLFPILKPLDSLDVIGFQEGTDTIFISIDMEVFAVMLRSEQVKKVGKTGSKYAMAPYVSFYTPDLAKGRLLSP

SEQ ID NO: 13458 - DNA, 1535 bp, Zea mays subsp. mays
  misc_feature (1)..(1535): Ceres Seq. ID no. 12351554
  misc_feature: MA Experiment ID: 108504 Result: Down-regulated in Transcription
  misc_feature: MA Experiment 108504 PARAMETER Experiment Name: Zm_Drought_P Parameter: Age (day) Value: 8
  misc_feature: MA Experiment 108504 PARAMETER Experiment Name: Zm_Drought_P Parameter: Organism Value: Zea mays
  misc_feature: MA Experiment 108504 PARAMETER Experiment Name: Zm_Drought_P Parameter: Plant Line Value: 35A19
  misc_feature: MA Experiment 108504 PARAMETER Experiment Name: Zm_Drought_P Parameter: Timepoint (hr) Value: 12
  misc_feature: MA Experiment 108504 PARAMETER Experiment Name: Zm_Drought_P Parameter: Tissue Value: Aerial
  misc_feature: MA Experiment 108504 PARAMETER Experiment Name: Zm_Drought_P Parameter: Treatment Value: Drought vs. No Drought
  misc_feature: MA Experiment ID: 108522 Result: Up-regulated in Transcription
  misc_feature: MA Experiment 108522 PARAMETER Experiment Name: Zm_42deg_Heat_P Parameter: Age (day) Value: 8
  misc_feature: MA Experiment 108522 PARAMETER Experiment Name: Zm_42deg_Heat_P Parameter: Organism Value: Zea mays
  misc_feature: MA Experiment 108522 PARAMETER Experiment Name: Zm_42deg_Heat_P Parameter: Plant Line Value: 35A19
  misc_feature: MA Experiment 108522 PARAMETER Experiment Name: Zm_42deg_Heat_P Parameter: Temperature (deg C) Value: 42 vs. 22
  misc_feature: MA Experiment 108522 PARAMETER Experiment Name: Zm_42deg_Heat_P Parameter: Timepoint (hr) Value: 1
  misc_feature: MA Experiment 108522 PARAMETER Experiment Name: Zm_42deg_Heat_P Parameter: Tissue Value: Aerial
  misc_feature: MA Experiment ID: 108527 Result: Down-regulated in Transcription
  misc_feature: MA Experiment 108527 PARAMETER Experiment Name: Zm_5mM_NO_P Parameter: Age (day) Value: 8
  misc_feature: MA Experiment 108527 PARAMETER Experiment Name: Zm_5mM_NO_P Parameter: Organism Value: Zea mays
  misc_feature: MA Experiment 108527 PARAMETER Experiment Name: Zm_5mM_NO_P Parameter: Plant Line Value: 35A19
  misc_feature: MA Experiment 108527 PARAMETER Experiment Name: Zm_5mM_NO_P Parameter: Timepoint (hr) Value: 6
  misc_feature: MA Experiment 108527 PARAMETER Experiment Name: Zm_5mM_NO_P Parameter: Tissue Value: Aerial
  misc_feature: MA Experiment 108527 PARAMETER Experiment Name: Zm_5mM_NO_P Parameter: Treatment Value: 5mM NO vs. No Treatment
  misc_feature: MA Experiment ID: 108530 Result: Down-regulated in Transcription
  misc_feature: MA Experiment 108530 PARAMETER Experiment Name: Zm_Imbibed_Seeds_P Parameter: Age (day) Value: 6 vs. 2
  misc_feature: MA Experiment 108530 PARAMETER Experiment Name: Zm_Imbibed_Seeds_P Parameter: Organism Value: Zea mays
  misc_feature: MA Experiment 108530 PARAMETER Experiment Name: Zm_Imbibed_Seeds_P Parameter: Plant Line Value: 35A19
  misc_feature: MA Experiment 108530 PARAMETER Experiment Name: Zm_Imbibed_Seeds_P Parameter: Tissue Value: Aerial vs. Embryo
  misc_feature: MA Experiment ID: 108535 Result: Up-regulated in Transcription
  misc_feature: MA Experiment 108535 PARAMETER Experiment Name: Zm_Meristem_P Parameter: Age (day) Value: 8
  misc_feature: MA Experiment 108535 PARAMETER Experiment Name: Zm_Meristem_P Parameter: Organism Value: Zea mays
  misc_feature: MA Experiment 108535 PARAMETER Experiment Name: Zm_Meristem_P Parameter: Plant Line Value: 35A19
  misc_feature: MA Experiment 108535 PARAMETER Experiment Name: Zm_Meristem_P Parameter: Tissue Value: Root Meristem vs. Above Root Meristem
  misc_feature: MA Experiment ID: 108542 Result: Down-regulated in Transcription
  misc_feature: MA Experiment 108542 PARAMETER Experiment Name: Zm_150mM_NaCl_P Parameter: Age (day) Value: 8
  misc_feature: MA Experiment 108542 PARAMETER Experiment Name: Zm_150mM_NaCl_P Parameter: Organism Value: Zea mays
  misc_feature: MA Experiment 108542 PARAMETER Experiment Name: Zm_150mM_NaCl_P Parameter: Plant Line Value: 35A19
  misc_feature: MA Experiment 108542 PARAMETER Experiment Name: Zm_150mM_NaCl_P Parameter: Timepoint (hr) Value: 6
  misc_feature: MA Experiment 108542 PARAMETER Experiment Name: Zm_150mM_NaCl_P Parameter: Tissue Value: Aerial
  misc_feature: MA Experiment 108542 PARAMETER Experiment Name: Zm_150mM_NaCl_P Parameter: Treatment Value: 150mM NaCl vs. No Treatment
  misc_feature: MA Experiment ID: 108544 Result: Down-regulated in Transcription
  misc_feature: MA Experiment ID: 108556 Result: Down-regulated in Transcription
  misc_feature: MA Experiment 108556 PARAMETER Experiment Name: Zm_Drought_P Parameter: Age (day) Value: 9
  misc_feature: MA Experiment 108556 PARAMETER Experiment Name: Zm_Drought_P Parameter: Organism Value: Zea mays
  misc_feature: MA Experiment 108556 PARAMETER Experiment Name: Zm_Drought_P Parameter: Plant Line Value: 35A19
  misc_feature: MA Experiment 108556 PARAMETER Experiment Name: Zm_Drought_P Parameter: Timepoint (hr) Value: 24
  misc_feature: MA Experiment 108556 PARAMETER Experiment Name: Zm_Drought_P Parameter: Tissue Value: Aerial
  misc_feature: MA Experiment 108556 PARAMETER Experiment Name: Zm_Drought_P Parameter: Treatment Value: Drought vs. No Drought
  misc_feature: MA Experiment ID: 108689 Result: Down-regulated in Transcription
  misc_feature: MA Experiment 108689 PARAMETER Experiment Name: Zm_Drought_Roots_P Parameter: Age (day) Value: 9
  misc_feature: MA Experiment 108689 PARAMETER Experiment Name: Zm_Drought_Roots_P Parameter: Organism Value: Zea mays
  misc_feature: MA Experiment 108689 PARAMETER Experiment Name: Zm_Drought_Roots_P Parameter: Plant Line Value: 35A19
  misc_feature: MA Experiment 108689 PARAMETER Experiment Name: Zm_Drought_Roots_P Parameter: Timepoint (hr) Value: 24
  misc_feature: MA Experiment 108689 PARAMETER Experiment Name: Zm_Drought_Roots_P Parameter: Tissue Value: Roots
  misc_feature: MA Experiment 108689 PARAMETER Experiment Name: Zm_Drought_Roots_P Parameter: Treatment Value: Drought vs. No Drought
  misc_feature: MA Experiment ID: 20000479 Result: Down-regulated in Transcription
  misc_feature: MA Experiment 20000479 PARAMETER Experiment Name: Zm_Drought_P Parameter: Age (day) Value: 10
  misc_feature: MA Experiment 20000479 PARAMETER Experiment Name: Zm_Drought_P Parameter: Organism Value: Zea mays
  misc_feature: MA Experiment 20000479 PARAMETER Experiment Name: Zm_Drought_P Parameter: Plant Line Value: 35A19
  misc_feature: MA Experiment 20000479 PARAMETER Experiment Name: Zm_Drought_P Parameter: Timepoint (hr) Value: 48
  misc_feature: MA Experiment 20000479 PARAMETER Experiment Name: Zm_Drought_P Parameter: Tissue Value: Aerial
  misc_feature: MA Experiment 20000479 PARAMETER Experiment Name: Zm_Drought_P Parameter: Treatment Value: Drought vs. No Drought
  misc_feature: MA Experiment ID: 20000480 Result: Down-regulated in Transcription
  misc_feature: MA Experiment 20000480 PARAMETER Experiment Name: Zm_Drought_P Parameter: Age (day) Value: 11
  misc_feature: MA Experiment 20000480 PARAMETER Experiment Name: Zm_Drought_P Parameter: Organism Value: Zea mays
  misc_feature: MA Experiment 20000480 PARAMETER Experiment Name: Zm_Drought_P Parameter: Plant Line Value: 35A19
  misc_feature: MA Experiment 20000480 PARAMETER Experiment Name: Zm_Drought_P Parameter: Timepoint (hr) Value: 72
  misc_feature: MA Experiment 20000480 PARAMETER Experiment Name: Zm_Drought_P Parameter: Tissue Value: Aerial
  misc_feature: MA Experiment 20000480 PARAMETER Experiment Name: Zm_Drought_P Parameter: Treatment Value: Drought vs. No Drought
  misc_feature: MA Experiment ID: 20000626 Result: Down-regulated in Transcription
  misc_feature: MA Experiment 20000626 PARAMETER Experiment Name: Zm_Herbicide-Treatments_P Parameter: Timepoint (hr) Value: 12
  misc_feature: MA Experiment 20000626 PARAMETER Experiment Name: Zm_Herbicide-Treatments_P Parameter: Tissue Value: Aerial
  misc_feature: MA Experiment 20000626 PARAMETER Experiment Name: Zm_Herbicide-Treatments_P Parameter: Treatment Value: Roundup vs. No Treatment
  misc_feature: MA Experiment ID: 20000632 Result: Down-regulated in Transcription
  misc_feature: MA Experiment 20000632 PARAMETER Experiment Name: Zm_Herbicide-Treatments_P Parameter: Timepoint (hr) Value: 4
  misc_feature: MA Experiment 20000632 PARAMETER Experiment Name: Zm_Herbicide-Treatments_P Parameter: Tissue Value: Aerial
  misc_feature: MA Experiment 20000632 PARAMETER Experiment Name: Zm_Herbicide-Treatments_P Parameter: Treatment Value: Glean vs. No Treatment
gatagaacacgacctggggggttcagatcggatcggaagcttccataagtttccatcgggcttcgccggtatggcgatccgcaaggggtcttcgtacgccgtcgcggcacttctcgcgctcgcctctgtcgccgccgttgcaggggaggtcttcttccaggagaagttcgaagatggctgggaaagtcggtgggtcaagtccgagtggaagaaggatgagaacatggctggtgaatggaaccacacctcgggaaaatggaatggagatgccgaggacaaaggtattcaaacctccgaggattacaggttctatgccatttcagccgaataccctgagttcagcaacaaggataagaccctggtgctgcagttctctgtgaagcacgagcagaagcttgactgcggtggtggctacgtcaagttgctgggtggtggtgatgtagaccagaagaaatttggtggagacacatcttacagcattatgtttggaccagatatctgtgggtacagcaccaagaaggttcacactatcctgaccaaggatggcaagaaccacttgatcaagaaggatgtgccttgtgagactgatcagttgactcatgtttacactttgatcatccgtcctgatgcaacatacagcattctcattgataatgaagataagcaaactggcagcatctacgagcactgggatattcttccccctaagaaaatcaaggacccagaggctaagaagcctgaggactgggatgacaaggagtacattcctgaccctgaggacaagaagccagagggctatgatgatattcccaaggaaattcctgaccctgatgctaagaagcctgaggactgggacgatgaggaagatggtgaatggactgcccctaccattcccaacccagaatacaagggaccatggaaacaaaagaaaatcaagaacccgaactaccagggtaaatggaaggcacctatgattgacaacccagattttaaggatgatccatacatttacgccttcgacagcttgaagtacattggcattgagctgtggcaggttaaaatcgggcactctgtttgacaacatcatcatcactgatgaccctgccttggccaagacttttgcagaggagacctggggcaagcacaaggaggcagaaaaggctgcttttgatgaggccgagaaaaaaaaggaagaagaggatgccgccaagggtggggatgatgaggatgatgacctagaggatgaggaagacgatgagaaggcagacgaggacaaggccgactctgatgccgaggatggcaaggattctgatgatgagaagcacgacgagctctagatggcgaggatgatgttgcggccgctggcctagatttatcagctctgccactatgaagttctttttttttcccgtgaccaccaagaatgtagaacactgctaataagcagatggacagtttgggtcgccgtagcgctttgtagtcatttttcccattaaagccgataacactgaacaaggaggaaggatcttttgccc

SEQ ID NO: 13459 - protein, 358 aa, Zea mays subsp. mays
  peptide (1)..(358): Ceres Seq. ID no. 12351555
  misc_feature (50)..(355): Pfam Name: Calreticulin family Pfam Description: Calreticulin family
  misc_feature (36)..(355): Homolog of NCBI NO: 7441498 NR Description: calreticulin - barley (fragment)
  misc_feature (33)..(355): Homolog of NCBI NO: 7441499 NR Description: calreticulin - barley (fragment)
  misc_feature (24)..(355): Homolog of NCBI NO: 11131838 NR Description: Calreticulin precursor
  misc_feature (24)..(358): Homolog of NCBI NO: 2119370 NR Description: calreticulin precursor - maize
  misc_feature (24)..(355): Homolog of NCBI NO: 11131745 NR Description: Calreticulin precursor >gi|7441496|pir||T10172
  misc_feature (28)..(355): Homolog of NCBI NO: 11131631 NR Description: Calreticulin precursor >gi|7441494|pir||T14554
  misc_feature (24)..(355): Homolog of NCBI NO: 11131769 NR Description: Calreticulin precursor >gi|7441495|pir||T16968
  misc_feature (38)..(355): Homolog of NCBI NO: 11131949 NR Description: Calreticulin precursor >gi|4335864|gb|AAD17490.1|
  misc_feature (24)..(358): Homolog of NCBI NO: 11131840 NR Description: Calreticulin precursor
  misc_feature (24)..(355): Homolog of NCBI NO: 11131904 NR Description: Calreticulin precursor
IEHDLGGSDRIGSFHKFPSGFAGMAIRKGSSYAVAALLALASVAAVAGEVFFQEKFEDGWESRWVKSEWKKDENMAGEWNHTSGKWNGDAEDKGIQTSEDYRFYAISAEYPEFSNKDKTLVLQFSVKHEQKLDCGGGYVKLLGGGDVDQKKFGGDTSYSIMFGPDICGYSTKKVHTILTKDGKNHLIKKDVPCETDQLTHVYTLIIRPDATYSILIDNEDKQTGSIYEHWDILPPKKIKDPEAKKPEDWDDKEYIPDPEDKKPEGYDDIPKEIPDPDAKKPEDWDDEEDGEWTAPTIPNPEYKGPWKQKKIKNPNYQGKWKAPMIDNPDFKDDPYIYAFDSLKYIGIELWQVKIGHSV

SEQ ID NO: 13460 - protein, 335 aa, Zea mays subsp. mays
  peptide (1)..(335): Ceres Seq. ID no. 12351556
  misc_feature (27)..(332): Pfam Name: Calreticulin family Pfam Description: Calreticulin family
  misc_feature (13)..(332): Homolog of NCBI NO: 7441498 NR Description: calreticulin - barley (fragment)
  misc_feature (10)..(332): Homolog of NCBI NO: 7441499 NR Description: calreticulin - barley (fragment)
  misc_feature (1)..(332): Homolog of NCBI NO: 11131838 NR Description: Calreticulin precursor
  misc_feature (1)..(335): Homolog of NCBI NO: 2119370 NR Description: calreticulin precursor - maize
  misc_feature (1)..(332): Homolog of NCBI NO: 11131745 NR Description: Calreticulin precursor >gi|7441496|pir||T10172
  misc_feature (5)..(332): Homolog of NCBI NO: 11131631 NR Description: Calreticulin precursor >gi|7441494|pir||T14554
  misc_feature (1)..(332): Homolog of NCBI NO: 11131769 NR Description: Calreticulin precursor >gi|7441495|pir||T16968
  misc_feature (15)..(332): Homolog of NCBI NO: 11131949 NR Description: Calreticulin precursor >gi|4335864|gb|AAD17490.1|
  misc_feature (1)..(335): Homolog of NCBI NO: 11131840 NR Description: Calreticulin precursor
  misc_feature (1)..(332): Homolog of NCBI NO: 11131904 NR Description: Calreticulin precursor
MAIRKGSSYAVAALLALASVAAVAGEVFFQEKFEDGWESRWVKSEWKKDENMAGEWNHTSGKWNGDAEDKGIQTSEDYRFYAISAEYPEFSNKDKTLVLQFSVKHEQKLDCGGGYVKLLGGGDVDQKKFGGDTSYSIMFGPDICGYSTKKVHTILTKDGKNHLIKKDVPCETDQLTHVYTLIIRPDATYSILIDNEDKQTGSIYEHWDILPPKKIKDPEAKKPEDWDDKEYIPDPEDKKPEGYDDIPKEIPDPDAKKPEDWDDEEDGEWTAPTIPNPEYKGPWKQKKIKNPNYQGKWKAPMIDNPDFKDDPYIYAFDSLKYIGIELWQVKIGHSV

SEQ ID NO: 13461 - protein, 284 aa, Zea mays subsp. mays
  peptide (1)..(284): Ceres Seq. ID no. 12351557
  misc_feature (1)..(281): Pfam Name: Calreticulin family Pfam Description: Calreticulin family
  misc_feature (1)..(281): Homolog of NCBI NO: 7441498 NR Description: calreticulin - barley (fragment)
  misc_feature (1)..(281): Homolog of NCBI NO: 7441499 NR Description: calreticulin - barley (fragment)
  misc_feature (1)..(281): Homolog of NCBI NO: 11131838 NR Description: Calreticulin precursor
  misc_feature (1)..(284): Homolog of NCBI NO: 2119370 NR Description: calreticulin precursor - maize
  misc_feature (1)..(281): Homolog of NCBI NO: 11131745 NR Description: Calreticulin precursor >gi|7441496|pir||T10172
  misc_feature (1)..(281): Homolog of NCBI NO: 11131631 NR Description: Calreticulin precursor >gi|7441494|pir||T14554
  misc_feature (1)..(281): Homolog of NCBI NO: 11131769 NR Description: Calreticulin precursor >gi|7441495|pir||T16968
  misc_feature (1)..(281): Homolog of NCBI NO: 11131949 NR Description: Calreticulin precursor >gi|4335864|gb|AAD17490.1|
  misc_feature (1)..(284): Homolog of NCBI NO: 11131840 NR Description: Calreticulin precursor
  misc_feature (1)..(281): Homolog of NCBI NO: 11131904 NR Description: Calreticulin precursor
MAGEWNHTSGKWNGDAEDKGIQTSEDYRFYAISAEYPEFSNKDKTLVLQFSVKHEQKLDCGGGYVKLLGGGDVDQKKFGGDTSYSIMFGPDICGYSTKKVHTILTKDGKNHLIKKDVPCETDQLTHVYTLIIRPDATYSILIDNEDKQTGSIYEHWDILPPKKIKDPEAKKPEDWDDKEYIPDPEDKKPEGYDDIPKEIPDPDAKKPEDWDDEEDGEWTAPTIPNPEYKGPWKQKKIKNPNYQGKWKAPMIDNPDFKDDPYIYAFDSLKYIGIELWQVKIGHSV

SEQ ID NO: 13462 - DNA, 1399 bp, Zea mays subsp. mays
  misc_feature (1)..(1399): Ceres Seq. ID no. 12373457
  misc_feature: MA Experiment ID: 108528 Result: Up-regulated in Transcription
  misc_feature: MA Experiment 108528 PARAMETER Experiment Name: Zm_Imbibed_Seeds_P Parameter: Age (day) Value: 5 vs. 2
  misc_feature: MA Experiment 108528 PARAMETER Experiment Name: Zm_Imbibed_Seeds_P Parameter: Organism Value: Zea mays
  misc_feature: MA Experiment 108528 PARAMETER Experiment Name: Zm_Imbibed_Seeds_P Parameter: Plant Line Value: 35A19
  misc_feature: MA Experiment 108528 PARAMETER Experiment Name: Zm_Imbibed_Seeds_P Parameter: Tissue Value: Aerial vs. Embryo
  misc_feature: MA Experiment ID: 108545 Result: Up-regulated in Transcription
  misc_feature: MA Experiment 108545 PARAMETER Experiment Name: Zm_Imbibed_Seeds_P Parameter: Age (day) Value: 3 vs. 2
  misc_feature: MA Experiment 108545 PARAMETER Experiment Name: Zm_Imbibed_Seeds_P Parameter: Organism Value: Zea mays
  misc_feature: MA Experiment 108545 PARAMETER Experiment Name: Zm_Imbibed_Seeds_P Parameter: Plant Line Value: 35A19
  misc_feature: MA Experiment 108545 PARAMETER Experiment Name: Zm_Imbibed_Seeds_P Parameter: Tissue Value: Aerial vs. Embryo
  misc_feature: MA Experiment ID: 108547 Result: Up-regulated in Transcription
  misc_feature: MA Experiment 108547 PARAMETER Experiment Name: Zm_Imbibed_Seeds_P Parameter: Age (day) Value: 4 vs. 2
  misc_feature: MA Experiment 108547 PARAMETER Experiment Name: Zm_Imbibed_Seeds_P Parameter: Organism Value: Zea mays
  misc_feature: MA Experiment 108547 PARAMETER Experiment Name: Zm_Imbibed_Seeds_P Parameter: Plant Line Value: 35A19
  misc_feature: MA Experiment 108547 PARAMETER Experiment Name: Zm_Imbibed_Seeds_P Parameter: Tissue Value: Aerial vs. Embryo
  misc_feature: MA Experiment ID: 108556 Result: Down-regulated in Transcription
  misc_feature: MA Experiment 108556 PARAMETER Experiment Name: Zm_Drought_P Parameter: Age (day) Value: 9
  misc_feature: MA Experiment 108556 PARAMETER Experiment Name: Zm_Drought_P Parameter: Organism Value: Zea mays
  misc_feature: MA Experiment 108556 PARAMETER Experiment Name: Zm_Drought_P Parameter: Plant Line Value: 35A19
  misc_feature: MA Experiment 108556 PARAMETER Experiment Name: Zm_Drought_P Parameter: Timepoint (hr) Value: 24
  misc_feature: MA Experiment 108556 PARAMETER Experiment Name: Zm_Drought_P Parameter: Tissue Value: Aerial
  misc_feature: MA Experiment 108556 PARAMETER Experiment Name: Zm_Drought_P Parameter: Treatment Value: Drought vs. No Drought
  misc_feature: MA Experiment ID: 20000480 Result: Down-regulated in Transcription
  misc_feature: MA Experiment 20000480 PARAMETER Experiment Name: Zm_Drought_P Parameter: Age (day) Value: 11
  misc_feature: MA Experiment 20000480 PARAMETER Experiment Name: Zm_Drought_P Parameter: Organism Value: Zea mays
  misc_feature: MA Experiment 20000480 PARAMETER Experiment Name: Zm_Drought_P Parameter: Plant Line Value: 35A19
  misc_feature: MA Experiment 20000480 PARAMETER Experiment Name: Zm_Drought_P Parameter: Timepoint (hr) Value: 72
  misc_feature: MA Experiment 20000480 PARAMETER Experiment Name: Zm_Drought_P Parameter: Tissue Value: Aerial
  misc_feature: MA Experiment 20000480 PARAMETER Experiment Name: Zm_Drought_P Parameter: Treatment Value: Drought vs. No Drought
  misc_feature: MA Experiment ID: 20000534 Result: Down-regulated in Transcription
  misc_feature: MA Experiment 20000534 PARAMETER Experiment Name: Zm_Hybrid_Pollen_P Parameter: Age (day) Value: 8
  misc_feature: MA Experiment 20000534 PARAMETER Experiment Name: Zm_Hybrid_Pollen_P Parameter: Organism Value: Zea mays
  misc_feature: MA Experiment 20000534 PARAMETER Experiment Name: Zm_Hybrid_Pollen_P Parameter: Plant Line Value: 35A19
  misc_feature: MA Experiment 20000534 PARAMETER Experiment Name: Zm_Hybrid_Pollen_P Parameter: Tissue Value: Pollen vs. Aerial
actccgtcatttctatcagacgcaagcagcagtgacgccgcgctacccgaccaaaatccgccgccggtgcccagaactcgacgggaaaaccggggctttggtcgccggacgccggctgcctcgagatgctcgtgtgggcggccaccgcgtcaccacccagcactccatccgccgtgccatttgctcctccccaccgcgccgccgctccccgccctccaccgcctctctgccgctcgctcccggggctgctgtgcgcgggcctgatccctccgccgcgcgccgccgcttctgacggcgacgtcttctgggaggagccagacgacggctccgggagcgactacgaggacgacggcccggagcaaaggagggccttgcgtttcccatcttcctcgccgtcctacaggctcgaggcgtcggcgcagcaagaacaggacctccggagagagatcgagcttctcctaacgcctgaagaaaaggctactttggaccagcatgagacccctgacgtcactagaatatcatcacccaagtggcacccacttcatagctacgcgttggcactgcagatacccctcatggacaagcttctgaacagcggtgttgacatcaacttagttgatagagatggcttcacctctcttcacaaggctgtcatagggaaaaaagaggctgtcattagccatctcctaagaaaaggggcaaatccccatgttagagatagggatggagccacaccattacattatgctgttcaagctggtgccctgcaaaccgtgaagttactgattaagtacaaggttgatgtcaatgttgccgataatgatggatggacaccactccatttagccatacagagtaggaatagagatatagctaaggtcttgcttgtcaatggtgcggataagacaagaagaaccaaggatgggaggactgcgctggatctaagtctatgctttggaagggatttcaagtcatatgatcttgcaaagcttgtcaagcttattccagcaaacagaggtgcgtgatttcgctctgccatgaatctgagggaaagaaagtccaaaagttagccaatgcagcagcctcatacgacccatgcatagcttatgaagaagggtccaggagccgcgtgccgccgtgccagtcatcattcattttttttttcttgaccgccaactcaaacgatctgacagattgctctacaattgtgccgttagatttcagtgtccatggtctgtagcctgttcgacgtgactcgaaaaatgatgatgtacatgcaacagtcctccagctgttgtgttcagttgttttgttcaatatgggccagggccaccaaaacaagatctgaattgtaactgttattaaccttcagcatatgtgtacacattatcgttttggc

SEQ ID NO: 13463 - protein, 299 aa, Zea mays subsp. mays
  peptide (1)..(299): Ceres Seq. ID no. 12373458
  misc_feature (233)..(265): Pfam Name: Ankyrin repeat Pfam Description: Ankyrin repeat
  misc_feature (60)..(294): Homolog of NCBI NO: 15242597 NR Description: ankyrin repeat protein EMB506; protein id: supported by cDNA: gi_17380823, supported by cDNA: gi_5911311 thaliana] >gi|5911312|gb|AAD55746.1|AF026167_1 ankyrin repeat
  misc_feature (111)..(291): Homolog of NCBI NO: 22758264 NR Description: Putative ankyrin-repeat protein [Oryza sativa
  misc_feature (111)..(297): Homolog of NCBI NO: 26450056 NR Description: unknown protein [Arabidopsis thaliana]
  misc_feature (111)..(297): Homolog of NCBI NO: 30698188 NR Description: expressed protein [Arabidopsis thaliana] Ankyrin repeat protein, chloroplast precursor (AKRP)
  misc_feature (111)..(271): Homolog of NCBI NO: 322461 NR Description: ankyrin-repeat protein - Arabidopsis thaliana
  misc_feature (154)..(291): Homolog of NCBI NO: 28373666 NR Description: Chain A, Sank E3_5: An Artificial Ankyrin Repeat >gi|28274848|gb|AAO25689.1| ankyrin repeat protein E3_5
  misc_feature (138)..(291): Homolog of NCBI NO: 28274854 NR Description: ankyrin repeat protein E4_8 [synthetic construct]
  misc_feature (138)..(291): Homolog of NCBI NO: 28274852 NR Description: ankyrin repeat protein E4_2 [synthetic construct]
  misc_feature (154)..(291): Homolog of NCBI NO: 28274850 NR Description: ankyrin repeat protein E3_19 [synthetic construct]
  misc_feature (154)..(278): Homolog of NCBI NO: 28274852 NR Description: ankyrin repeat protein E4_2 [synthetic construct]
MLVWAATASPPSTPSAVPFAPPHRAAAPRPPPPLCRSLPGLLCAGLIPPPRAAASDGDVFWEEPDDGSGSDYEDDGPEQRRALRFPSSSPSYRLEASAQQEQDLRREIELLLTPEEKATLDQHETPDVTRISSPKWHPLHSYALALQIPLMDKLLNSGVDINLVDRDGFTSLHKAVIGKKEAVISHLLRKGANPHVRDRDGATPLHYAVQAGALQTVKLLIKYKVDVNVADNDGWTPLHLAIQSRNRDIAKVLLVNGADKTRRTKDGRTALDLSLCFGRDFKSYDLAKLVKLIPANRGA

SEQ ID NO: 13464 - protein, 149 aa, Zea mays subsp. mays
  peptide (1)..(149): Ceres Seq. ID no. 12373459
  misc_feature (83)..(115): Pfam Name: Ankyrin repeat Pfam Description: Ankyrin repeat
  misc_feature (1)..(144): Homolog of NCBI NO: 15242597 NR Description: ankyrin repeat protein EMB506; protein id: supported by cDNA: gi_17380823, supported by cDNA: gi_5911311 thaliana] >gi|5911312|gb|AAD55746.1|AF026167_1 ankyrin repeat
  misc_feature (1)..(141): Homolog of NCBI NO: 22758264 NR Description: Putative ankyrin-repeat protein [Oryza sativa
  misc_feature (1)..(147): Homolog of NCBI NO: 26450056 NR Description: unknown protein [Arabidopsis thaliana]
  misc_feature (1)..(147): Homolog of NCBI NO: 30698188 NR Description: expressed protein [Arabidopsis thaliana] Ankyrin repeat protein, chloroplast precursor (AKRP)
  misc_feature (1)..(121): Homolog of NCBI NO: 322461 NR Description: ankyrin-repeat protein - Arabidopsis thaliana
  misc_feature (4)..(141): Homolog of NCBI NO: 28373666 NR Description: Chain A, Sank E3_5: An Artificial Ankyrin Repeat >gi|28274848|gb|AAO25689.1| ankyrin repeat protein E3_5
  misc_feature (1)..(141): Homolog of NCBI NO: 28274854 NR Description: ankyrin repeat protein E4_8 [synthetic construct]
  misc_feature (1)..(141): Homolog of NCBI NO: 28274852 NR Description: ankyrin repeat protein E4_2 [synthetic construct]
  misc_feature (4)..(141): Homolog of NCBI NO: 28274850 NR Description: ankyrin repeat protein E3_19 [synthetic construct]
  misc_feature (4)..(128): Homolog of NCBI NO: 28274852 NR Description: ankyrin repeat protein E4_2 [synthetic construct]
MDKLLNSGVDINLVDRDGFTSLHKAVIGKKEAVISHLLRKGANPHVRDRDGATPLHYAVQAGALQTVKLLIKYKVDVNVADNDGWTPLHLAIQSRNRDIAKVLLVNGADKTRRTKDGRTALDLSLCFGRDFKSYDLAKLVKLIPANRGA

SEQ ID NO: 13465 - DNA, 1100 bp, Zea mays subsp. mays
  misc_feature (1)..(1100): Ceres Seq. ID no. 12351878
  misc_feature: MA Experiment ID: 108515 Result: Down-regulated in Transcription
  misc_feature: MA Experiment 108515 PARAMETER Experiment Name: Zm_2mM_SA_P Parameter: Age (day) Value: 8
  misc_feature: MA Experiment 108515 PARAMETER Experiment Name: Zm_2mM_SA_P Parameter: Organism Value: Zea mays
  misc_feature: MA Experiment 108515 PARAMETER Experiment Name: Zm_2mM_SA_P Parameter: Plant Line Value: 35A19
  misc_feature: MA Experiment 108515 PARAMETER Experiment Name: Zm_2mM_SA_P Parameter: Timepoint (hr) Value: 12
  misc_feature: MA Experiment 108515 PARAMETER Experiment Name: Zm_2mM_SA_P Parameter: Tissue Value: Aerial
  misc_feature: MA Experiment 108515 PARAMETER Experiment Name: Zm_2mM_SA_P Parameter: Treatment Value: 2mM SA vs. No Treatment
  misc_feature: MA Experiment ID: 108527 Result: Down-regulated in Transcription
  misc_feature: MA Experiment 108527 PARAMETER Experiment Name: Zm_5mM_NO_P Parameter: Age (day) Value: 8
  misc_feature: MA Experiment 108527 PARAMETER Experiment Name: Zm_5mM_NO_P Parameter: Organism Value: Zea mays
  misc_feature: MA Experiment 108527 PARAMETER Experiment Name: Zm_5mM_NO_P Parameter: Plant Line Value: 35A19
  misc_feature: MA Experiment 108527 PARAMETER Experiment Name: Zm_5mM_NO_P Parameter: Timepoint (hr) Value: 6
  misc_feature: MA Experiment 108527 PARAMETER Experiment Name: Zm_5mM_NO_P Parameter: Tissue Value: Aerial
  misc_feature: MA Experiment 108527 PARAMETER Experiment Name: Zm_5mM_NO_P Parameter: Treatment Value: 5mM NO vs. No Treatment
  misc_feature: MA Experiment ID: 108528 Result: Up-regulated in Transcription
  misc_feature: MA Experiment 108528 PARAMETER Experiment Name: Zm_Imbibed_Seeds_P Parameter: Age (day) Value: 5 vs. 2
  misc_feature: MA Experiment 108528 PARAMETER Experiment Name: Zm_Imbibed_Seeds_P Parameter: Organism Value: Zea mays
  misc_feature: MA Experiment 108528 PARAMETER Experiment Name: Zm_Imbibed_Seeds_P Parameter: Plant Line Value: 35A19
  misc_feature: MA Experiment 108528 PARAMETER Experiment Name: Zm_Imbibed_Seeds_P Parameter: Tissue Value: Aerial vs. Embryo
  misc_feature: MA Experiment ID: 108529 Result: Up-regulated in Transcription
  misc_feature: MA Experiment 108529 PARAMETER Experiment Name: Zm_Imbibed_Seeds_P Parameter: Age (day) Value: 5 vs. 2
  misc_feature: MA Experiment 108529 PARAMETER Experiment Name: Zm_Imbibed_Seeds_P Parameter: Organism Value: Zea mays
  misc_feature: MA Experiment 108529 PARAMETER Experiment Name: Zm_Imbibed_Seeds_P Parameter: Plant Line Value: 35A19
  misc_feature: MA Experiment 108529 PARAMETER Experiment Name: Zm_Imbibed_Seeds_P Parameter: Tissue Value: Roots vs. Embryo
  misc_feature: MA Experiment ID: 108530 Result: Up-regulated in Transcription
  misc_feature: MA Experiment 108530 PARAMETER Experiment Name: Zm_Imbibed_Seeds_P Parameter: Age (day) Value: 6 vs. 2
  misc_feature: MA Experiment 108530 PARAMETER Experiment Name: Zm_Imbibed_Seeds_P Parameter: Organism Value: Zea mays
  misc_feature: MA Experiment 108530 PARAMETER Experiment Name: Zm_Imbibed_Seeds_P Parameter: Plant Line Value: 35A19
  misc_feature: MA Experiment 108530 PARAMETER Experiment Name: Zm_Imbibed_Seeds_P Parameter: Tissue Value: Aerial vs. Embryo
  misc_feature: MA Experiment ID: 108543 Result: Down-regulated in Transcription
  misc_feature: MA Experiment ID: 108547 Result: Up-regulated in Transcription
  misc_feature: MA Experiment 108547 PARAMETER Experiment Name: Zm_Imbibed_Seeds_P Parameter: Age (day) Value: 4 vs. 2
  misc_feature: MA Experiment 108547 PARAMETER Experiment Name: Zm_Imbibed_Seeds_P Parameter: Organism Value: Zea mays
  misc_feature: MA Experiment 108547 PARAMETER Experiment Name: Zm_Imbibed_Seeds_P Parameter: Plant Line Value: 35A19
  misc_feature: MA Experiment 108547 PARAMETER Experiment Name: Zm_Imbibed_Seeds_P Parameter: Tissue Value: Aerial vs. Embryo
  misc_feature: MA Experiment ID: 108559 Result: Down-regulated in Transcription
  misc_feature: MA Experiment 108559 PARAMETER Experiment Name: Zm_5mM_NO_P Parameter: Age (day) Value: 8
  misc_feature: MA Experiment 108559 PARAMETER Experiment Name: Zm_5mM_NO_P Parameter: Organism Value: Zea mays
  misc_feature: MA Experiment 108559 PARAMETER Experiment Name: Zm_5mM_NO_P Parameter: Plant Line Value: 35A19
  misc_feature: MA Experiment 108559 PARAMETER Experiment Name: Zm_5mM_NO_P Parameter: Timepoint (hr) Value: 12
  misc_feature: MA Experiment 108559 PARAMETER Experiment Name: Zm_5mM_NO_P Parameter: Tissue Value: Aerial
  misc_feature: MA Experiment 108559 PARAMETER Experiment Name: Zm_5mM_NO_P Parameter: Treatment Value: 5mM NO vs. No Treatment
  misc_feature: MA Experiment ID: 20000535 Result: Down-regulated in Transcription
  misc_feature: MA Experiment 20000535 PARAMETER Experiment Name: Zm_Hybrid_Seed_Dev_P Parameter: DAP Value: 30 vs. 12
  misc_feature: MA Experiment 20000535 PARAMETER Experiment Name: Zm_Hybrid_Seed_Dev_P Parameter: Organism Value: Zea mays
  misc_feature: MA Experiment 20000535 PARAMETER Experiment Name: Zm_Hybrid_Seed_Dev_P Parameter: Plant Line Value: 35A19
  misc_feature: MA Experiment 20000535 PARAMETER Experiment Name: Zm_Hybrid_Seed_Dev_P Parameter: Tissue Value: Embryo vs. Unfert Floret
  misc_feature: MA Experiment ID: 20000630 Result: Down-regulated in Transcription
  misc_feature: MA Experiment 20000630 PARAMETER Experiment Name: Zm_Herbicide-Treatments_P Parameter: Timepoint (hr) Value: 4
  misc_feature: MA Experiment 20000630 PARAMETER Experiment Name: Zm_Herbicide-Treatments_P Parameter: Tissue Value: Aerial
  misc_feature: MA Experiment 20000630 PARAMETER Experiment Name: Zm_Herbicide-Treatments_P Parameter: Treatment Value: Roundup vs. No Treatment
aatctacagatatgaaccaagttagataaggtactcgtacaccgaacatgttcgatagaatgctctagtgacagcgaaaaaaccaaacaacaaaaaccaacgaaatccctgccatttttataggagacgacggtgcggggaggcaagggaagggggcgacgaagaggaaagcgaagaaagcgtcatggggcttggccttggcgtgcgggcggcgcccttcacgtacgcggcgcacgcgctggccgtcgcggcggcggccatggtgttggtctgggccatctacttccgcggtgggctcgccatcgaggccaccaacaagaacctcatcttcaacgttcaccctgttcttatgcttatcggttatattatcatcggcggcgaagctataatggtatacagggtacttccaacatcgaaccacgggacaaataagctgatccatctagttctccacgggattgcacttgtccttggtgcggttggaatatatttcgccttcaaaaatcataatgagagtgggattgccaatctttacagtctgcactcttggattgggatagggacgattactttgtatggtattcagtggatagttggattcgttacattcttcttccctggtgctgcgccaaacgtgaagaagggtgttcttccttggcacatactctttgggctctttgtctacatcttagcactggctaatgcggaactcggctttcttgagaagctcactttcctcgagagctcgggtctcgacaaatacggcacagaggcattcttggtgaacttcacagcgttggttgtcgtgttgtttggtgcctctgttgtggtggctgctatagctccagttcgccttgaagaaccacagggttatgttccaattccagaaaactagtacaaatgaaatgtacatcatatgcagttgccaggattggctgttaccatatggagctaagctattcatctctctttattaaggagaagaagatgatggagttatcacgataagaagatagtgcatcgtcattgtgtgtgtatatgtatatacattccgtgatacttcaaaatttcagtatatgcgaaattgaatatactgcttc

SEQ ID NO: 13466 - protein, 236 aa, Zea mays subsp. mays
  peptide (1)..(236): Ceres Seq. ID no. 12351879
  misc_feature (1)..(236): Homolog of NCBI NO: 38346996 NR Description: OSJNBb0039L24.15 [Oryza sativa (japonica
  misc_feature (9)..(230): Homolog of NCBI NO: 37535830 NR Description: putative cytochrome b-561 [Oryza sativa (japonica
  misc_feature (3)..(220): Homolog of NCBI NO: 7486819 NR Description: hypothetical protein M7J2.60 - Arabidopsis >gi|2980793|emb|CAA18169.1| putative protein [Arabidopsis
  misc_feature (3)..(220): Homolog of NCBI NO: 18416576 NR Description: putative protein; protein id: At4g25570.1, by cDNA: 15975., supported by cDNA: gi_12597244 [Arabidopsis >gi|21539471|gb|AAM53288.1| putative protein [Arabidopsis
  misc_feature (3)..(220): Homolog of NCBI NO: 21553731 NR Description: cytochrome b561 [Arabidopsis thaliana]
  misc_feature (3)..(220): Homolog of NCBI NO: 25407597 NR Description: hypothetical protein AT4g25570 [imported] - thaliana >gi|7269407|emb|CAB81367.1| putative protein
  misc_feature (3)..(220): Homolog of NCBI NO: 12597245 NR Description: cytochrome b561 [Arabidopsis thaliana]
  misc_feature (1)..(190): Homolog of NCBI NO: 6822123 NR Description: putative cytochrome B 561 [Craterostigma
  misc_feature (16)..(217): Homolog of NCBI NO: 38637027 NR Description: putative cytochrome b561 [Oryza sativa (japonica group)] >gi|38637292|dbj|BAD03555.1| putative cytochrome b561
  misc_feature (11)..(222): Homolog of NCBI NO: 15240965 NR Description: cytochrome b-561 (gb|AAD45585.1); protein id: supported by cDNA: 124838., supported by cDNA: gi_12597242
MGLGLGVRAAPFTYAAHALAVAAAAMVLVWAIYFRGGLAIEATNKNLIFNVHPVLMLIGYIIIGGEAIMVYRVLPTSNHGTNKLIHLVLHGIALVLGAVGIYFAFKNHNESGIANLYSLHSWIGIGTITLYGIQWIVGFVTFFFPGAAPNVKKGVLPWHILFGLFVYILALANAELGFLEKLTFLESSGLDKYGTEAFLVNFTALVVVLFGASVVVAAIAPVRLEEPQGYVPIPEN

SEQ ID NO: 13467 - protein, 211 aa, Zea mays subsp. mays
  peptide (1)..(211): Ceres Seq. ID no. 12351880
  misc_feature (1)..(211): Homolog of NCBI NO: 38346996 NR Description: OSJNBb0039L24.15 [Oryza sativa (japonica
  misc_feature (1)..(205): Homolog of NCBI NO: 37535830 NR Description: putative cytochrome b-561 [Oryza sativa (japonica
  misc_feature (1)..(195): Homolog of NCBI NO: 7486819 NR Description: hypothetical protein M7J2.60 - Arabidopsis >gi|2980793|emb|CAA18169.1| putative protein [Arabidopsis
  misc_feature (1)..(195): Homolog of NCBI NO: 21553731 NR Description: cytochrome b561 [Arabidopsis thaliana]
  misc_feature (1)..(195): Homolog of NCBI NO: 18416576 NR Description: putative protein; protein id: At4g25570.1, by cDNA: 15975., supported by cDNA: gi_12597244 [Arabidopsis >gi|21539471|gb|AAM53288.1| putative protein [Arabidopsis
  misc_feature (1)..(195): Homolog of NCBI NO: 25407597 NR Description: hypothetical protein AT4g25570 [imported] - thaliana >gi|7269407|emb|CAB81367.1| putative protein
  misc_feature (1)..(195): Homolog of NCBI NO: 12597245 NR Description: cytochrome b561 [Arabidopsis thaliana]
  misc_feature (1)..(165): Homolog of NCBI NO: 6822123 NR Description: putative cytochrome B 561 [Craterostigma
  misc_feature (1)..(192): Homolog of NCBI NO: 38637027 NR Description: putative cytochrome b561 [Oryza sativa (japonica group)] >gi|38637292|dbj|BAD03555.1| putative cytochrome b561
  misc_feature (1)..(197): Homolog of NCBI NO: 15240965 NR Description: cytochrome b-561 (gb|AAD45585.1); protein id: supported by cDNA: 124838., supported by cDNA: gi_12597242
MVLVWAIYFRGGLAIEATNKNLIFNVHPVLMLIGYIIIGGEAIMVYRVLPTSNHGTNKLIHLVLHGIALVLGAVGIYFAFKNHNESGIANLYSLHSWIGIGTITLYGIQWIVGFVTFFFPGAAPNVKKGVLPWHILFGLFVYILALANAELGFLEKLTFLESSGLDKYGTEAFLVNFTALVVVLFGASVVVAAIAPVRLEEPQGYVPIPEN

SEQ ID NO: 13468 - protein, 181 aa, Zea mays subsp. mays
  peptide (1)..(181): Ceres Seq. ID no. 12351881
  misc_feature (1)..(181): Homolog of NCBI NO: 38346996 NR Description: OSJNBb0039L24.15 [Oryza sativa (japonica
  misc_feature (1)..(175): Homolog of NCBI NO: 37535830 NR Description: putative cytochrome b-561 [Oryza sativa (japonica
  misc_feature (1)..(165): Homolog of NCBI NO: 7486819 NR Description: hypothetical protein M7J2.60 - Arabidopsis >gi|2980793|emb|CAA18169.1| putative protein [Arabidopsis
  misc_feature (1)..(165): Homolog of NCBI NO: 18416576 NR Description: putative protein; protein id: At4g25570.1, by cDNA: 15975., supported by cDNA: gi_12597244 [Arabidopsis >gi|21539471|gb|AAM53288.1| putative protein [Arabidopsis
  misc_feature (1)..(165): Homolog of NCBI NO: 21553731 NR Description: cytochrome b561 [Arabidopsis thaliana]
  misc_feature (1)..(165): Homolog of NCBI NO: 25407597 NR Description: hypothetical protein AT4g25570 [imported] - thaliana >gi|7269407|emb|CAB81367.1| putative protein
  misc_feature (1)..(165): Homolog of NCBI NO: 12597245 NR Description: cytochrome b561 [Arabidopsis thaliana]
  misc_feature (1)..(135): Homolog of NCBI NO: 6822123 NR Description: putative cytochrome B 561 [Craterostigma
  misc_feature (1)..(162): Homolog of NCBI NO: 38637027 NR Description: putative cytochrome b561 [Oryza sativa (japonica group)] >gi|38637292|dbj|BAD03555.1| putative cytochrome b561
  misc_feature (1)..(167): Homolog of NCBI NO: 15240965 NR Description: cytochrome b-561 (gb|AAD45585.1); protein id: supported by cDNA: 124838., supported by cDNA: gi_12597242
MLIGYIIIGGEAIMVYRVLPTSNHGTNKLIHLVLHGIALVLGAVGIYFAFKNHNESGIANLYSLHSWIGIGTITLYGIQWIVGFVTFFFPGAAPNVKKGVLPWHILFGLFVYILALANAELGFLEKLTFLESSGLDKYGTEAFLVNFTALVVVLFGASVVVAAIAPVRLEEPQGYVPIPEN

SEQ ID NO: 13469 - DNA, 1211 bp, Zea mays subsp. mays
  misc_feature (1)..(1211): Ceres Seq. ID no. 12341358
  misc_feature: MA Experiment ID: 108527 Result: Down-regulated in Transcription
  misc_feature: MA Experiment 108527 PARAMETER Experiment Name: Zm_5mM_NO_P Parameter: Age (day) Value: 8
  misc_feature: MA Experiment 108527 PARAMETER Experiment Name: Zm_5mM_NO_P Parameter: Organism Value: Zea mays
  misc_feature: MA Experiment 108527 PARAMETER Experiment Name: Zm_5mM_NO_P Parameter: Plant Line Value: 35A19
  misc_feature: MA Experiment 108527 PARAMETER Experiment Name: Zm_5mM_NO_P Parameter: Timepoint (hr) Value: 6
  misc_feature: MA Experiment 108527 PARAMETER Experiment Name: Zm_5mM_NO_P Parameter: Tissue Value: Aerial
  misc_feature: MA Experiment 108527 PARAMETER Experiment Name: Zm_5mM_NO_P Parameter: Treatment Value: 5mM NO vs. No Treatment
  misc_feature: MA Experiment ID: 108528 Result: Up-regulated in Transcription
  misc_feature: MA Experiment 108528 PARAMETER Experiment Name: Zm_Imbibed_Seeds_P Parameter: Age (day) Value: 5 vs. 2
  misc_feature: MA Experiment 108528 PARAMETER Experiment Name: Zm_Imbibed_Seeds_P Parameter: Organism Value: Zea mays
  misc_feature: MA Experiment 108528 PARAMETER Experiment Name: Zm_Imbibed_Seeds_P Parameter: Plant Line Value: 35A19
  misc_feature: MA Experiment 108528 PARAMETER Experiment Name: Zm_Imbibed_Seeds_P Parameter: Tissue Value: Aerial vs. Embryo
  misc_feature: MA Experiment ID: 108530 Result: Up-regulated in Transcription
  misc_feature: MA Experiment 108530 PARAMETER Experiment Name: Zm_Imbibed_Seeds_P Parameter: Age (day) Value: 6 vs. 2
  misc_feature: MA Experiment 108530 PARAMETER Experiment Name: Zm_Imbibed_Seeds_P Parameter: Organism Value: Zea mays
  misc_feature: MA Experiment 108530 PARAMETER Experiment Name: Zm_Imbibed_Seeds_P Parameter: Plant Line Value: 35A19
  misc_feature: MA Experiment 108530 PARAMETER Experiment Name: Zm_Imbibed_Seeds_P Parameter: Tissue Value: Aerial vs. Embryo
  misc_feature: MA Experiment ID: 108545 Result: Up-regulated in Transcription
  misc_feature: MA Experiment 108545 PARAMETER Experiment Name: Zm_Imbibed_Seeds_P Parameter: Age (day) Value: 3 vs. 2
  misc_feature: MA Experiment 108545 PARAMETER Experiment Name: Zm_Imbibed_Seeds_P Parameter: Organism Value: Zea mays
  misc_feature: MA Experiment 108545 PARAMETER Experiment Name: Zm_Imbibed_Seeds_P Parameter: Plant Line Value: 35A19
  misc_feature: MA Experiment 108545 PARAMETER Experiment Name: Zm_Imbibed_Seeds_P Parameter: Tissue Value: Aerial vs. Embryo
  misc_feature: MA Experiment ID: 108547 Result: Up-regulated in Transcription
  misc_feature: MA Experiment 108547 PARAMETER Experiment Name: Zm_Imbibed_Seeds_P Parameter: Age (day) Value: 4 vs. 2
  misc_feature: MA Experiment 108547 PARAMETER Experiment Name: Zm_Imbibed_Seeds_P Parameter: Organism Value: Zea mays
  misc_feature: MA Experiment 108547 PARAMETER Experiment Name: Zm_Imbibed_Seeds_P Parameter: Plant Line Value: 35A19
  misc_feature: MA Experiment 108547 PARAMETER Experiment Name: Zm_Imbibed_Seeds_P Parameter: Tissue Value: Aerial vs. Embryo
  misc_feature: MA Experiment ID: 108559 Result: Down-regulated in Transcription
  misc_feature: MA Experiment 108559 PARAMETER Experiment Name: Zm_5mM_NO_P Parameter: Age (day) Value: 8
  misc_feature: MA Experiment 108559 PARAMETER Experiment Name: Zm_5mM_NO_P Parameter: Organism Value: Zea mays
  misc_feature: MA Experiment 108559 PARAMETER Experiment Name: Zm_5mM_NO_P Parameter: Plant Line Value: 35A19
  misc_feature: MA Experiment 108559 PARAMETER Experiment Name: Zm_5mM_NO_P Parameter: Timepoint (hr) Value: 12
  misc_feature: MA Experiment 108559 PARAMETER Experiment Name: Zm_5mM_NO_P Parameter: Tissue Value: Aerial
  misc_feature: MA Experiment 108559 PARAMETER Experiment Name: Zm_5mM_NO_P Parameter: Treatment Value: 5mM NO vs. No Treatment
  misc_feature: MA Experiment ID: 20000492 Result: Up-regulated in Transcription
  misc_feature: MA Experiment 20000492 PARAMETER Experiment Name: Zm_Hybrid_Seed_Dev_P Parameter: DAP Value: 12
  misc_feature: MA Experiment 20000492 PARAMETER Experiment Name: Zm_Hybrid_Seed_Dev_P Parameter: Organism Value: Zea mays
  misc_feature: MA Experiment 20000492 PARAMETER Experiment Name: Zm_Hybrid_Seed_Dev_P Parameter: Plant Line Value: 35A19
  misc_feature: MA Experiment 20000492 PARAMETER Experiment Name: Zm_Hybrid_Seed_Dev_P Parameter: Tissue Value: Fert Kernel vs. Unfert Floret
aagggaaaacaaagagtgtgtgctgtgtgttatccatttcttctcctctctgctctgttcacttcgttctagtggggagcgccgccgctgcagttgccgccgccaccagagcagtccacctcggtctgatatggcgaccgggagtgcaagtgccatcgcgtccttctccgtggcggcggcagcggctgctgctctgcgcgtcaggcggccatgcgctcgcgcttgcgcttgggccccctcgcagcgaccgcagcaaggggcactcgtcagcctcaagccttgcgcctcactggcaccacaagctcctctgtggcgcgcggagtcggatgccgcggggggtggtgccggcgccggcgatgtcatgggcctcctcctccgggagcgcatagtcttcctcggcaacgagatcgaggacttcctcgcggacgccgtcgtcagccagctcctcctccttgacgccatcgacccggactctgacatccgcctcttcgtcaactcaccagggggatcccttagcgcaacaatggccatctatgatgtaatgcagcttgtgagggcagacgtgtccactattggaatgggcatagctggatcaacagcttctataatccttggtggtggcacgaagggcaagcgatttgccatgcccaacaccaggattatgatccatcagcctgtcggaggtgcaagcgggcaggccctagatgtagaggtccaagcgaaggagatattgaccaacaagaggaatgtcattcggatcgtatcaggcttcacaggccgcactcctgagcaggtagagaaagacattgacagagatcgttacatgggccctctcgaggctgtcgattatggactcattgatggcgtgatcgatggagacagtattatcccacttgagcctgtcccggagagggtgaagcctaagtacaactacgaagagctgtacaaggatccacagaagtttcttacaccagatgtcccagatgatgagatatactagtcgaaaagttgtattttgtgcgaatgttaagtctgttcttcagcaagcagatgtttttcgtcgcttgtagctgtcaaaccaaccatagcactagtagcttattgatcttgtttactgactggatggtgattcgagcaggcaactagaacctgttggttgtgtttctggtgttacattgtggtgttagaatggtccggctgtttcgttttgg

SEQ ID NO: 13470 - protein, 332 aa, Zea mays subsp. mays
  peptide (1)..(332): Ceres Seq. ID no. 12341359
  misc_feature (112)..(293): Pfam Name: Clp protease Pfam Description: Clp protease
  misc_feature (44)..(332): Homolog of NCBI NO: 37537218 NR Description: putative Clp protease [Oryza sativa (japonica group)] >gi|12039365|gb|AAG46151.1| putative Clp protease [Oryza >gi|31433719|gb|AAP55198.1| putative Clp protease [Oryza sativa
  misc_feature (49)..(332): Homolog of NCBI NO: 25453516 NR Description: ATP-dependent Clp proteinase (EC 3.4.21.-)
  misc_feature (116)..(332): Homolog of NCBI NO: 18422548 NR Description: ATP-dependent Clp protease proteolytic subunit protein id: At5g45390.1, supported by cDNA: 37901., supported by
  misc_feature (116)..(332): Homolog of NCBI NO: 4454056 NR Description: ClpP [Arabidopsis thaliana]
  misc_feature (116)..(332): Homolog of NCBI NO: 21593305 NR Description: ATP-dependent Clp protease proteolytic subunit
  misc_feature (116)..(332): Homolog of NCBI NO: 9758729 NR Description: ATP-dependent Clp protease-like protein
  misc_feature (109)..(291): Homolog of NCBI NO: 33241265 NR Description: Protease subunit of ATP-dependent Clp protease
  misc_feature (109)..(302): Homolog of NCBI NO: 23041314 NR Description: hypothetical protein [Trichodesmium erythraeum
  misc_feature (109)..(290): Homolog of NCBI NO: 3023500 NR Description: ATP-dependent Clp protease proteolytic subunit 2
  misc_feature (109)..(290): Homolog of NCBI NO: 25019682 NR Description: ClpP2 [Synechococcus sp. PCC 7942]
RENKECVLCVIHFFSSLLCSLRSSGERRRCSCRRHQSSPPRSDMATGSASAIASFSVAAAAAAALRVRRPCARACAWAPSQRPQQGALVSLKPCASLAPQAPLWRAESDAAGGGAGAGDVMGLLLRERIVFLGNEIEDFLADAVVSQLLLLDAIDPDSDIRLFVNSPGGSLSATMAIYDVMQLVRADVSTIGMGIAGSTASIILGGGTKGKRFAMPNTRIMIHQPVGGASGQALDVEVQAKEILTNKRNVIRIVSGFTGRTPEQVEKDIDRDRYMGPLEAVDYGLIDGVIDGDSIIPLEPVPERVKPKYNYEELYKDPQKFLTPDVPDDEIY

SEQ ID NO: 13471 - protein, 289 aa, Zea mays subsp. mays
  peptide (1)..(289): Ceres Seq. ID no. 12341360
  misc_feature (69)..(250): Pfam Name: Clp protease Pfam Description: Clp protease
  misc_feature (1)..(289): Homolog of NCBI NO: 37537218 NR Description: putative Clp protease [Oryza sativa (japonica group)] >gi|12039365|gb|AAG46151.1| putative Clp protease [Oryza >gi|31433719|gb|AAP55198.1| putative Clp protease [Oryza sativa
  misc_feature (6)..(289): Homolog of NCBI NO: 25453516 NR Description: ATP-dependent Clp proteinase (EC 3.4.21.-)
  misc_feature (73)..(289): Homolog of NCBI NO: 18422548 NR Description: ATP-dependent Clp protease proteolytic subunit protein id: At5g45390.1, supported by cDNA: 37901., supported by
  misc_feature (73)..(289): Homolog of NCBI NO: 4454056 NR Description: ClpP [Arabidopsis thaliana]
  misc_feature (73)..(289): Homolog of NCBI NO: 21593305 NR Description: ATP-dependent Clp protease proteolytic subunit
  misc_feature (73)..(289): Homolog of NCBI NO: 9758729 NR Description: ATP-dependent Clp protease-like protein
  misc_feature (66)..(248): Homolog of NCBI NO: 33241265 NR Description: Protease subunit of ATP-dependent Clp protease
  misc_feature (66)..(259): Homolog of NCBI NO: 23041314 NR Description: hypothetical protein [Trichodesmium erythraeum
  misc_feature (66)..(247): Homolog of NCBI NO: 3023500 NR Description: ATP-dependent Clp protease proteolytic subunit 2
  misc_feature (66)..(247): Homolog of NCBI NO: 25019682 NR Description: ClpP2 [Synechococcus sp. PCC 7942]
MATGSASAIASFSVAAAAAAALRVRRPCARACAWAPSQRPQQGALVSLKPCASLAPQAPLWRAESDAAGGGAGAGDVMGLLLRERIVFLGNEIEDFLADAVVSQLLLLDAIDPDSDIRLFVNSPGGSLSATMAIYDVMQLVRADVSTIGMGIAGSTASIILGGGTKGKRFAMPNTRIMIHQPVGGASGQALDVEVQAKEILTNKRNVIRIVSGFTGRTPEQVEKDIDRDRYMGPLEAVDYGLIDGVIDGDSIIPLEPVPERVKPKYNYEELYKDPQKFLTPDVPDDEIY

SEQ ID NO: 13472 - protein, 212 aa, Zea mays subsp. mays
  peptide (1)..(212): Ceres Seq. ID no. 12341361
  misc_feature (1)..(173): Pfam Name: Clp protease Pfam Description: Clp protease
  misc_feature (1)..(212): Homolog of NCBI NO: 37537218 NR Description: putative Clp protease [Oryza sativa (japonica group)] >gi|12039365|gb|AAG46151.1| putative Clp protease [Oryza >gi|31433719|gb|AAP55198.1| putative Clp protease [Oryza sativa
  misc_feature (1)..(212): Homolog of NCBI NO: 25453516 NR Description: ATP-dependent Clp proteinase (EC 3.4.21.-)
  misc_feature (1)..(212): Homolog of NCBI NO: 18422548 NR Description: ATP-dependent Clp protease proteolytic subunit protein id: At5g45390.1, supported by cDNA: 37901., supported by
  misc_feature (1)..(212): Homolog of NCBI NO: 4454056 NR Description: ClpP [Arabidopsis thaliana]
  misc_feature (1)..(212): Homolog of NCBI NO: 21593305 NR Description: ATP-dependent Clp protease proteolytic subunit
  misc_feature (1)..(212): Homolog of NCBI NO: 9758729 NR Description: ATP-dependent Clp protease-like protein
  misc_feature (1)..(171): Homolog of NCBI NO: 33241265 NR Description: Protease subunit of ATP-dependent Clp protease
  misc_feature (1)..(182): Homolog of NCBI NO: 23041314 NR Description: hypothetical protein [Trichodesmium erythraeum
  misc_feature (1)..(170): Homolog of NCBI NO: 3023500 NR Description: ATP-dependent Clp protease proteolytic subunit 2
  misc_feature (1)..(170): Homolog of NCBI NO: 25019682 NR Description: ClpP2 [Synechococcus sp. PCC 7942]
MGLLLRERIVFLGNEIEDFLADAVVSQLLLLDAIDPDSDIRLFVNSPGGSLSATMAIYDVMQLVRADVSTIGMGIAGSTASIILGGGTKGKRFAMPNTRIMIHQPVGGASGQALDVEVQAKEILTNKRNVIRIVSGFTGRTPEQVEKDIDRDRYMGPLEAVDYGLIDGVIDGDSIIPLEPVPERVKPKYNYEELYKDPQKFLTPDVPDDEIY

SEQ ID NO: 13473 - DNA, 2021 bp, Zea mays subsp. mays
  misc_feature (1)..(2021): Ceres Seq. ID no. 12363212
  misc_feature: MA Experiment ID: 108535 Result: Up-regulated in Transcription
  misc_feature: MA Experiment 108535 PARAMETER Experiment Name: Zm_Meristem_P Parameter: Age (day) Value: 8
  misc_feature: MA Experiment 108535 PARAMETER Experiment Name: Zm_Meristem_P Parameter: Organism Value: Zea mays
  misc_feature: MA Experiment 108535 PARAMETER Experiment Name: Zm_Meristem_P Parameter: Plant Line Value: 35A19
  misc_feature: MA Experiment 108535 PARAMETER Experiment Name: Zm_Meristem_P Parameter: Tissue Value: Root Meristem vs. Above Root Meristem
  misc_feature: MA Experiment ID: 108544 Result: Down-regulated in Transcription
  misc_feature: MA Experiment ID: 108556 Result: Down-regulated in Transcription
  misc_feature: MA Experiment 108556 PARAMETER Experiment Name: Zm_Drought_P Parameter: Age (day) Value: 9
  misc_feature: MA Experiment 108556 PARAMETER Experiment Name: Zm_Drought_P Parameter: Organism Value: Zea mays
  misc_feature: MA Experiment 108556 PARAMETER Experiment Name: Zm_Drought_P Parameter: Plant Line Value: 35A19
  misc_feature: MA Experiment 108556 PARAMETER Experiment Name: Zm_Drought_P Parameter: Timepoint (hr) Value: 24
  misc_feature: MA Experiment 108556 PARAMETER Experiment Name: Zm_Drought_P Parameter: Tissue Value: Aerial
  misc_feature: MA Experiment 108556 PARAMETER Experiment Name: Zm_Drought_P Parameter: Treatment Value: Drought vs. No Drought
  misc_feature: MA Experiment ID: 108689 Result: Down-regulated in Transcription
  misc_feature: MA Experiment 108689 PARAMETER Experiment Name: Zm_Drought_Roots_P Parameter: Age (day) Value: 9
  misc_feature: MA Experiment 108689 PARAMETER Experiment Name: Zm_Drought_Roots_P Parameter: Organism Value: Zea mays
  misc_feature: MA Experiment 108689 PARAMETER Experiment Name: Zm_Drought_Roots_P Parameter: Plant Line Value: 35A19
  misc_feature: MA Experiment 108689 PARAMETER Experiment Name: Zm_Drought_Roots_P Parameter: Timepoint (hr) Value: 24
  misc_feature: MA Experiment 108689 PARAMETER Experiment Name: Zm_Drought_Roots_P Parameter: Tissue Value: Roots
  misc_feature: MA Experiment 108689 PARAMETER Experiment Name: Zm_Drought_Roots_P Parameter: Treatment Value: Drought vs. No Drought
  misc_feature: MA Experiment ID: 20000477 Result: Down-regulated in Transcription
  misc_feature: MA Experiment 20000477 PARAMETER Experiment Name: Zm_5mM_SA_P Parameter: Age (day) Value: 10
  misc_feature: MA Experiment 20000477 PARAMETER Experiment Name: Zm_5mM_SA_P Parameter: Organism Value: Zea mays
  misc_feature: MA Experiment 20000477 PARAMETER Experiment Name: Zm_5mM_SA_P Parameter: Plant Line Value: 35A19
  misc_feature: MA Experiment 20000477 PARAMETER Experiment Name: Zm_5mM_SA_P Parameter: Timepoint (hr) Value: 48
  misc_feature: MA Experiment 20000477 PARAMETER Experiment Name: Zm_5mM_SA_P Parameter: Tissue Value: Aerial
  misc_feature: MA Experiment 20000477 PARAMETER Experiment Name: Zm_5mM_SA_P Parameter: Treatment Value: 5mM SA vs. No Treatment
  misc_feature: MA Experiment ID: 20000478 Result: Down-regulated in Transcription
  misc_feature: MA Experiment 20000478 PARAMETER Experiment Name: Zm_5mM_SA_P Parameter: Age (day) Value: 11
  misc_feature: MA Experiment 20000478 PARAMETER Experiment Name: Zm_5mM_SA_P Parameter: Organism Value: Zea mays
  misc_feature: MA Experiment 20000478 PARAMETER Experiment Name: Zm_5mM_SA_P Parameter: Plant Line Value: 35A19
  misc_feature: MA Experiment 20000478 PARAMETER Experiment Name: Zm_5mM_SA_P Parameter: Timepoint (hr) Value: 72
  misc_feature: MA Experiment 20000478 PARAMETER Experiment Name: Zm_5mM_SA_P Parameter: Tissue Value: Aerial
  misc_feature: MA Experiment 20000478 PARAMETER Experiment Name: Zm_5mM_SA_P Parameter: Treatment Value: 5mM SA vs. No Treatment
  misc_feature: MA Experiment ID: 20000479 Result: Down-regulated in Transcription
  misc_feature: MA Experiment 20000479 PARAMETER Experiment Name: Zm_Drought_P Parameter: Age (day) Value: 10
  misc_feature: MA Experiment 20000479 PARAMETER Experiment Name: Zm_Drought_P Parameter: Organism Value: Zea mays
  misc_feature: MA Experiment 20000479 PARAMETER Experiment Name: Zm_Drought_P Parameter: Plant Line Value: 35A19
  misc_feature: MA Experiment 20000479 PARAMETER Experiment Name: Zm_Drought_P Parameter: Timepoint (hr) Value: 48
  misc_feature: MA Experiment 20000479 PARAMETER Experiment Name: Zm_Drought_P Parameter: Tissue Value: Aerial
  misc_feature: MA Experiment 20000479 PARAMETER Experiment Name: Zm_Drought_P Parameter: Treatment Value: Drought vs. No Drought
  misc_feature: MA Experiment ID: 20000492 Result: Up-regulated in Transcription
  misc_feature: MA Experiment 20000492 PARAMETER Experiment Name: Zm_Hybrid_Seed_Dev_P Parameter: DAP Value: 12
  misc_feature: MA Experiment 20000492 PARAMETER Experiment Name: Zm_Hybrid_Seed_Dev_P Parameter: Organism Value: Zea mays
  misc_feature: MA Experiment 20000492 PARAMETER Experiment Name: Zm_Hybrid_Seed_Dev_P Parameter: Plant Line Value: 35A19
  misc_feature: MA Experiment 20000492 PARAMETER Experiment Name: Zm_Hybrid_Seed_Dev_P Parameter: Tissue Value: Fert Kernel vs. Unfert Floret
  misc_feature: MA Experiment ID: 20000535 Result: Up-regulated in Transcription
  misc_feature: MA Experiment 20000535 PARAMETER Experiment Name: Zm_Hybrid_Seed_Dev_P Parameter: DAP Value: 30 vs. 12
  misc_feature: MA Experiment 20000535 PARAMETER Experiment Name: Zm_Hybrid_Seed_Dev_P Parameter: Organism Value: Zea mays
  misc_feature: MA Experiment 20000535 PARAMETER Experiment Name: Zm_Hybrid_Seed_Dev_P Parameter: Plant Line Value: 35A19
  misc_feature: MA Experiment 20000535 PARAMETER Experiment Name: Zm_Hybrid_Seed_Dev_P Parameter: Tissue Value: Embryo vs. Unfert Floret
  misc_feature: MA Experiment ID: 20000632 Result: Down-regulated in Transcription
  misc_feature: MA Experiment 20000632 PARAMETER Experiment Name: Zm_Herbicide-Treatments_P Parameter: Timepoint (hr) Value: 4
  misc_feature: MA Experiment 20000632 PARAMETER Experiment Name: Zm_Herbicide-Treatments_P Parameter: Tissue Value: Aerial
  misc_feature: MA Experiment 20000632 PARAMETER Experiment Name: Zm_Herbicide-Treatments_P Parameter: Treatment Value: Glean vs. No Treatment
aagtgacattcggtgtaaactcaaacatgtgttcagttcccacttgagcttcttggttgcaatggcactgccattcatggtatgaacaatagatcctggtttcagaagatgcatataccgagacatctacaagctcacctcctgcgcaagaatcctcttacttaccaccgtagtttcaaaaaagacatttcaagccccaactccgtcctggagccacatagtgaagagctccacaagatacatcttggtctttcctctggtgtggaggatgcaacaaaatgggagcatataaacataaagagcatagaaccagatggtgcctatgtgattgctagccaactaaatctcgttgaggaacagcaagggggcagctatgttgctagccttgagttggagcttcagcaggcacgggatagagtgagcaagctagaagctgaacggctttcagccaagaagcaactgaatcacttgttcaagaaacttgcagaggagaaagcagcttggcggaacagagagcacaagaaagttcaagccattcttgaagatatgaaggctgatctggagcatgagaaaaagaaccggaggcagttggagactattaacttcaagcttgttgatgagttgaaagaggtcaaaatggccgcgaagcagctattgcaagagtatgacaacgagcagaagacgcgggaactcacggatgaggtgtgcaacaagctagtgagggagatagaggaacacaagtcagagatcgaagccttgaagcaggattctgtcaaactacgcggcgacctggatgaggataggaaattgctacagatggctgaggtgtggcgtgaggagcgagtgcagatgaaacttgtcgatgccaagctcattcttgaggccaaacatgaacagttgagcaaactgcaggaggaggtggaggctttcatttcgactttcagctcttccaaaggagacagcacaattgttgaagccgcacacaacattgtacaggccattgggtcggccagagaccaagaggttgaattcacatatgagccaccaagagcatcagaagatatactggccatctttgaagagctacgcccaagtgaagagatggagaaaaaggaaaccgaaccatgcctaaagcaagaaatccaagaagctagcccaacagctgatatatttctggaaaatcgagccagattgttcccagatggaagccattctgatgagagcgataaggaagatggaagcagctgggagaccatgagccatgaagagatgcaaggctcaagccattcgccgtatgaaagtgaacattcagtcaacaagatctttgacagaatttcgtggaccagtggaaacgattctgagggtgagcaggccaacaaactgtgtgatgacttgagcagtgtgtacctgacggacatggaacagtccaagaagaaagagtccgccatatcaaagctgtggaagtcatctccactgaaaaactgtgaattccgtacaaaagatgttgcggatatgataaatgggagattatcaagtgcaagtcttccaaatggtgtgtactctactgccaaaggcttgaatctagatatgggggacagcacccctagcaccacgcaatggagctcaccggattcgatgaacagccagctcaaccggggtttcagaggttgcatggagatggttcagaggcagagcctgaaggcgaagctccttgaagctcggatggagagccagaagattcagctccgccatgtgctcaaccagaaaacttaagttagaacctcactgtgtcgaaataaaattccaagcattggatttattacatttcccttgtccattgtagtatgtagcttagtctcatgtgtttctgcttcatagaactatatagctagctatagccttgtaggctgacctggccatggttgatgcagctgtctaattgtggcagtacatttgacaggttatgtgcccgtctttatgtgtaatgtggcagtaaactgtaaaccagaagcattattcag

SEQ ID NO: 13474 - protein, 563 aa, Zea mays subsp. mays
  peptide (1)..(563): Ceres Seq. ID no. 12363213
  misc_feature (34)..(563): Pfam Name: Myosin tail Pfam Description: Myosin tail
  misc_feature (11)..(563): Homolog of NCBI NO: 40253811 NR Description: hypothetical protein [Oryza sativa (japonica group)] >gi|40253851|dbj|BAD05787.1| hypothetical protein [Oryza
  misc_feature (1)..(562): Homolog of NCBI NO: 38344183 NR Description: OSJNBa0053K19.22 [Oryza sativa (japonica
  misc_feature (25)..(562): Homolog of NCBI NO: 15231114 NR Description: unknown protein; protein id: At3g20350.1
  misc_feature (61)..(562): Homolog of NCBI NO: 9294553 NR Description: gb|AAF00675.1~gene_id:MQC12.10~similar to unknown
  misc_feature (25)..(485): Homolog of NCBI NO: 15223613 NR Description: unknown protein; protein id: At1g50660.1
  misc_feature (132)..(305): Homolog of NCBI NO: 29367527 NR Description: unknown [Oryza sativa (japonica cultivar-group)]
  misc_feature (97)..(286): Homolog of NCBI NO: 15724288 NR Description: AT3g11590/F24K9_26 [Arabidopsis thaliana]
  misc_feature (97)..(284): Homolog of NCBI NO: 18399293 NR Description: expressed protein; protein id: At3g11590.1, by cDNA: gi_15724287 [Arabidopsis thaliana]
  misc_feature (97)..(302): Homolog of NCBI NO: 38346645 NR Description: OSJNBa0072D21.15 [Oryza sativa (japonica
  misc_feature (136)..(366): Homolog of NCBI NO: 34394172 NR Description: hypothetical protein [Oryza sativa (japonica
MNNRSWFQKMHIPRHLQAHLLRKNPLTYHRSFKKDISSPNSVLEPHSEELHKIHLGLSSGVEDATKWEHINIKSIEPDGAYVIASQLNLVEEQQGGSYVASLELELQQARDRVSKLEAERLSAKKQLNHLFKKLAEEKAAWRNREHKKVQAILEDMKADLEHEKKNRRQLETINFKLVDELKEVKMAAKQLLQEYDNEQKTRELTDEVCNKLVREIEEHKSEIEALKQDSVKLRGDLDEDRKLLQMAEVWREERVQMKLVDAKLILEAKHEQLSKLQEEVEAFISTFSSSKGDSTIVEAAHNIVQAIGSARDQEVEFTYEPPRASEDILAIFEELRPSEEMEKKETEPCLKQEIQEASPTADIFLENRARLFPDGSHSDESDKEDGSSWETMSHEEMQGSSHSPYESEHSVNKIFDRISWTSGNDSEGEQANKLCDDLSSVYLTDMEQSKKKESAISKLWKSSPLKNCEFRTKDVADMINGRLSSASLPNGVYSTAKGLNLDMGDSTPSTTQWSSPDSMNSQLNRGFRGCMEMVQRQSLKAKLLEARMESQKIQLRHVLNQKT

SEQ ID NO: 13475 - protein, 554 aa, Zea mays subsp. mays
  peptide (1)..(554): Ceres Seq. ID no. 12363214
  misc_feature (25)..(554): Pfam Name: Myosin tail Pfam Description: Myosin tail
  misc_feature (16)..(476): Homolog of NCBI NO: 15223613 NR Description: unknown protein; protein id: At1g50660.1
  misc_feature (123)..(296): Homolog of NCBI NO: 29367527 NR Description: unknown [Oryza sativa (japonica cultivar-group)]
  misc_feature (88)..(277): Homolog of NCBI NO: 15724288 NR Description: AT3g11590/F24K9_26 [Arabidopsis thaliana]
  misc_feature (2)..(554): Homolog of NCBI NO: 40253811 NR Description: hypothetical protein [Oryza sativa (japonica group)] >gi|40253851|dbj|BAD05787.1| hypothetical protein [Oryza
  misc_feature (16)..(553): Homolog of NCBI NO: 15231114 NR Description: unknown protein; protein id: At3g20350.1
  misc_feature (52)..(553): Homolog of NCBI NO: 9294553 NR Description: gb|AAF00675.1~gene_id:MQC12.10~similar to unknown
  misc_feature (1)..(553): Homolog of NCBI NO: 38344183 NR Description: OSJNBa0053K19.22 [Oryza sativa (japonica
  misc_feature (88)..(275): Homolog of NCBI NO: 18399293 NR Description: expressed protein; protein id: At3g11590.1, by cDNA: gi_15724287 [Arabidopsis thaliana]
  misc_feature (88)..(293): Homolog of NCBI NO: 38346645 NR Description: OSJNBa0072D21.15 [Oryza sativa (japonica
  misc_feature (127)..(357): Homolog of NCBI NO: 34394172 NR Description: hypothetical protein [Oryza sativa (japonica
MHIPRHLQAHLLRKNPLTYHRSFKKDISSPNSVLEPHSEELHKIHLGLSSGVEDATKWEHINIKSIEPDGAYVIASQLNLVEEQQGGSYVASLELELQQARDRVSKLEAERLSAKKQLNHLFKKLAEEKAAWRNREHKKVQAILEDMKADLEHEKKNRRQLETINFKLVDELKEVKMAAKQLLQEYDNEQKTRELTDEVCNKLVREIEEHKSEIEALKQDSVKLRGDLDEDRKLLQMAEVWREERVQMKLVDAKLILEAKHEQLSKLQEEVEAFISTFSSSKGDSTIVEAAHNIVQAIGSARDQEVEFTYEPPRASEDILAIFEELRPSEEMEKKETEPCLKQEIQEASPTADIFLENRARLFPDGSHSDESDKEDGSSWETMSHEEMQGSSHSPYESEHSVNKIFDRISWTSGNDSEGEQANKLCDDLSSVYLTDMEQSKKKESAISKLWKSSPLKNCEFRTKDVADMINGRLSSASLPNGVYSTAKGLNLDMGDSTPSTTQWSSPDSMNSQLNRGFRGCMEMVQRQSLKAKLLEARMESQKIQLRHVLNQKT

SEQ ID NO: 13476 - protein, 408 aa, Zea mays subsp. mays
  peptide (1)..(408): Ceres Seq. ID no. 12363215
  misc_feature (1)..(408): Pfam Name: Myosin tail Pfam Description: Myosin tail
  misc_feature (1)..(408): Homolog of NCBI NO: 40253811 NR Description: hypothetical protein [Oryza sativa (japonica group)] >gi|40253851|dbj|BAD05787.1| hypothetical protein [Oryza
  misc_feature (1)..(407): Homolog of NCBI NO: 38344183 NR Description: OSJNBa0053K19.22 [Oryza sativa (japonica
  misc_feature (1)..(407): Homolog of NCBI NO: 15231114 NR Description: unknown protein; protein id: At3g20350.1
  misc_feature (1)..(407): Homolog of NCBI NO: 9294553 NR Description: gb|AAF00675.1~gene_id:MQC12.10~similar to unknown
  misc_feature (1)..(330): Homolog of NCBI NO: 15223613 NR Description: unknown protein; protein id: At1g50660.1
  misc_feature (1)..(150): Homolog of NCBI NO: 29367527 NR Description: unknown [Oryza sativa (japonica cultivar-group)]
  misc_feature (1)..(131): Homolog of NCBI NO: 15724288 NR Description: AT3g11590/F24K9_26 [Arabidopsis thaliana]
  misc_feature (1)..(129): Homolog of NCBI NO: 18399293 NR Description: expressed protein; protein id: At3g11590.1, by cDNA: gi_15724287 [Arabidopsis thaliana]
  misc_feature (1)..(147): Homolog of NCBI NO: 38346645 NR Description: OSJNBa0072D21.15 [Oryza sativa (japonica
  misc_feature (1)..(211): Homolog of NCBI NO: 34394172 NR Description: hypothetical protein [Oryza sativa (japonica
MKADLEHEKKNRRQLETINFKLVDELKEVKMAAKQLLQEYDNEQKTRELTDEVCNKLVREIEEHKSEIEALKQDSVKLRGDLDEDRKLLQMAEVWREERVQMKLVDAKLILEAKHEQLSKLQEEVEAFISTFSSSKGDSTIVEAAHNIVQAIGSARDQEVEFTYEPPRASEDILAIFEELRPSEEMEKKETEPCLKQEIQEASPTADIFLENRARLFPDGSHSDESDKEDGSSWETMSHEEMQGSSHSPYESEHSVNKIFDRISWTSGNDSEGEQANKLCDDLSSVYLTDMEQSKKKESAISKLWKSSPLKNCEFRTKDVADMINGRLSSASLPNGVYSTAKGLNLDMGDSTPSTTQWSSPDSMNSQLNRGFRGCMEMVQRQSLKAKLLEARMESQKIQLRHVLNQKT

SEQ ID NO: 13477 - DNA, 1655 bp, Zea mays subsp. mays
  misc_feature (1)..(1655): Ceres Seq. ID no. 12363163
  misc_feature: MA Experiment ID: 108522 Result: Up-regulated in Transcription
  misc_feature: MA Experiment 108522 PARAMETER Experiment Name: Zm_42deg_Heat_P Parameter: Age (day) Value: 8
  misc_feature: MA Experiment 108522 PARAMETER Experiment Name: Zm_42deg_Heat_P Parameter: Organism Value: Zea mays
  misc_feature: MA Experiment 108522 PARAMETER Experiment Name: Zm_42deg_Heat_P Parameter: Plant Line Value: 35A19
  misc_feature: MA Experiment 108522 PARAMETER Experiment Name: Zm_42deg_Heat_P Parameter: Temperature (deg C) Value: 42 vs. 22
  misc_feature: MA Experiment 108522 PARAMETER Experiment Name: Zm_42deg_Heat_P Parameter: Timepoint (hr) Value: 1
  misc_feature: MA Experiment 108522 PARAMETER Experiment Name: Zm_42deg_Heat_P Parameter: Tissue Value: Aerial
  misc_feature: MA Experiment ID: 108523 Result: Up-regulated in Transcription
  misc_feature: MA Experiment 108523 PARAMETER Experiment Name: Zm_42deg_Heat_P Parameter: Age (day) Value: 8
  misc_feature: MA Experiment 108523 PARAMETER Experiment Name: Zm_42deg_Heat_P Parameter: Organism Value: Zea mays
  misc_feature: MA Experiment 108523 PARAMETER Experiment Name: Zm_42deg_Heat_P Parameter: Plant Line Value: 35A19
  misc_feature: MA Experiment 108523 PARAMETER Experiment Name: Zm_42deg_Heat_P Parameter: Temperature (deg C) Value: 42 vs. 22
  misc_feature: MA Experiment 108523 PARAMETER Experiment Name: Zm_42deg_Heat_P Parameter: Timepoint (hr) Value: 6
  misc_feature: MA Experiment 108523 PARAMETER Experiment Name: Zm_42deg_Heat_P Parameter: Tissue Value: Aerial
  misc_feature: MA Experiment ID: 108528 Result: Up-regulated in Transcription
  misc_feature: MA Experiment 108528 PARAMETER Experiment Name: Zm_Imbibed_Seeds_P Parameter: Age (day) Value: 5 vs. 2
  misc_feature: MA Experiment 108528 PARAMETER Experiment Name: Zm_Imbibed_Seeds_P Parameter: Organism Value: Zea mays
  misc_feature: MA Experiment 108528 PARAMETER Experiment Name: Zm_Imbibed_Seeds_P Parameter: Plant Line Value: 35A19
  misc_feature: MA Experiment 108528 PARAMETER Experiment Name: Zm_Imbibed_Seeds_P Parameter: Tissue Value: Aerial vs. Embryo
  misc_feature: MA Experiment ID: 108529 Result: Up-regulated in Transcription
  misc_feature: MA Experiment 108529 PARAMETER Experiment Name: Zm_Imbibed_Seeds_P Parameter: Age (day) Value: 5 vs. 2
  misc_feature: MA Experiment 108529 PARAMETER Experiment Name: Zm_Imbibed_Seeds_P Parameter: Organism Value: Zea mays
  misc_feature: MA Experiment 108529 PARAMETER Experiment Name: Zm_Imbibed_Seeds_P Parameter: Plant Line Value: 35A19
  misc_feature: MA Experiment 108529 PARAMETER Experiment Name: Zm_Imbibed_Seeds_P Parameter: Tissue Value: Roots vs. Embryo
  misc_feature: MA Experiment ID: 108530 Result: Up-regulated in Transcription
  misc_feature: MA Experiment 108530 PARAMETER Experiment Name: Zm_Imbibed_Seeds_P Parameter: Age (day) Value: 6 vs. 2
  misc_feature: MA Experiment 108530 PARAMETER Experiment Name: Zm_Imbibed_Seeds_P Parameter: Organism Value: Zea mays
  misc_feature: MA Experiment 108530 PARAMETER Experiment Name: Zm_Imbibed_Seeds_P Parameter: Plant Line Value: 35A19
  misc_feature: MA Experiment 108530 PARAMETER Experiment Name: Zm_Imbibed_Seeds_P Parameter: Tissue Value: Aerial vs. Embryo
  misc_feature: MA Experiment ID: 108536 Result: Up-regulated in Transcription
  misc_feature: MA Experiment 108536 PARAMETER Experiment Name: Zm_Meristem_P Parameter: Age (day) Value: 8
  misc_feature: MA Experiment 108536 PARAMETER Experiment Name: Zm_Meristem_P Parameter: Organism Value: Zea mays
  misc_feature: MA Experiment 108536 PARAMETER Experiment Name: Zm_Meristem_P Parameter: Plant Line Value: 35A19
  misc_feature: MA Experiment 108536 PARAMETER Experiment Name: Zm_Meristem_P Parameter: Tissue Value: Shoot Meristem vs. Above Shoot Meristem
  misc_feature: MA Experiment ID: 108543 Result: Down-regulated in Transcription
  misc_feature: MA Experiment ID: 108544 Result: Up-regulated in Transcription
  misc_feature: MA Experiment ID: 108547 Result: Up-regulated in Transcription
  misc_feature: MA Experiment 108547 PARAMETER Experiment Name: Zm_Imbibed_Seeds_P Parameter: Age (day) Value: 4 vs. 2
  misc_feature: MA Experiment 108547 PARAMETER Experiment Name: Zm_Imbibed_Seeds_P Parameter: Organism Value: Zea mays
  misc_feature: MA Experiment 108547 PARAMETER Experiment Name: Zm_Imbibed_Seeds_P Parameter: Plant Line Value: 35A19
  misc_feature: MA Experiment 108547 PARAMETER Experiment Name: Zm_Imbibed_Seeds_P Parameter: Tissue Value: Aerial vs. Embryo
  misc_feature: MA Experiment ID: 108688 Result: Down-regulated in Transcription
  misc_feature: MA Experiment 108688 PARAMETER Experiment Name: Zm_Embryos-Flowers__P Parameter: Tissue Value: Immature Flowers vs. Aerial+
gcacgagaccattacctagaacatcctaatcgaaaaatcctgatccgctcgctcccaaatcctactgccgtgcgcgtcccgctcctgcggctgcgccccccgcgaggagaaagccggttagccacagccccacacgcgcgcatcacgccacaaccacaccacacggcaccagcctcctccgtcgtcaccgcctcgggcctcggccgatcgatcgggtctggcggcggccacaagcgtcgctgtttaataaatagccctgagcggcctccccctgcccctcagttcagcctcggctggacatcgagtttgtaccgggaaacagcttggtagtataaccactgaagatggtcagtgggaggccgcatggtgaattggactcatggttcaagagcctcatggtgacctctagcagcgagagggggcaggctgggagtggtggtccagcgccaacattaacaggatggaaggaccttccgatggagctcctggtgcggataatatccacagttggagatgataggatggtcatcgtggcgtctggtgtttgcacaggctggcgtgacgcgctgggatggggggtcactaatctttcacttacatggtgcaaactgagcatgaataatttaatgatatctcttgcccacaagttcacgaagttgcaagttctcactctccggcaaaacaaacctcagcttgaagacagtgccgtagaggctgttgccaactactgccatgacctacgtgagttagacctcagcagaagcttcaggcttagtgaccgctccttgtatgcgctggcccatggatgcccacggcttacaagactgaacattagtggatgttccagtttcagcgacactgcgttgatttaccttacctgccgctgtaaaaacctcaagtgcctgaacttgtgtggatgcgtgaaggctgttactgacagagctttgcaggctattgctcagaactgtgggcagctgcagtctttgaacctaggctggtgtgatgatgttacagataagggagtgaccagcttagcgtcaggatgccctgatctcagagccgtagactcgtgcggttgtgttcttataacagatgagagtgtggttgctcttgccaacggatgtccgcacctgcgctcgctgggcctctacttctgccagaacatcacggaccgcgccatgtactccctcgcaaacagccgcgtgaagagcaagcgtgggaggtgggatgcagtgaaagacgggctcgcgaacctcaacatcagccagtgcaccgccctgacgcccccggcggtgcaggccgtctgcgactccttcccggcgctgcacacctgccccgagaggcactccctcatcatcagtggctgcctcagcctcacgtcagtccactgcgcctgcgccctccacccacaccgtgccgggagagccctgatggccaaccatgcgtactaataaacatgttggtggctttgcgctgatagttctcgcgaatggggacgcatgcctggggggtgatggcgtcgtccaggtgtagaggaagctccctgtgtacataaactcgaaacttggcggtgtgataaggcactgctgtggtaggactttgtgtgataatcatggagtggcgaatttctagagaatggcatgtactccagtgct

SEQ ID NO: 13478 - protein, 368 aa, Zea mays subsp. mays
  peptide (1)..(368): Ceres Seq. ID no. 12363164
  misc_feature (8)..(368): Homolog of NCBI NO: 34907434 NR Description: P0018C10.44 [Oryza sativa (japonica
  misc_feature (40)..(362): Homolog of NCBI NO: 18394987 NR Description: F-box protein family; protein id: At1g21410.1, by cDNA: 19486., supported by cDNA: gi_16604365, supported by gi_19699205 [Arabidopsis thaliana] >gi|25518370|pir||B86347
  misc_feature (40)..(362): Homolog of NCBI NO: 21554029 NR Description: F-box protein AtFBL5 [Arabidopsis thaliana]
  misc_feature (37)..(357): Homolog of NCBI NO: 18411319 NR Description: F-box protein family, AtFBL5; protein id: supported by cDNA: 3549. [Arabidopsis thaliana]
  misc_feature (229)..(357): Homolog of NCBI NO: 26450797 NR Description: unknown protein [Arabidopsis thaliana]
  misc_feature (105)..(286): Homolog of NCBI NO: 7512791 NR Description: hypothetical protein DKFZp564P0622.1 - human
  misc_feature (76)..(285): Homolog of NCBI NO: 12848653 NR Description: unnamed protein product [Mus musculus]
  misc_feature (84)..(349): Homolog of NCBI NO: 37590914 NR Description: Unknown (protein for MGC:73374) [Danio rerio]
  misc_feature (76)..(285): Homolog of NCBI NO: 38503178 NR Description: F-box/LRR-repeat protein 2-like
  misc_feature (76)..(285): Homolog of NCBI NO: 27734755 NR Description: hypothetical protein MGC15482 [Homo sapiens]
MVSGRPHGELDSWFKSLMVTSSSERGQAGSGGPAPTLTGWKDLPMELLVRIISTVGDDRMVIVASGVCTGWRDALGWGVTNLSLTWCKLSMNNLMISLAHKFTKLQVLTLRQNKPQLEDSAVEAVANYCHDLRELDLSRSFRLSDRSLYALAHGCPRLTRLNISGCSSFSDTALIYLTCRCKNLKCLNLCGCVKAVTDRALQAIAQNCGQLQSLNLGWCDDVTDKGVTSLASGCPDLRAVDSCGCVLITDESVVALANGCPHLRSLGLYFCQNITDRAMYSLANSRVKSKRGRWDAVKDGLANLNISQCTALTPPAVQAVCDSFPALHTCPERHSLIISGCLSLTSVHCACALHPHRAGRALMANHAY

SEQ ID NO: 13479 - protein, 351 aa, Zea mays subsp. mays
  peptide (1)..(351): Ceres Seq. ID no. 12363165
  misc_feature (1)..(351): Homolog of NCBI NO: 34907434 NR Description: P0018C10.44 [Oryza sativa (japonica
  misc_feature (23)..(345): Homolog of NCBI NO: 18394987 NR Description: F-box protein family; protein id: At1g21410.1, by cDNA: 19486., supported by cDNA: gi_16604365, supported by gi_19699205 [Arabidopsis thaliana] >gi|25518370|pir||B86347
  misc_feature (23)..(345): Homolog of NCBI NO: 21554029 NR Description: F-box protein AtFBL5 [Arabidopsis thaliana]
  misc_feature (20)..(340): Homolog of NCBI NO: 18411319 NR Description: F-box protein family, AtFBL5; protein id: supported by cDNA: 3549. [Arabidopsis thaliana]
  misc_feature (212)..(340): Homolog of NCBI NO: 26450797 NR Description: unknown protein [Arabidopsis thaliana]
  misc_feature (88)..(269): Homolog of NCBI NO: 7512791 NR Description: hypothetical protein DKFZp564P0622.1 - human
  misc_feature (59)..(268): Homolog of NCBI NO: 12848653 NR Description: unnamed protein product [Mus musculus]
  misc_feature (67)..(332): Homolog of NCBI NO: 37590914 NR Description: Unknown (protein for MGC:73374) [Danio rerio]
  misc_feature (59)..(268): Homolog of NCBI NO: 38503178 NR Description: F-box/LRR-repeat protein 2-like
  misc_feature (59)..(268): Homolog of NCBI NO: 27734755 NR Description: hypothetical protein MGC15482 [Homo sapiens]
MVTSSSERGQAGSGGPAPTLTGWKDLPMELLVRIISTVGDDRMVIVASGVCTGWRDALGWGVTNLSLTWCKLSMNNLMISLAHKFTKLQVLTLRQNKPQLEDSAVEAVANYCHDLRELDLSRSFRLSDRSLYALAHGCPRLTRLNISGCSSFSDTALIYLTCRCKNLKCLNLCGCVKAVTDRALQAIAQNCGQLQSLNLGWCDDVTDKGVTSLASGCPDLRAVDSCGCVLITDESVVALANGCPHLRSLGLYFCQNITDRAMYSLANSRVKSKRGRWDAVKDGLANLNISQCTALTPPAVQAVCDSFPALHTCPERHSLIISGCLSLTSVHCACALHPHRAGRALMANHAY

SEQ ID NO: 13480 - protein, 324 aa, Zea mays subsp. mays
  peptide (1)..(324): Ceres Seq. ID no. 12363166
  misc_feature (1)..(324): Homolog of NCBI NO: 34907434 NR Description: P0018C10.44 [Oryza sativa (japonica
  misc_feature (1)..(318): Homolog of NCBI NO: 18394987 NR Description: F-box protein family; protein id: At1g21410.1, by cDNA: 19486., supported by cDNA: gi_16604365, supported by gi_19699205 [Arabidopsis thaliana] >gi|25518370|pir||B86347
  misc_feature (1)..(318): Homolog of NCBI NO: 21554029 NR Description: F-box protein AtFBL5 [Arabidopsis thaliana]
  misc_feature (1)..(313): Homolog of NCBI NO: 18411319 NR Description: F-box protein family, AtFBL5; protein id: supported by cDNA: 3549. [Arabidopsis thaliana]
  misc_feature (185)..(313): Homolog of NCBI NO: 26450797 NR Description: unknown protein [Arabidopsis thaliana]
  misc_feature (61)..(242): Homolog of NCBI NO: 7512791 NR Description: hypothetical protein DKFZp564P0622.1 - human
  misc_feature (32)..(241): Homolog of NCBI NO: 12848653 NR Description: unnamed protein product [Mus musculus]
  misc_feature (40)..(305): Homolog of NCBI NO: 37590914 NR Description: Unknown (protein for MGC:73374) [Danio rerio]
  misc_feature (32)..(241): Homolog of NCBI NO: 38503178 NR Description: F-box/LRR-repeat protein 2-like
  misc_feature (32)..(241): Homolog of NCBI NO: 27734755 NR Description: hypothetical protein MGC15482 [Homo sapiens]
MELLVRIISTVGDDRMVIVASGVCTGWRDALGWGVTNLSLTWCKLSMNNLMISLAHKFTKLQVLTLRQNKPQLEDSAVEAVANYCHDLRELDLSRSFRLSDRSLYALAHGCPRLTRLNISGCSSFSDTALIYLTCRCKNLKCLNLCGCVKAVTDRALQAIAQNCGQLQSLNLGWCDDVTDKGVTSLASGCPDLRAVDSCGCVLITDESVVALANGCPHLRSLGLYFCQNITDRAMYSLANSRVKSKRGRWDAVKDGLANLNISQCTALTPPAVQAVCDSFPALHTCPERHSLIISGCLSLTSVHCACALHPHRAGRALMANHAY

SEQ ID NO: 13481 - DNA, 1809 bp, Zea mays subsp. mays
  misc_feature (1)..(1809): Ceres Seq. ID no. 12342466
  misc_feature: MA Experiment ID: 20000488 Result: Down-regulated in Transcription
  misc_feature: MA Experiment 20000488 PARAMETER Experiment Name: Zm_50mM_NH4NO3_L_to_H_P Parameter: Organism Value: Zea mays
  misc_feature: MA Experiment 20000488 PARAMETER Experiment Name: Zm_50mM_NH4NO3_L_to_H_P Parameter: Timepoint (hr) Value: 8
  misc_feature: MA Experiment 20000488 PARAMETER Experiment Name: Zm_50mM_NH4NO3_L_to_H_P Parameter: Tissue Value: Leaves
  misc_feature: MA Experiment 20000488 PARAMETER Experiment Name: Zm_50mM_NH4NO3_L_to_H_P Parameter: Treatment Value: 50mM NH4NO3 vs. 100mM Mannitol
  misc_feature: MA Experiment ID: 20001608 Result: Down-regulated in Transcription
  misc_feature: MA Experiment 20001608 PARAMETER Experiment Name: Zm_50ppm_KNO3_L-to-H_P Parameter: Age (day) Value: 21
  misc_feature: MA Experiment 20001608 PARAMETER Experiment Name: Zm_50ppm_KNO3_L-to-H_P Parameter: Organism Value: Zea mays
  misc_feature: MA Experiment 20001608 PARAMETER Experiment Name: Zm_50ppm_KNO3_L-to-H_P Parameter: Plant Line Value: 35A19
  misc_feature: MA Experiment 20001608 PARAMETER Experiment Name: Zm_50ppm_KNO3_L-to-H_P Parameter: Timepoint (hr) Value: 48
  misc_feature: MA Experiment 20001608 PARAMETER Experiment Name: Zm_50ppm_KNO3_L-to-H_P Parameter: Tissue Value: Shoots
  misc_feature: MA Experiment 20001608 PARAMETER Experiment Name: Zm_50ppm_KNO3_L-to-H_P Parameter: Treatment Value: 50ppm KNO3 vs. 50ppm KCl
agtctcggcaatgatgctcctctgattctccccacccgtggctgcgcccatccgtctacaagtaccacctggccgcgcggttggttccaatttccagacggcagtccactggtttttgcttgcatatcctttgtttaggccagagttgagttgtgttccaacttccaagtcttgggttgcggaatcgccggcctcgctcaatcgatggaaaaccataatccattacattctcagattgctgaagtgaaaatggacatctcagcatcagcttctgttgcatcagggaacaaattctgcaagggtggtgcctgtgatttctctgattccagtaactcctcgaaagatgccaaggagagatccacgtccatgaggaagcttataatcgcagtgatcctttgcatcatattcatgacggtggaagtggtcgggggcatcaaagcaaacagtcttgccatcttaactgatgcggcgcaccttctttctgatgtggcagcatttgccatatcgttattctctctctgggctgctggatgggaagcaacaccgcagcagtcatatgggttcttccggattgagattcttggtgccttggtctccattcagctcatatggctacttgctggcatactggtatatgaggctattgtaaggctcattaacgagagtggcgatgtgcagggctccctcatgtttgctgtgtcggcgtttggactgtttgtcaacattataatggctgtattgctaggccatgaccacgggcacggccatggacacagccatggacatccacatgaccatggtcatggtgattcagacgatggccattctcaccatgaagaaccagaacagggccatgttcatcatcatgagcatagccatggaagttctattactgtcacaacacatcaccaccaccactcaggcactggacaacaccatgacgctgaggagccactgatcaagcacgaggccgactgtgagggcacccaatctgctgctaagaagcctcgacgcaatataaacgtacacagcgcttaccttcatgtgcttggggactccatccagagcatcggggtgatgatcggcggggctatcatctggtacaagcccgagtggaaaatcatcgatctgatctgcaccctcatcttctcggtggtcgtgctgttcaccacgatcaggatgctgcgcaacatcctcgaggtcctgatggagagcacgccccgtgagatcgacgccaccaggctggagagggggctctgcgagatggaaggcgtggttgccgtccacgagctgcatatctgggccatcacagtggggaaggtgctactggcttgccatgtgacggtcgccagggaagccgacgcagacgagatccttgacaaggtgattgggtacatcaagacggagtacaacatcagccatgtgaccattcaggtcgagcgtgaatagagggggagctgtcttttgggctgtcagggcataaatggcgtcacgccttcactggttatcttactctgtcggttaaaacttttttttggcacctgggaaggcatcaggcagccatcggagtcttgatgtgcttgcaagttcatctgtggttcaagctttgatggtcagtagtgttatctgttactactagtctattaggcgggggtaggcgtcaaccagtgtgtacgggtttgattttcggtcatgctgttaacagcattgcggttcgtcgaactggatatgtagtttagtacgctgtgtcatcacctcttgtgtaagggaacgcttcttttctgtggtatggaagatgtgaacttcgtg

SEQ ID NO: 13482 - protein, 414 aa, Zea mays subsp. mays
  peptide (1)..(414): Ceres Seq. ID no. 12342467
  misc_feature (58)..(413): Pfam Name: Cation efflux family Pfam Description: Cation efflux family
  misc_feature (1)..(414): Homolog of NCBI NO: 30420736 NR Description: zinc transporter [Oryza sativa (japonica
  misc_feature (1)..(414): Homolog of NCBI NO: 16550925 NR Description: zinc transporter [Eucalyptus grandis]
  misc_feature (1)..(413): Homolog of NCBI NO: 15226441 NR Description: putative zinc transporter; protein id: supported by cDNA: 207558., supported by cDNA: gi_4206639
  misc_feature (1)..(413): Homolog of NCBI NO: 40287446 NR Description: heavy metal transporter MTP1 [Arabis shortii]
  misc_feature (1)..(413): Homolog of NCBI NO: 40287442 NR Description: heavy metal transporter MTP1 [Thlaspi arvense]
  misc_feature (1)..(413): Homolog of NCBI NO: 4206640 NR Description: zinc transporter ZAT [Arabidopsis thaliana]
  misc_feature (1)..(202): Homolog of NCBI NO: 40287448 NR Description: heavy metal transporter MTP2 [Arabis shortii]
  misc_feature (216)..(413): Homolog of NCBI NO: 40287448 NR Description: heavy metal transporter MTP2 [Arabis shortii]
  misc_feature (1)..(413): Homolog of NCBI NO: 40287444 NR Description: heavy metal transporter MTP1 [Thlaspi
  misc_feature (9)..(413): Homolog of NCBI NO: 14582253 NR Description: zinc transporter [Thlaspi caerulescens]
MENHNPLHSQIAEVKMDISASASVASGNKFCKGGACDFSDSSNSSKDAKERSTSMRKLIIAVILCIIFMTVEVVGGIKANSLAILTDAAHLLSDVAAFAISLFSLWAAGWEATPQQSYGFFRIEILGALVSIQLIWLLAGILVYEAIVRLINESGDVQGSLMFAVSAFGLFVNIIMAVLLGHDHGHGHGHSHGHPHDHGHGDSDDGHSHHEEPEQGHVHHHEHSHGSSITVTTHHHHHSGTGQHHDAEEPLIKHEADCEGTQSAAKKPRRNINVHSAYLHVLGDSIQSIGVMIGGAIIWYKPEWKIIDLICTLIFSVVVLFTTIRMLRNILEVLMESTPREIDATRLERGLCEMEGVVAVHELHIWAITVGKVLLACHVTVAREADADEILDKVIGYIKTEYNISHVTIQVERE

SEQ ID NO: 13483 - protein, 399 aa, Zea mays subsp. mays
  peptide (1)..(399): Ceres Seq. ID no. 12342468
  misc_feature (43)..(398): Pfam Name: Cation efflux family Pfam Description: Cation efflux family
  misc_feature (1)..(399): Homolog of NCBI NO: 30420736 NR Description: zinc transporter [Oryza sativa (japonica
  misc_feature (1)..(399): Homolog of NCBI NO: 16550925 NR Description: zinc transporter [Eucalyptus grandis]
  misc_feature (1)..(398): Homolog of NCBI NO: 15226441 NR Description: putative zinc transporter; protein id: supported by cDNA: 207558., supported by cDNA: gi_4206639
  misc_feature (1)..(398): Homolog of NCBI NO: 40287446 NR Description: heavy metal transporter MTP1 [Arabis shortii]
  misc_feature (1)..(398): Homolog of NCBI NO: 40287442 NR Description: heavy metal transporter MTP1 [Thlaspi arvense]
  misc_feature (1)..(398): Homolog of NCBI NO: 4206640 NR Description: zinc transporter ZAT [Arabidopsis thaliana]
  misc_feature (1)..(187): Homolog of NCBI NO: 40287448 NR Description: heavy metal transporter MTP2 [Arabis shortii]
  misc_feature (201)..(398): Homolog of NCBI NO: 40287448 NR Description: heavy metal transporter MTP2 [Arabis shortii]
  misc_feature (1)..(398): Homolog of NCBI NO: 40287444 NR Description: heavy metal transporter MTP1 [Thlaspi
  misc_feature (1)..(398): Homolog of NCBI NO: 14582253 NR Description: zinc transporter [Thlaspi caerulescens]
MDISASASVASGNKFCKGGACDFSDSSNSSKDAKERSTSMRKLIIAVILCIIFMTVEVVGGIKANSLAILTDAAHLLSDVAAFAISLFSLWAAGWEATPQQSYGFFRIEILGALVSIQLIWLLAGILVYEAIVRLINESGDVQGSLMFAVSAFGLFVNIIMAVLLGHDHGHGHGHSHGHPHDHGHGDSDDGHSHHEEPEQGHVHHHEHSHGSSITVTTHHHHHSGTGQHHDAEEPLIKHEADCEGTQSAAKKPRRNINVHSAYLHVLGDSIQSIGVMIGGAIIWYKPEWKIIDLICTLIFSVVVLFTTIRMLRNILEVLMESTPREIDATRLERGLCEMEGVVAVHELHIWAITVGKVLLACHVTVAREADADEILDKVIGYIKTEYNISHVTIQVERE

SEQ ID NO: 13484 - protein, 360 aa, Zea mays subsp. mays
  peptide (1)..(360): Ceres Seq. ID no. 12342469
  misc_feature (4)..(359): Pfam Name: Cation efflux family Pfam Description: Cation efflux family
  misc_feature (1)..(360): Homolog of NCBI NO: 30420736 NR Description: zinc transporter [Oryza sativa (japonica
  misc_feature (1)..(360): Homolog of NCBI NO: 16550925 NR Description: zinc transporter [Eucalyptus grandis]
  misc_feature (1)..(359): Homolog of NCBI NO: 15226441 NR Description: putative zinc transporter; protein id: supported by cDNA: 207558., supported by cDNA: gi_4206639
  misc_feature (1)..(359): Homolog of NCBI NO: 40287446 NR Description: heavy metal transporter MTP1 [Arabis shortii]
  misc_feature (1)..(359): Homolog of NCBI NO: 40287442 NR Description: heavy metal transporter MTP1 [Thlaspi arvense]
  misc_feature (1)..(359): Homolog of NCBI NO: 4206640 NR Description: zinc transporter ZAT [Arabidopsis thaliana]
  misc_feature (1)..(148): Homolog of NCBI NO: 40287448 NR Description: heavy metal transporter MTP2 [Arabis shortii]
  misc_feature (162)..(359): Homolog of NCBI NO: 40287448 NR Description: heavy metal transporter MTP2 [Arabis shortii]
  misc_feature (1)..(359): Homolog of NCBI NO: 40287444 NR Description: heavy metal transporter MTP1 [Thlaspi
  misc_feature (1)..(359): Homolog of NCBI NO: 14582253 NR Description: zinc transporter [Thlaspi caerulescens]
MRKLIIAVILCIIFMTVEVVGGIKANSLAILTDAAHLLSDVAAFAISLFSLWAAGWEATPQQSYGFFRIEILGALVSIQLIWLLAGILVYEAIVRLINESGDVQGSLMFAVSAFGLFVNIIMAVLLGHDHGHGHGHSHGHPHDHGHGDSDDGHSHHEEPEQGHVHHHEHSHGSSITVTTHHHHHSGTGQHHDAEEPLIKHEADCEGTQSAAKKPRRNINVHSAYLHVLGDSIQSIGVMIGGAIIWYKPEWKIIDLICTLIFSVVVLFTTIRMLRNILEVLMESTPREIDATRLERGLCEMEGVVAVHELHIWAITVGKVLLACHVTVAREADADEILDKVIGYIKTEYNISHVTIQVERE

SEQ ID NO: 13485 - DNA, 1493 bp, Zea mays subsp. mays
  misc_feature (1)..(1493): Ceres Seq. ID no. 12362028
  misc_feature: MA Experiment ID: 108536 Result: Up-regulated in Transcription
  misc_feature: MA Experiment 108536 PARAMETER Experiment Name: Zm_Meristem_P Parameter: Age (day) Value: 8
  misc_feature: MA Experiment 108536 PARAMETER Experiment Name: Zm_Meristem_P Parameter: Organism Value: Zea mays
  misc_feature: MA Experiment 108536 PARAMETER Experiment Name: Zm_Meristem_P Parameter: Plant Line Value: 35A19
  misc_feature: MA Experiment 108536 PARAMETER Experiment Name: Zm_Meristem_P Parameter: Tissue Value: Shoot Meristem vs. Above Shoot Meristem
  misc_feature: MA Experiment ID: 108543 Result: Up-regulated in Transcription
  misc_feature: MA Experiment ID: 108544 Result: Up-regulated in Transcription
  misc_feature: MA Experiment ID: 20000479 Result: Down-regulated in Transcription
  misc_feature: MA Experiment 20000479 PARAMETER Experiment Name: Zm_Drought_P Parameter: Age (day) Value: 10
  misc_feature: MA Experiment 20000479 PARAMETER Experiment Name: Zm_Drought_P Parameter: Organism Value: Zea mays
  misc_feature: MA Experiment 20000479 PARAMETER Experiment Name: Zm_Drought_P Parameter: Plant Line Value: 35A19
  misc_feature: MA Experiment 20000479 PARAMETER Experiment Name: Zm_Drought_P Parameter: Timepoint (hr) Value: 48
  misc_feature: MA Experiment 20000479 PARAMETER Experiment Name: Zm_Drought_P Parameter: Tissue Value: Aerial
  misc_feature: MA Experiment 20000479 PARAMETER Experiment Name: Zm_Drought_P Parameter: Treatment Value: Drought vs. No Drought
  misc_feature: MA Experiment ID: 20000492 Result: Up-regulated in Transcription
  misc_feature: MA Experiment 20000492 PARAMETER Experiment Name: Zm_Hybrid_Seed_Dev_P Parameter: DAP Value: 12
  misc_feature: MA Experiment 20000492 PARAMETER Experiment Name: Zm_Hybrid_Seed_Dev_P Parameter: Organism Value: Zea mays
  misc_feature: MA Experiment 20000492 PARAMETER Experiment Name: Zm_Hybrid_Seed_Dev_P Parameter: Plant Line Value: 35A19
  misc_feature: MA Experiment 20000492 PARAMETER Experiment Name: Zm_Hybrid_Seed_Dev_P Parameter: Tissue Value: Fert Kernel vs. Unfert Floret
  misc_feature: MA Experiment ID: 20000535 Result: Up-regulated in Transcription
  misc_feature: MA Experiment 20000535 PARAMETER Experiment Name: Zm_Hybrid_Seed_Dev_P Parameter: DAP Value: 30 vs. 12
  misc_feature: MA Experiment 20000535 PARAMETER Experiment Name: Zm_Hybrid_Seed_Dev_P Parameter: Organism Value: Zea mays
  misc_feature: MA Experiment 20000535 PARAMETER Experiment Name: Zm_Hybrid_Seed_Dev_P Parameter: Plant Line Value: 35A19
  misc_feature: MA Experiment 20000535 PARAMETER Experiment Name: Zm_Hybrid_Seed_Dev_P Parameter: Tissue Value: Embryo vs. Unfert Floret
tgaacatgaaaaaactgcatacttcagatgtggaatccgacaaccttaagaaggatccagaagaaacggattctgctttagagagctcaacagaagtcaacagccaaaaggaagcattggaagctgtgctgtttgagcgcaaaaatgaaatcgaaattctgaaaggtgcaatggcctcagctgctaagcaatttgacgttgaattggaacatcgtgatcttgaaattgataagtgcaagcatgaacttggagtactctcagagaagtatttgcatgataagtctactcttgaggatgagcttagaaagctccatggagtcatcaagaatatggaaggtgacctagaaaaaattcacaggagaaaatgcagctgcaagtctcggattaaagaacttgagcaggcagctcacagcttagaacgttcaacttccgagatagttaagctacaagaagtaataaggaatacacaagcggaattagaaaaggttacagaggataaaattgtgctcaaagaacgcgctaacgaatttgagcaacttttaagggcccttaaggtctcaggtacagaggttgcaaagctaccagaaactatcaagaacctggaagctcagctagaaagagccttagaagagaaatcaatacttcaagaccagatcaagcaggtggagcaggttatgtctgaatctttggagaaacattcacatgagcagtcctctcttgctgctgaccttttgaagttatctgaagcgaacacttcacttggaggcaaattatcctctgtggcggcagagcttgtgcaagtttatgctgataacgaagaagaatctcttgataatgagaagcaaatttctgtcctcaatcaagatattgccgatctgaggagaaagcttgaattgttatcatctgagaaagccgcagttgattatgagttggccaaactgctagctgatattacgactcgtgacgaaaagatgaagcgaatggatgaccacctaaatcagcttcagtttgagcatgccaagctgatggcagaatttgacaccgcacacaggtccttgtcagagctgtgtgcgcaggtttctgagctggaagaagaggtacagaagcagaagcttgtaatatccgagactgcagagggaaaacgagaggctatcaggcagctgtgcttctccattgaacactaccgcagcgggtatcagcagctgaggcagctgttgcaaggccacaggaggccgttggtgatggcaacctgataaagtgaacaatgctggtttgccaatgaactgcacagttgcttgtctctgggtctgttctgtttttagccttgttctttcacaacatgtgccgtgcagcatggtattaagaattttgtggtatgtgtgtagaatgcaatgggatgggatattcatgtcgttcatttacactcctgtcttttgttcttgttgcctactgttgaatgttatgatatgcttgaaccttcatctttttcagcc

SEQ ID NO: 13486 - protein, 416 aa, Zea mays subsp. mays
  peptide (1)..(416): Ceres Seq. ID no. 12362029
  misc_feature (10)..(380): Pfam Name: Plant protein of unknown function (DUF869) Pfam Description: Plant protein of unknown function (DUF869)
  misc_feature (15)..(415): Homolog of NCBI NO: 34896156 NR Description: P0701D05.33 [Oryza sativa (japonica >gi|13486675|dbj|BAB39912.1| contains EST to Arabidopsis thaliana chromosome 2, At2g30500~unknown protein
  misc_feature (79)..(415): Homolog of NCBI NO: 22002966 NR Description: putative CENP-E like kinetochore protein [Hordeum
  misc_feature (11)..(328): Homolog of NCBI NO: 22002966 NR Description: putative CENP-E like kinetochore protein [Hordeum
  misc_feature (5)..(414): Homolog of NCBI NO: 34860755 NR Description: similar to hypothetical protein [Rattus
  misc_feature (2)..(416): Homolog of NCBI NO: 15224515 NR Description: unknown protein; protein id: At2g30500.1
  misc_feature (2)..(416): Homolog of NCBI NO: 28416683 NR Description: At2g30500 [Arabidopsis thaliana]
  misc_feature (11)..(410): Homolog of NCBI NO: 15238455 NR Description: putative protein; protein id: At5g05180.1, by cDNA: 205958. [Arabidopsis thaliana] gb|AAF19561.1~gene_id:K2A11.5~similar to unknown protein
  misc_feature (4)..(282): Homolog of NCBI NO: 34860755 NR Description: similar to hypothetical protein [Rattus
  misc_feature (4)..(405): Homolog of NCBI NO: 15217624 NR Description: unknown protein; protein id: At1g64330.1
  misc_feature (8)..(404): Homolog of NCBI NO: 86355 NR Description: myosin heavy chain, fast skeletal muscle, adult
NMKKLHTSDVESDNLKKDPEETDSALESSTEVNSQKEALEAVLFERKNEIEILKGAMASAAKQFDVELEHRDLEIDKCKHELGVLSEKYLHDKSTLEDELRKLHGVIKNMEGDLEKIHRRKCSCKSRIKELEQAAHSLERSTSEIVKLQEVIRNTQAELEKVTEDKIVLKERANEFEQLLRALKVSGTEVAKLPETIKNLEAQLERALEEKSILQDQIKQVEQVMSESLEKHSHEQSSLAADLLKLSEANTSLGGKLSSVAAELVQVYADNEEESLDNEKQISVLNQDIADLRRKLELLSSEKAAVDYELAKLLADITTRDEKMKRMDDHLNQLQFEHAKLMAEFDTAHRSLSELCAQVSELEEEVQKQKLVISETAEGKREAIRQLCFSIEHYRSGYQQLRQLLQGHRRPLVMAT

SEQ ID NO: 13487 - protein, 415 aa, Zea mays subsp. mays
  peptide (1)..(415): Ceres Seq. ID no. 12362030
  misc_feature (9)..(379): Pfam Name: Plant protein of unknown function (DUF869) Pfam Description: Plant protein of unknown function (DUF869)
  misc_feature (14)..(414): Homolog of NCBI NO: 34896156 NR Description: P0701D05.33 [Oryza sativa (japonica >gi|13486675|dbj|BAB39912.1| contains EST to Arabidopsis thaliana chromosome 2, At2g30500~unknown protein
  misc_feature (78)..(414): Homolog of NCBI NO: 22002966 NR Description: putative CENP-E like kinetochore protein [Hordeum
  misc_feature (10)..(327): Homolog of NCBI NO: 22002966 NR Description: putative CENP-E like kinetochore protein [Hordeum
  misc_feature (4)..(413): Homolog of NCBI NO: 34860755 NR Description: similar to hypothetical protein [Rattus
  misc_feature (1)..(415): Homolog of NCBI NO: 15224515 NR Description: unknown protein; protein id: At2g30500.1
  misc_feature (1)..(415): Homolog of NCBI NO: 28416683 NR Description: At2g30500 [Arabidopsis thaliana]
  misc_feature (10)..(409): Homolog of NCBI NO: 15238455 NR Description: putative protein; protein id: At5g05180.1, by cDNA: 205958. [Arabidopsis thaliana] gb|AAF19561.1~gene_id:K2A11.5~similar to unknown protein
  misc_feature (3)..(281): Homolog of NCBI NO: 34860755 NR Description: similar to hypothetical protein [Rattus
  misc_feature (3)..(404): Homolog of NCBI NO: 15217624 NR Description: unknown protein; protein id: At1g64330.1
  misc_feature (7)..(403): Homolog of NCBI NO: 86355 NR Description: myosin heavy chain, fast skeletal muscle, adult
MKKLHTSDVESDNLKKDPEETDSALESSTEVNSQKEALEAVLFERKNEIEILKGAMASAAKQFDVELEHRDLEIDKCKHELGVLSEKYLHDKSTLEDELRKLHGVIKNMEGDLEKIHRRKCSCKSRIKELEQAAHSLERSTSEIVKLQEVIRNTQAELEKVTEDKIVLKERANEFEQLLRALKVSGTEVAKLPETIKNLEAQLERALEEKSILQDQIKQVEQVMSESLEKHSHEQSSLAADLLKLSEANTSLGGKLSSVAAELVQVYADNEEESLDNEKQISVLNQDIADLRRKLELLSSEKAAVDYELAKLLADITTRDEKMKRMDDHLNQLQFEHAKLMAEFDTAHRSLSELCAQVSELEEEVQKQKLVISETAEGKREAIRQLCFSIEHYRSGYQQLRQLLQGHRRPLVMAT

SEQ ID NO: 13488 - protein, 360 aa, Zea mays subsp. mays
  peptide (1)..(360): Ceres Seq. ID no. 12362031
  misc_feature (1)..(324): Pfam Name: Plant protein of unknown function (DUF869) Pfam Description: Plant protein of unknown function (DUF869)
  misc_feature (1)..(359): Homolog of NCBI NO: 34896156 NR Description: P0701D05.33 [Oryza sativa (japonica >gi|13486675|dbj|BAB39912.1| contains EST to Arabidopsis thaliana chromosome 2, At2g30500~unknown protein
  misc_feature (23)..(359): Homolog of NCBI NO: 22002966 NR Description: putative CENP-E like kinetochore protein [Hordeum
  misc_feature (1)..(272): Homolog of NCBI NO: 22002966 NR Description: putative CENP-E like kinetochore protein [Hordeum
  misc_feature (1)..(358): Homolog of NCBI NO: 34860755 NR Description: similar to hypothetical protein [Rattus
  misc_feature (1)..(360): Homolog of NCBI NO: 15224515 NR Description: unknown protein; protein id: At2g30500.1
  misc_feature (1)..(360): Homolog of NCBI NO: 28416683 NR Description: At2g30500 [Arabidopsis thaliana]
  misc_feature (1)..(354): Homolog of NCBI NO: 15238455 NR Description: putative protein; protein id: At5g05180.1, by cDNA: 205958. [Arabidopsis thaliana] gb|AAF19561.1~gene_id:K2A11.5~similar to unknown protein
  misc_feature (1)..(226): Homolog of NCBI NO: 34860755 NR Description: similar to hypothetical protein [Rattus
  misc_feature (1)..(349): Homolog of NCBI NO: 15217624 NR Description: unknown protein; protein id: At1g64330.1
  misc_feature (1)..(348): Homolog of NCBI NO: 86355 NR Description: myosin heavy chain, fast skeletal muscle, adult
MASAAKQFDVELEHRDLEIDKCKHELGVLSEKYLHDKSTLEDELRKLHGVIKNMEGDLEKIHRRKCSCKSRIKELEQAAHSLERSTSEIVKLQEVIRNTQAELEKVTEDKIVLKERANEFEQLLRALKVSGTEVAKLPETIKNLEAQLERALEEKSILQDQIKQVEQVMSESLEKHSHEQSSLAADLLKLSEANTSLGGKLSSVAAELVQVYADNEEESLDNEKQISVLNQDIADLRRKLELLSSEKAAVDYELAKLLADITTRDEKMKRMDDHLNQLQFEHAKLMAEFDTAHRSLSELCAQVSELEEEVQKQKLVISETAEGKREAIRQLCFSIEHYRSGYQQLRQLLQGHRRPLVMAT

SEQ ID NO: 13489 - DNA, 1422 bp, Zea mays subsp. mays
  misc_feature (1)..(1422): Ceres Seq. ID no. 12405251
  misc_feature: MA Experiment ID: 108523 Result: Down-regulated in Transcription
  misc_feature: MA Experiment 108523 PARAMETER Experiment Name: Zm_42deg_Heat_P Parameter: Age (day) Value: 8
  misc_feature: MA Experiment 108523 PARAMETER Experiment Name: Zm_42deg_Heat_P Parameter: Organism Value: Zea mays
  misc_feature: MA Experiment 108523 PARAMETER Experiment Name: Zm_42deg_Heat_P Parameter: Plant Line Value: 35A19
  misc_feature: MA Experiment 108523 PARAMETER Experiment Name: Zm_42deg_Heat_P Parameter: Temperature (deg C) Value: 42 vs. 22
  misc_feature: MA Experiment 108523 PARAMETER Experiment Name: Zm_42deg_Heat_P Parameter: Timepoint (hr) Value: 6
  misc_feature: MA Experiment 108523 PARAMETER Experiment Name: Zm_42deg_Heat_P Parameter: Tissue Value: Aerial
  misc_feature: MA Experiment ID: 108687 Result: Down-regulated in Transcription
  misc_feature: MA Experiment 108687 PARAMETER Experiment Name: Zm_Embryos-Flowers__P Parameter: Tissue Value: Embryo vs. Aerial+
cggattaagcgataattaaggcaaagaatctccaagtttgcttcgttcttgcattgaaccatggagtctggacggctcatcttcaacgcgccgggctctggcgccgggcagatgctcttcctcgactgcggcgcaggcggcggtcccggcggcggcttgttccatcgaggcgggagaccgatgcttggccttgaagaagggcgcggcgtaaaacggcccttcttcacctcgcccgacgagctcctcgaggaagagtactacgacgagcagctgccggagaagaagcgccgcctcaccccagagcaggtgcttctgctggagaggagcttcgaggaggagaacaagctggagccggagcgcaagacggagctggcgcgcaagctgggcctgcagcctcgccaggtggccgtctggttccagaaccgccgcgcccggtggaagaccaagcagctcgagcgcgacttcgaccgcctcaaggcctccttcgacgctctccgagcggaccacgacgccctcctccaggacaacaaccgcctccgctcacaggttgtgtcgttgaccgagaagctgcaagagaaggaggatgcgacggagggcggcgccaccgctgacaccgccgcgccggcggtggacgtcgaggcttccctggccgacgacgtcgaggagccagcagagcctgcggcgacgttcgaggtgctgcaggaggtgaagtccgaggacaggctgagcaccggcagcggcgggagcgcggtggtggacgcggacgcgctgctgtacggcaggttcgccgcggcagttgatagcagcgtggagtcgtacttccccggcggcgaggaccactaccacgactgcgggacgatgggccccgtgaaccatggcgccggaggaggcatccagtcggacgacgacggcgccggcagcgacgaggggtgcagctactacgccgacgaagccgccgccgccgccgccgccgcgttcttcgccggacacgccacccaccaccacgcggacgaggacgaggacgccggccagatcagctggtggatgtggaactagacgttcgatcttcccacgccgatcgatcgaccgtcttcgaatcctgtgtcaacaagaagaaaaaagaatcgtgccgtgatttttctttgcgcaacgctgctgtaagcctgtaatggtgaatttctagctatggttatgccgttatgaaggaagaaagtgtatgcatgcatggtagggtaaagagtgggtaattaatatcgttgatcatcccagtcactcgtggtgttccagaagatcaatggagttgggggagaaataagtgcgcatagaggcaagtactactctttttatggcacagtgcctatgtcaaatcagggtgttattaccagttggttttttttaaaaaaaaatactgtactattacgc

SEQ ID NO: 13490 - protein, 331 aa, Zea mays subsp. mays
  peptide (1)..(331): Ceres Seq. ID no. 12405252
  misc_feature (74)..(128): Pfam Name: Homeobox domain Pfam Description: Homeobox domain
  misc_feature (1)..(331): Homolog of NCBI NO: 37573050 NR Description: homeodomain leucine zipper protein [Oryza sativa
  misc_feature (1)..(331): Homolog of NCBI NO: 5006855 NR Description: homeodomain leucine zipper protein [Oryza sativa]
  misc_feature (1)..(260): Homolog of NCBI NO: 18034441 NR Description: homeodomain leucine zipper protein CPHB-5
  misc_feature (1)..(236): Homolog of NCBI NO: 15232122 NR Description: homeobox-leucine zipper protein HAT5 (HD-ZIP
  misc_feature (69)..(233): Homolog of NCBI NO: 15148920 NR Description: homeodomain leucine zipper protein HDZ3
  misc_feature (70)..(169): Homolog of NCBI NO: 166754 NR Description: homeobox protein
  misc_feature (36)..(236): Homolog of NCBI NO: 15148918 NR Description: homeodomain leucine zipper protein HDZ2
  misc_feature (54)..(249): Homolog of NCBI NO: 7446244 NR Description: homeotic protein - carrot
MESGRLIFNAPGSGAGQMLFLDCGAGGGPGGGLFHRGGRPMLGLEEGRGVKRPFFTSPDELLEEEYYDEQLPEKKRRLTPEQVLLLERSFEEENKLEPERKTELARKLGLQPRQVAVWFQNRRARWKTKQLERDFDRLKASFDALRADHDALLQDNNRLRSQVVSLTEKLQEKEDATEGGATADTAAPAVDVEASLADDVEEPAEPAATFEVLQEVKSEDRLSTGSGGSAVVDADALLYGRFAAAVDSSVESYFPGGEDHYHDCGTMGPVNHGAGGGIQSDDDGAGSDEGCSYYADEAAAAAAAAFFAGHATHHHADEDEDAGQISWWMWN

SEQ ID NO: 13491 - protein, 314 aa, Zea mays subsp. mays
  peptide (1)..(314): Ceres Seq. ID no. 12405253
  misc_feature (57)..(111): Pfam Name: Homeobox domain Pfam Description: Homeobox domain
  misc_feature (1)..(314): Homolog of NCBI NO: 37573050 NR Description: homeodomain leucine zipper protein [Oryza sativa
  misc_feature (1)..(314): Homolog of NCBI NO: 5006855 NR Description: homeodomain leucine zipper protein [Oryza sativa]
  misc_feature (1)..(243): Homolog of NCBI NO: 18034441 NR Description: homeodomain leucine zipper protein CPHB-5
  misc_feature (1)..(219): Homolog of NCBI NO: 15232122 NR Description: homeobox-leucine zipper protein HAT5 (HD-ZIP
  misc_feature (52)..(216): Homolog of NCBI NO: 15148920 NR Description: homeodomain leucine zipper protein HDZ3
  misc_feature (53)..(152): Homolog of NCBI NO: 166754 NR Description: homeobox protein
  misc_feature (19)..(219): Homolog of NCBI NO: 15148918 NR Description: homeodomain leucine zipper protein HDZ2
  misc_feature (37)..(232): Homolog of NCBI NO: 7446244 NR Description: homeotic protein - carrot
MLFLDCGAGGGPGGGLFHRGGRPMLGLEEGRGVKRPFFTSPDELLEEEYYDEQLPEKKRRLTPEQVLLLERSFEEENKLEPERKTELARKLGLQPRQVAVWFQNRRARWKTKQLERDFDRLKASFDALRADHDALLQDNNRLRSQVVSLTEKLQEKEDATEGGATADTAAPAVDVEASLADDVEEPAEPAATFEVLQEVKSEDRLSTGSGGSAVVDADALLYGRFAAAVDSSVESYFPGGEDHYHDCGTMGPVNHGAGGGIQSDDDGAGSDEGCSYYADEAAAAAAAAFFAGHATHHHADEDEDAGQISWWMWN

SEQ ID NO: 13492 - protein, 291 aa, Zea mays subsp. mays
  peptide (1)..(291): Ceres Seq. ID no. 12405254
  misc_feature (34)..(88): Pfam Name: Homeobox domain Pfam Description: Homeobox domain
  misc_feature (29)..(193): Homolog of NCBI NO: 15148920 NR Description: homeodomain leucine zipper protein HDZ3
  misc_feature (30)..(129): Homolog of NCBI NO: 166754 NR Description: homeobox protein
  misc_feature (1)..(291): Homolog of NCBI NO: 37573050 NR Description: homeodomain leucine zipper protein [Oryza sativa
  misc_feature (1)..(220): Homolog of NCBI NO: 18034441 NR Description: homeodomain leucine zipper protein CPHB-5
  misc_feature (1)..(196): Homolog of NCBI NO: 15232122 NR Description: homeobox-leucine zipper protein HAT5 (HD-ZIP
  misc_feature (1)..(291): Homolog of NCBI NO: 5006855 NR Description: homeodomain leucine zipper protein [Oryza sativa]
  misc_feature (1)..(196): Homolog of NCBI NO: 15148918 NR Description: homeodomain leucine zipper protein HDZ2
  misc_feature (14)..(209): Homolog of NCBI NO: 7446244 NR Description: homeotic protein - carrot
MLGLEEGRGVKRPFFTSPDELLEEEYYDEQLPEKKRRLTPEQVLLLERSFEEENKLEPERKTELARKLGLQPRQVAVWFQNRRARWKTKQLERDFDRLKASFDALRADHDALLQDNNRLRSQVVSLTEKLQEKEDATEGGATADTAAPAVDVEASLADDVEEPAEPAATFEVLQEVKSEDRLSTGSGGSAVVDADALLYGRFAAAVDSSVESYFPGGEDHYHDCGTMGPVNHGAGGGIQSDDDGAGSDEGCSYYADEAAAAAAAAFFAGHATHHHADEDEDAGQISWWMWN

SEQ ID NO: 13493 - DNA, 707 bp, Zea mays subsp. mays; identical to SEQ ID NO: 10264
  misc_feature (1)..(707): Ceres Seq. ID no. 12441460
  misc_feature: MA Experiment ID: 108528 Result: Down-regulated in Transcription
  misc_feature: MA Experiment 108528 PARAMETER Experiment Name: Zm_Imbibed_Seeds_P Parameter: Age (day) Value: 5 vs. 2
  misc_feature: MA Experiment 108528 PARAMETER Experiment Name: Zm_Imbibed_Seeds_P Parameter: Organism Value: Zea mays
  misc_feature: MA Experiment 108528 PARAMETER Experiment Name: Zm_Imbibed_Seeds_P Parameter: Plant Line Value: 35A19
  misc_feature: MA Experiment 108528 PARAMETER Experiment Name: Zm_Imbibed_Seeds_P Parameter: Tissue Value: Aerial vs. Embryo
  misc_feature: MA Experiment ID: 108530 Result: Down-regulated in Transcription
  misc_feature: MA Experiment 108530 PARAMETER Experiment Name: Zm_Imbibed_Seeds_P Parameter: Age (day) Value: 6 vs. 2
  misc_feature: MA Experiment 108530 PARAMETER Experiment Name: Zm_Imbibed_Seeds_P Parameter: Organism Value: Zea mays
  misc_feature: MA Experiment 108530 PARAMETER Experiment Name: Zm_Imbibed_Seeds_P Parameter: Plant Line Value: 35A19
  misc_feature: MA Experiment 108530 PARAMETER Experiment Name: Zm_Imbibed_Seeds_P Parameter: Tissue Value: Aerial vs. Embryo
  misc_feature: MA Experiment ID: 108545 Result: Down-regulated in Transcription
  misc_feature: MA Experiment 108545 PARAMETER Experiment Name: Zm_Imbibed_Seeds_P Parameter: Age (day) Value: 3 vs. 2
  misc_feature: MA Experiment 108545 PARAMETER Experiment Name: Zm_Imbibed_Seeds_P Parameter: Organism Value: Zea mays
  misc_feature: MA Experiment 108545 PARAMETER Experiment Name: Zm_Imbibed_Seeds_P Parameter: Plant Line Value: 35A19
  misc_feature: MA Experiment 108545 PARAMETER Experiment Name: Zm_Imbibed_Seeds_P Parameter: Tissue Value: Aerial vs. Embryo
  misc_feature: MA Experiment ID: 108547 Result: Down-regulated in Transcription
  misc_feature: MA Experiment 108547 PARAMETER Experiment Name: Zm_Imbibed_Seeds_P Parameter: Age (day) Value: 4 vs. 2
  misc_feature: MA Experiment 108547 PARAMETER Experiment Name: Zm_Imbibed_Seeds_P Parameter: Organism Value: Zea mays
  misc_feature: MA Experiment 108547 PARAMETER Experiment Name: Zm_Imbibed_Seeds_P Parameter: Plant Line Value: 35A19
  misc_feature: MA Experiment 108547 PARAMETER Experiment Name: Zm_Imbibed_Seeds_P Parameter: Tissue Value: Aerial vs. Embryo
  misc_feature: MA Experiment ID: 108559 Result: Down-regulated in Transcription
  misc_feature: MA Experiment 108559 PARAMETER Experiment Name: Zm_5mM_NO_P Parameter: Age (day) Value: 8
  misc_feature: MA Experiment 108559 PARAMETER Experiment Name: Zm_5mM_NO_P Parameter: Organism Value: Zea mays
  misc_feature: MA Experiment 108559 PARAMETER Experiment Name: Zm_5mM_NO_P Parameter: Plant Line Value: 35A19
  misc_feature: MA Experiment 108559 PARAMETER Experiment Name: Zm_5mM_NO_P Parameter: Timepoint (hr) Value: 12
  misc_feature: MA Experiment 108559 PARAMETER Experiment Name: Zm_5mM_NO_P Parameter: Tissue Value: Aerial
  misc_feature: MA Experiment 108559 PARAMETER Experiment Name: Zm_5mM_NO_P Parameter: Treatment Value: 5mM NO vs. No Treatment
  misc_feature: MA Experiment ID: 20000478 Result: Down-regulated in Transcription
  misc_feature: MA Experiment 20000478 PARAMETER Experiment Name: Zm_5mM_SA_P Parameter: Age (day) Value: 11
  misc_feature: MA Experiment 20000478 PARAMETER Experiment Name: Zm_5mM_SA_P Parameter: Organism Value: Zea mays
  misc_feature: MA Experiment 20000478 PARAMETER Experiment Name: Zm_5mM_SA_P Parameter: Plant Line Value: 35A19
  misc_feature: MA Experiment 20000478 PARAMETER Experiment Name: Zm_5mM_SA_P Parameter: Timepoint (hr) Value: 72
  misc_feature: MA Experiment 20000478 PARAMETER Experiment Name: Zm_5mM_SA_P Parameter: Tissue Value: Aerial
  misc_feature: MA Experiment 20000478 PARAMETER Experiment Name: Zm_5mM_SA_P Parameter: Treatment Value: 5mM SA vs. No Treatment
  misc_feature: MA Experiment ID: 20000479 Result: Down-regulated in Transcription
  misc_feature: MA Experiment 20000479 PARAMETER Experiment Name: Zm_Drought_P Parameter: Age (day) Value: 10
  misc_feature: MA Experiment 20000479 PARAMETER Experiment Name: Zm_Drought_P Parameter: Organism Value: Zea mays
  misc_feature: MA Experiment 20000479 PARAMETER Experiment Name: Zm_Drought_P Parameter: Plant Line Value: 35A19
  misc_feature: MA Experiment 20000479 PARAMETER Experiment Name: Zm_Drought_P Parameter: Timepoint (hr) Value: 48
  misc_feature: MA Experiment 20000479 PARAMETER Experiment Name: Zm_Drought_P Parameter: Tissue Value: Aerial
  misc_feature: MA Experiment 20000479 PARAMETER Experiment Name: Zm_Drought_P Parameter: Treatment Value: Drought vs. No Drought
  misc_feature: MA Experiment ID: 20000480 Result: Down-regulated in Transcription
  misc_feature: MA Experiment 20000480 PARAMETER Experiment Name: Zm_Drought_P Parameter: Age (day) Value: 11
  misc_feature: MA Experiment 20000480 PARAMETER Experiment Name: Zm_Drought_P Parameter: Organism Value: Zea mays
  misc_feature: MA Experiment 20000480 PARAMETER Experiment Name: Zm_Drought_P Parameter: Plant Line Value: 35A19
  misc_feature: MA Experiment 20000480 PARAMETER Experiment Name: Zm_Drought_P Parameter: Timepoint (hr) Value: 72
  misc_feature: MA Experiment 20000480 PARAMETER Experiment Name: Zm_Drought_P Parameter: Tissue Value: Aerial
  misc_feature: MA Experiment 20000480 PARAMETER Experiment Name: Zm_Drought_P Parameter: Treatment Value: Drought vs. No Drought
  misc_feature: MA Experiment ID: 20000535 Result: Down-regulated in Transcription
  misc_feature: MA Experiment 20000535 PARAMETER Experiment Name: Zm_Hybrid_Seed_Dev_P Parameter: DAP Value: 30 vs. 12
  misc_feature: MA Experiment 20000535 PARAMETER Experiment Name: Zm_Hybrid_Seed_Dev_P Parameter: Organism Value: Zea mays
  misc_feature: MA Experiment 20000535 PARAMETER Experiment Name: Zm_Hybrid_Seed_Dev_P Parameter: Plant Line Value: 35A19
  misc_feature: MA Experiment 20000535 PARAMETER Experiment Name: Zm_Hybrid_Seed_Dev_P Parameter: Tissue Value: Embryo vs. Unfert Floret

SEQ ID NO: 13494 - protein, 145 aa, Zea mays subsp. mays; identical to SEQ ID NO: 10265
  peptide (1)..(145): Ceres Seq. ID no. 12441461

SEQ ID NO: 13495 - protein, 140 aa, Zea mays subsp. mays; identical to SEQ ID NO: 10266
  peptide (1)..(140): Ceres Seq. ID no. 12441462

SEQ ID NO: 13496 - protein, 139 aa, Zea mays subsp. mays; identical to SEQ ID NO: 4019
  peptide (1)..(139): Ceres Seq. ID no. 12441463
  misc_feature (12)..(139): Pfam Name: Cofilin/tropomyosin-type actin-binding protein Pfam Description: Cofilin/tropomyosin-type actin-binding protein
  misc_feature (12)..(139): Pfam Name: Cofilin/tropomyosin-type actin-binding protein Pfam Description: Cofilin/tropomyosin-type actin-binding protein
  misc_feature (1)..(139): Homolog of NCBI NO: 17366768 NR Description: Actin-depolymerizing factor 1 (ADF 1)
  misc_feature (1)..(139): Homolog of NCBI NO: 30697300 NR Description: actin depolymerizing factor 4 - like protein
  misc_feature (1)..(139): Homolog of NCBI NO: 4185511 NR Description: actin depolymerizing factor 4 [Arabidopsis
  misc_feature (1)..(139): Homolog of NCBI NO: 15231309 NR Description: actin depolymerizing factor 1 (ADF1); protein id: supported by cDNA: 1907., supported by cDNA: gi_1408470, by cDNA: gi_14334961 [Arabidopsis thaliana]
  misc_feature (1)..(139): Homolog of NCBI NO: 38564721 NR Description: putative actin-depolymerizing factor 2
  misc_feature (1)..(139): Homolog of NCBI NO: 30697300 NR Description: actin depolymerizing factor 4 - like protein
  misc_feature (1)..(139): Homolog of NCBI NO: 15231309 NR Description: actin depolymerizing factor 1 (ADF1); protein id: supported by cDNA: 1907., supported by cDNA: gi_1408470, by cDNA: gi_14334961 [Arabidopsis thaliana]
  misc_feature (1)..(137): Homolog of NCBI NO: 18411410 NR Description: putative actin-depolymerizing factor; protein id:
  misc_feature (1)..(138): Homolog of NCBI NO: 231509 NR Description: Actin-depolymerizing factor (ADF)
  misc_feature (1)..(139): Homolog of NCBI NO: 18408116 NR Description: actin depolymerizing factor 2 (ADF2); protein id: supported by cDNA: 99657., supported by cDNA: gi_13877562, by cDNA: gi_1408472, supported by cDNA: gi_14423375 [Arabidopsis
  misc_feature (8)..(139): Homolog of NCBI NO: 30697303 NR Description: actin depolymerizing factor 4 - like protein thaliana] >gi|15215859|gb|AAK91473.1| AT5g59890/mmn10_110 thaliana] >gi|19699262|gb|AAL90997.1| At1g05180/YUP8H12_21
  misc_feature (1)..(138): Homolog of NCBI NO: 17366765 NR Description: Actin-depolymerizing factor 2 (ADF 2)
  misc_feature (1)..(139): Homolog of NCBI NO: 38564721 NR Description: putative actin-depolymerizing factor 2
  misc_feature (1)..(139): Homolog of NCBI NO: 4185511 NR Description: actin depolymerizing factor 4 [Arabidopsis
  misc_feature (1)..(139): Homolog of NCBI NO: 17366768 NR Description: Actin-depolymerizing factor 1 (ADF 1)
  misc_feature (1)..(138): Homolog of NCBI NO: 17366765 NR Description: Actin-depolymerizing factor 2 (ADF 2)
  misc_feature (8)..(139): Homolog of NCBI NO: 30697303 NR Description: actin depolymerizing factor 4 - like protein thaliana] >gi|15215859|gb|AAK91473.1| AT5g59890/mmn10_110 thaliana] >gi|19699262|gb|AAL90997.1| At1g05180/YUP8H12_21
  misc_feature (1)..(139): Homolog of NCBI NO: 18408116 NR Description: actin depolymerizing factor 2 (ADF2); protein id: supported by cDNA: 99657., supported by cDNA: gi_13877562, by cDNA: gi_1408472, supported by cDNA: gi_14423375 [Arabidopsis
  misc_feature (1)..(138): Homolog of NCBI NO: 231509 NR Description: Actin-depolymerizing factor (ADF)
  misc_feature (1)..(137): Homolog of NCBI NO: 18411410 NR Description: putative actin-depolymerizing factor; protein id:

SEQ ID NO: 13497 - DNA, 1421 bp, Zea mays subsp. mays
  misc_feature (1)..(1421): Ceres Seq. ID no. 12405865
  misc_feature: MA Experiment ID: 108523 Result: Up-regulated in Transcription
  misc_feature: MA Experiment 108523 PARAMETER Experiment Name: Zm_42deg_Heat_P Parameter: Age (day) Value: 8
  misc_feature: MA Experiment 108523 PARAMETER Experiment Name: Zm_42deg_Heat_P Parameter: Organism Value: Zea mays
  misc_feature: MA Experiment 108523 PARAMETER Experiment Name: Zm_42deg_Heat_P Parameter: Plant Line Value: 35A19
  misc_feature: MA Experiment 108523 PARAMETER Experiment Name: Zm_42deg_Heat_P Parameter: Temperature (deg C) Value: 42 vs. 22
  misc_feature: MA Experiment 108523 PARAMETER Experiment Name: Zm_42deg_Heat_P Parameter: Timepoint (hr) Value: 6
  misc_feature: MA Experiment 108523 PARAMETER Experiment Name: Zm_42deg_Heat_P Parameter: Tissue Value: Aerial
  misc_feature: MA Experiment ID: 108527 Result: Up-regulated in Transcription
  misc_feature: MA Experiment 108527 PARAMETER Experiment Name: Zm_5mM_NO_P Parameter: Age (day) Value: 8
  misc_feature: MA Experiment 108527 PARAMETER Experiment Name: Zm_5mM_NO_P Parameter: Organism Value: Zea mays
  misc_feature: MA Experiment 108527 PARAMETER Experiment Name: Zm_5mM_NO_P Parameter: Plant Line Value: 35A19
  misc_feature: MA Experiment 108527 PARAMETER Experiment Name: Zm_5mM_NO_P Parameter: Timepoint (hr) Value: 6
  misc_feature: MA Experiment 108527 PARAMETER Experiment Name: Zm_5mM_NO_P Parameter: Tissue Value: Aerial
  misc_feature: MA Experiment 108527 PARAMETER Experiment Name: Zm_5mM_NO_P Parameter: Treatment Value: 5mM NO vs. No Treatment
  misc_feature: MA Experiment ID: 108559 Result: Up-regulated in Transcription
  misc_feature: MA Experiment 108559 PARAMETER Experiment Name: Zm_5mM_NO_P Parameter: Age (day) Value: 8
  misc_feature: MA Experiment 108559 PARAMETER Experiment Name: Zm_5mM_NO_P Parameter: Organism Value: Zea mays
  misc_feature: MA Experiment 108559 PARAMETER Experiment Name: Zm_5mM_NO_P Parameter: Plant Line Value: 35A19
  misc_feature: MA Experiment 108559 PARAMETER Experiment Name: Zm_5mM_NO_P Parameter: Timepoint (hr) Value: 12
  misc_feature: MA Experiment 108559 PARAMETER Experiment Name: Zm_5mM_NO_P Parameter: Tissue Value: Aerial
  misc_feature: MA Experiment 108559 PARAMETER Experiment Name: Zm_5mM_NO_P Parameter: Treatment Value: 5mM NO vs. No Treatment
  misc_feature: MA Experiment ID: 20000480 Result: Up-regulated in Transcription
  misc_feature: MA Experiment 20000480 PARAMETER Experiment Name: Zm_Drought_P Parameter: Age (day) Value: 11
  misc_feature: MA Experiment 20000480 PARAMETER Experiment Name: Zm_Drought_P Parameter: Organism Value: Zea mays
  misc_feature: MA Experiment 20000480 PARAMETER Experiment Name: Zm_Drought_P Parameter: Plant Line Value: 35A19
  misc_feature: MA Experiment 20000480 PARAMETER Experiment Name: Zm_Drought_P Parameter: Timepoint (hr) Value: 72
  misc_feature: MA Experiment 20000480 PARAMETER Experiment Name: Zm_Drought_P Parameter: Tissue Value: Aerial
  misc_feature: MA Experiment 20000480 PARAMETER Experiment Name: Zm_Drought_P Parameter: Treatment Value: Drought vs. No Drought
atacaacgaggtagatcctcctccgtaaagcgaaagcaaaaaccaaccaaacaagctagctagagctagccaagccgcggcgtgcctccgctccggccggcccgcccctgtcagagcccccaccgccgctgccacctccgccagccgtcaccccaggcgttggatcggggccctctcgatccgcgcccggcgaatccagacggacccgcattggggttggggccccttcgatccggcgcttggtgggggtttggctgggagctccaggctgaggggacggggcggggggacctgatccttcattccgttcggatttcgcttttcccccgtggggtctcgactgccggagggggaggaggacatggatttggcgtcggtcaacgaggagctggccgagatcgacgggcagatcggcgatatcctccgcgtattgcaaaatgggttccagaagctggagaagatcaaggatgccaaccgccacagcaggcagcttgaagagcttactgataagatgcgagactgcaagagactcatcaaagacttcgagcgagttagcaaagctgaggctgagcatactgatccagcaacagcaaaaatgttgcatgacagaaagcagtcgatgatcaaagaattaaactcctacgttgctctaaagaaacagcaggcaagtgaaaacaagagaatcgatctttttgatgggccaagtgctgaagatggctttggtgaagaaaatgtcctgttagcatcaaatatgacaaaccagcagttaatggatcaaggcaatcaactaatggatgaaactgatcaagctattgcacgatctaagcagactgtccaagaaaccgtcaatgtgggcacagaaactgcagctgctctgaaagcacagacagaacaaatgagcagagttgttaatgagttggattccatccatttctccatcaaaaaggcatctcaattggtgaaagaaatcggtcgacaggttgcaactgatcgatgcatcatggccatgctttttctcattgttgctggagtcatagctataataattgttaagattgtgaacccacacaacaaggacattcgcgacatccctggcttggcaccacccgtcagcaggcggctgttgcgatagaggacaggtgaattgcatacctggtgtaaaaattgatgtggcgcggcgccttggcaagcccatctgtattctacgtcttgtaaaacgctgctccagtcatgtggtatattgctgtaaaacttctcatgggatccactcctactccttggctacacacagtgcgtatatgttcctcctagttcgccttcctgtttttgcaaaactaactctgaacggtgttctgttagaatcatgtgcacacatgatggttgagatgtgtctatgatgttcattgtgacgaacgattctt

SEQ ID NO: 13498 - protein, 256 aa, Zea mays subsp. mays
  peptide (1)..(256): Ceres Seq. ID no. 12405866
  misc_feature (78)..(210): Pfam Name: Vesicle transport v-SNARE protein Pfam Description: Vesicle transport v-SNARE protein
  misc_feature (1)..(255): Homolog of NCBI NO: 18403771 NR Description: expressed protein; protein id: At2g35190.1, by cDNA: gi_16612242 [Arabidopsis thaliana]
  misc_feature (1)..(255): Homolog of NCBI NO: 27805643 NR Description: Novel plant SNARE 11 (AtNPSN11) At2g35190/T4C15.14 [Arabidopsis thaliana]
  misc_feature (1)..(246): Homolog of NCBI NO: 25370780 NR Description: hypothetical protein At2g35190 [imported] -
  misc_feature (6)..(255): Homolog of NCBI NO: 23237830 NR Description: contains ESTs to vesicle soluble NSF attachment protein receptor [Oryza sativa
  misc_feature (6)..(249): Homolog of NCBI NO: 34896946 NR Description: putative vesicle soluble NSF attachment protein [Oryza sativa] >gi|12039356|gb|AAG46143.1| putative vesicle
  misc_feature (6)..(255): Homolog of NCBI NO: 18401508 NR Description: expressed protein; protein id: At3g17440.1, by cDNA: 114054., supported by cDNA: gi_20466311 [Arabidopsis
  misc_feature (6)..(255): Homolog of NCBI NO: 22330102 NR Description: unknown protein; protein id: At1g48240.1, by cDNA: gi_19569610 [Arabidopsis thaliana] Novel plant SNARE 12 (AtNPSN12)
  misc_feature (6)..(255): Homolog of NCBI NO: 21536876 NR Description: unknown [Arabidopsis thaliana]
  misc_feature (2)..(255): Homolog of NCBI NO: 25370781 NR Description: F11A17.20 [imported] - Arabidopsis thaliana
  misc_feature (6)..(207): Homolog of NCBI NO: 25370781 NR Description: F11A17.20 [imported] - Arabidopsis thaliana
MDLASVNEELAEIDGQIGDILRVLQNGFQKLEKIKDANRHSRQLEELTDKMRDCKRLIKDFERVSKAEAEHTDPATAKMLHDRKQSMIKELNSYVALKKQQASENKRIDLFDGPSAEDGFGEENVLLASNMTNQQLMDQGNQLMDETDQAIARSKQTVQETVNVGTETAAALKAQTEQMSRVVNELDSIHFSIKKASQLVKEIGRQVATDRCIMAMLFLIVAGVIAIIIVKIVNPHNKDIRDIPGLAPPVSRRLLR

SEQ ID NO: 13499 - protein, 206 aa, Zea mays subsp. mays
  peptide (1)..(206): Ceres Seq. ID no. 12405867
  misc_feature (28)..(160): Pfam Name: Vesicle transport v-SNARE protein Pfam Description: Vesicle transport v-SNARE protein
  misc_feature (1)..(205): Homolog of NCBI NO: 18403771 NR Description: expressed protein; protein id: At2g35190.1, by cDNA: gi_16612242 [Arabidopsis thaliana]
  misc_feature (1)..(205): Homolog of NCBI NO: 27805643 NR Description: Novel plant SNARE 11 (AtNPSN11) At2g35190/T4C15.14 [Arabidopsis thaliana]
  misc_feature (1)..(196): Homolog of NCBI NO: 25370780 NR Description: hypothetical protein At2g35190 [imported] -
  misc_feature (1)..(205): Homolog of NCBI NO: 23237830 NR Description: contains ESTs to vesicle soluble NSF attachment protein receptor [Oryza sativa
  misc_feature (1)..(199): Homolog of NCBI NO: 34896946 NR Description: putative vesicle soluble NSF attachment protein [Oryza sativa] >gi|12039356|gb|AAG46143.1| putative vesicle
  misc_feature (1)..(205): Homolog of NCBI NO: 18401508 NR Description: expressed protein; protein id: At3g17440.1, by cDNA: 114054., supported by cDNA: gi_20466311 [Arabidopsis
  misc_feature (1)..(205): Homolog of NCBI NO: 22330102 NR Description: unknown protein; protein id: At1g48240.1, by cDNA: gi_19569610 [Arabidopsis thaliana] Novel plant SNARE 12 (AtNPSN12)
  misc_feature (1)..(205): Homolog of NCBI NO: 21536876 NR Description: unknown [Arabidopsis thaliana]
  misc_feature (1)..(205): Homolog of NCBI NO: 25370781 NR Description: F11A17.20 [imported] - Arabidopsis thaliana
  misc_feature (1)..(157): Homolog of NCBI NO: 25370781 NR Description: F11A17.20 [imported] - Arabidopsis thaliana
MRDCKRLIKDFERVSKAEAEHTDPATAKMLHDRKQSMIKELNSYVALKKQQASENKRIDLFDGPSAEDGFGEENVLLASNMTNQQLMDQGNQLMDETDQAIARSKQTVQETVNVGTETAAALKAQTEQMSRVVNELDSIHFSIKKASQLVKEIGRQVATDRCIMAMLFLIVAGVIAIIIVKIVNPHNKDIRDIPGLAPPVSRRLLR

SEQ ID NO: 13500 - protein, 178 aa, Zea mays subsp. mays
  peptide (1)..(178): Ceres Seq. ID no. 12405868
  misc_feature (1)..(132): Pfam Name: Vesicle transport v-SNARE protein Pfam Description: Vesicle transport v-SNARE protein
  misc_feature (1)..(177): Homolog of NCBI NO: 18403771 NR Description: expressed protein; protein id: At2g35190.1, by cDNA: gi_16612242 [Arabidopsis thaliana]
  misc_feature (1)..(177): Homolog of NCBI NO: 27805643 NR Description: Novel plant SNARE 11 (AtNPSN11) At2g35190/T4C15.14 [Arabidopsis thaliana]
  misc_feature (1)..(168): Homolog of NCBI NO: 25370780 NR Description: hypothetical protein At2g35190 [imported] -
  misc_feature (1)..(177): Homolog of NCBI NO: 23237830 NR Description: contains ESTs to vesicle soluble NSF attachment protein receptor [Oryza sativa
  misc_feature (1)..(171): Homolog of NCBI NO: 34896946 NR Description: putative vesicle soluble NSF attachment protein [Oryza sativa] >gi|12039356|gb|AAG46143.1| putative vesicle
  misc_feature (1)..(177): Homolog of NCBI NO: 18401508 NR Description: expressed protein; protein id: At3g17440.1, by cDNA: 114054., supported by cDNA: gi_20466311 [Arabidopsis
  misc_feature (1)..(177): Homolog of NCBI NO: 22330102 NR Description: unknown protein; protein id: At1g48240.1, by cDNA: gi_19569610 [Arabidopsis thaliana] Novel plant SNARE 12 (AtNPSN12)
  misc_feature (1)..(177): Homolog of NCBI NO: 21536876 NR Description: unknown [Arabidopsis thaliana]
  misc_feature (1)..(177): Homolog of NCBI NO: 25370781 NR Description: F11A17.20 [imported] - Arabidopsis thaliana
  misc_feature (1)..(129): Homolog of NCBI NO: 25370781 NR Description: F11A17.20 [imported] - Arabidopsis thaliana
MLHDRKQSMIKELNSYVALKKQQASENKRIDLFDGPSAEDGFGEENVLLASNMTNQQLMDQGNQLMDETDQAIARSKQTVQETVNVGTETAAALKAQTEQMSRVVNELDSIHFSIKKASQLVKEIGRQVATDRCIMAMLFLIVAGVIAIIIVKIVNPHNKDIRDIPGLAPPVSRRLLR

SEQ ID NO: 13501 - DNA, 1576 bp, Zea mays subsp. mays
  misc_feature (1)..(1576): Ceres Seq. ID no. 12341390
  misc_feature: MA Experiment ID: 108522 Result: Down-regulated in Transcription
  misc_feature: MA Experiment 108522 PARAMETER Experiment Name: Zm_42deg_Heat_P Parameter: Age (day) Value: 8
  misc_feature: MA Experiment 108522 PARAMETER Experiment Name: Zm_42deg_Heat_P Parameter: Organism Value: Zea mays
  misc_feature: MA Experiment 108522 PARAMETER Experiment Name: Zm_42deg_Heat_P Parameter: Plant Line Value: 35A19
  misc_feature: MA Experiment 108522 PARAMETER Experiment Name: Zm_42deg_Heat_P Parameter: Temperature (deg C) Value: 42 vs. 22
  misc_feature: MA Experiment 108522 PARAMETER Experiment Name: Zm_42deg_Heat_P Parameter: Timepoint (hr) Value: 1
  misc_feature: MA Experiment 108522 PARAMETER Experiment Name: Zm_42deg_Heat_P Parameter: Tissue Value: Aerial
  misc_feature: MA Experiment ID: 108544 Result: Down-regulated in Transcription
  misc_feature: MA Experiment ID: 108687 Result: Down-regulated in Transcription
  misc_feature: MA Experiment 108687 PARAMETER Experiment Name: Zm_Embryos-Flowers__P Parameter: Tissue Value: Embryo vs. Aerial+
  misc_feature: MA Experiment ID: 20000632 Result: Down-regulated in Transcription
  misc_feature: MA Experiment 20000632 PARAMETER Experiment Name: Zm_Herbicide-Treatments_P Parameter: Timepoint (hr) Value: 4
  misc_feature: MA Experiment 20000632 PARAMETER Experiment Name: Zm_Herbicide-Treatments_P Parameter: Tissue Value: Aerial
  misc_feature: MA Experiment 20000632 PARAMETER Experiment Name: Zm_Herbicide-Treatments_P Parameter: Treatment Value: Glean vs. No Treatment
atccgccgcttccgcttcgtcccaaatcccttttggcgggagacgagcagcaggctgcctccacttcccgcgcaaagcagtaaatcggagtaaccatggacggcggatcctccacaccggcgagccccccaccgacggtatccgcgtcggcggcgaatatggaggagtaccggaactggaagaagaacgcggcggtgctttacgacctcgtcatctcccacccgctcgagtggccatcgctcaccgtgcagtggctcccatcggagtcctcggcccgcagccaccggctcgtcgtgggtacgcacacctccgacgaggcccccaacaacctcatggtcttggacgcggtgctaccgctcccacctcgcctcgctgcagccgtcgctgcctcgggcggcgccgtcccgttcccatccgtatccgtctcgcgcgtggcgccacaccgtggcgaggtcaaccgcgcgcgctgcatgccgcagcgtccctatacggtggccaccaaaacgtgcgtcgacgaggtgcacgtgtaccatctcggcgatgacgacggcagcgggaagagcggcgccgaagttgtgctcaaggggcatgaggcggagggttatggcttgtcatggagcccgatgaaggaggggtggctgctgagcggctcgtatgataagaagatttgcttgtgggacatctcctctgggagtggcgctcctgttctggatgcacaacaggtgtttgtggctcatgaggatctcgttgaagatgttgcttggcacctgaaggatgaacatatatttggatctgttggggatgactgtaagttgatgatgtgggacttgcgtacaaacaaaccagaacaatctattcttgcacatcgaaaggaggtcaactctttgtcattcaatccattcaatgaatggatattggctacagcatctggagacacaactatcaacctatttgacatgcgaaaactatctagaagcttgcatacttttgacagtcatgaggcggaggtgtttcaggttgaatggaatccaaatttggctactgtattagcttcatctgccgcagacaagagagtgatgatatgggatattaataggattggcgatgagcagtcagaggaagacgcagacgacggaccaccggagctgctgttcgttcatggaggccacacagacaagatatcagagctgtcgtggaatcctagcgagaaatgggccattgccagcgtgtctgaagacaacatcctgcagatatgggagatggcagaaagcatatactgtgatgacctctccatgcaggttaactgactcgtgcctcgaagcataaagccagagtgggcatctataagaactctttaaatccgtgacatgcattaggctatctccagcagatctcctatcacatcctttatgttatcccctattttcaaacttctctctgcaaagagtcagttattgacttgagtaatcttgatagtctgaatctgattgagcctttaggcataaatgtaactttgaaattgtagggtcagggttgacttcttttccagtttggaacttactactccctgcagttc

SEQ ID NO: 13502 - protein, 403 aa, Zea mays subsp. mays
  peptide (1)..(403): Ceres Seq. ID no. 12341391
  misc_feature (157)..(195): Pfam Name: WD domain, G-beta repeat Pfam Description: WD domain, G-beta repeat
  misc_feature (22)..(403): Homolog of NCBI NO: 20977604 NR Description: nucleosome/chromatin assembly factor 104 [Zea
  misc_feature (23)..(397): Homolog of NCBI NO: 15236251 NR Description: WD-40 repeat protein (MSI3); protein id:
  misc_feature (23)..(397): Homolog of NCBI NO: 27754479 NR Description: putative WD-40 repeat protein (MSI3) [Arabidopsis
  misc_feature (23)..(397): Homolog of NCBI NO: 2394233 NR Description: WD-40 repeat protein [Arabidopsis thaliana]
  misc_feature (23)..(397): Homolog of NCBI NO: 15227294 NR Description: putative WD-40 repeat protein, MSI2; protein id: supported by cDNA: 40637., supported by cDNA: gi_15983816,
  misc_feature (23)..(397): Homolog of NCBI NO: 21593624 NR Description: putative WD-40 repeat protein, MSI2 [Arabidopsis
  misc_feature (20)..(396): Homolog of NCBI NO: 39595121 NR Description: Hypothetical protein CBG03710 [Caenorhabditis
  misc_feature (20)..(394): Homolog of NCBI NO: 17508127 NR Description: Synthetic multivulva protein LIN-53,
  misc_feature (44)..(397): Homolog of NCBI NO: 15237140 NR Description: WD-40 repeat protein MSI1 (sp|O22467); also
  misc_feature (45)..(403): Homolog of NCBI NO: 6677681 NR Description: retinoblastoma binding protein 4 [Mus musculus]
MDGGSSTPASPPPTVSASAANMEEYRNWKKNAAVLYDLVISHPLEWPSLTVQWLPSESSARSHRLVVGTHTSDEAPNNLMVLDAVLPLPPRLAAAVAASGGAVPFPSVSVSRVAPHRGEVNRARCMPQRPYTVATKTCVDEVHVYHLGDDDGSGKSGAEVVLKGHEAEGYGLSWSPMKEGWLLSGSYDKKICLWDISSGSGAPVLDAQQVFVAHEDLVEDVAWHLKDEHIFGSVGDDCKLMMWDLRTNKPEQSILAHRKEVNSLSFNPFNEWILATASGDTTINLFDMRKLSRSLHTFDSHEAEVFQVEWNPNLATVLASSAADKRVMIWDINRIGDEQSEEDADDGPPELLFVHGGHTDKISELSWNPSEKWAIASVSEDNILQIWEMAESIYCDDLSMQVN

SEQ ID NO: 13503 - protein, 382 aa, Zea mays subsp. mays
  peptide (1)..(382): Ceres Seq. ID no. 12341392
  misc_feature (136)..(174): Pfam Name: WD domain, G-beta repeat Pfam Description: WD domain, G-beta repeat
  misc_feature (1)..(382): Homolog of NCBI NO: 20977604 NR Description: nucleosome/chromatin assembly factor 104 [Zea
  misc_feature (2)..(376): Homolog of NCBI NO: 15236251 NR Description: WD-40 repeat protein (MSI3); protein id:
  misc_feature (2)..(376): Homolog of NCBI NO: 27754479 NR Description: putative WD-40 repeat protein (MSI3) [Arabidopsis
  misc_feature (2)..(376): Homolog of NCBI NO: 2394233 NR Description: WD-40 repeat protein [Arabidopsis thaliana]
  misc_feature (2)..(376): Homolog of NCBI NO: 15227294 NR Description: putative WD-40 repeat protein, MSI2; protein id: supported by cDNA: 40637., supported by cDNA: gi_15983816,
  misc_feature (2)..(376): Homolog of NCBI NO: 21593624 NR Description: putative WD-40 repeat protein, MSI2 [Arabidopsis
  misc_feature (1)..(375): Homolog of NCBI NO: 39595121 NR Description: Hypothetical protein CBG03710 [Caenorhabditis
  misc_feature (1)..(373): Homolog of NCBI NO: 17508127 NR Description: Synthetic multivulva protein LIN-53,
  misc_feature (23)..(376): Homolog of NCBI NO: 15237140 NR Description: WD-40 repeat protein MSI1 (sp|O22467); also
  misc_feature (24)..(382): Homolog of NCBI NO: 6677681 NR Description: retinoblastoma binding protein 4 [Mus musculus]
MEEYRNWKKNAAVLYDLVISHPLEWPSLTVQWLPSESSARSHRLVVGTHTSDEAPNNLMVLDAVLPLPPRLAAAVAASGGAVPFPSVSVSRVAPHRGEVNRARCMPQRPYTVATKTCVDEVHVYHLGDDDGSGKSGAEVVLKGHEAEGYGLSWSPMKEGWLLSGSYDKKICLWDISSGSGAPVLDAQQVFVAHEDLVEDVAWHLKDEHIFGSVGDDCKLMMWDLRTNKPEQSILAHRKEVNSLSFNPFNEWILATASGDTTINLFDMRKLSRSLHTFDSHEAEVFQVEWNPNLATVLASSAADKRVMIWDINRIGDEQSEEDADDGPPELLFVHGGHTDKISELSWNPSEKWAIASVSEDNILQIWEMAESIYCDDLSMQVN

SEQ ID NO: 13504 - protein, 324 aa, Zea mays subsp. mays
  peptide (1)..(324): Ceres Seq. ID no. 12341393
  misc_feature (78)..(116): Pfam Name: WD domain, G-beta repeat Pfam Description: WD domain, G-beta repeat
  misc_feature (1)..(324): Homolog of NCBI NO: 20977604 NR Description: nucleosome/chromatin assembly factor 104 [Zea
  misc_feature (1)..(318): Homolog of NCBI NO: 15236251 NR Description: WD-40 repeat protein (MSI3); protein id:
  misc_feature (1)..(318): Homolog of NCBI NO: 27754479 NR Description: putative WD-40 repeat protein (MSI3) [Arabidopsis
  misc_feature (1)..(318): Homolog of NCBI NO: 2394233 NR Description: WD-40 repeat protein [Arabidopsis thaliana]
  misc_feature (1)..(318): Homolog of NCBI NO: 15227294 NR Description: putative WD-40 repeat protein, MSI2; protein id: supported by cDNA: 40637., supported by cDNA: gi_15983816,
  misc_feature (1)..(318): Homolog of NCBI NO: 21593624 NR Description: putative WD-40 repeat protein, MSI2 [Arabidopsis
  misc_feature (1)..(317): Homolog of NCBI NO: 39595121 NR Description: Hypothetical protein CBG03710 [Caenorhabditis
  misc_feature (1)..(315): Homolog of NCBI NO: 17508127 NR Description: Synthetic multivulva protein LIN-53,
  misc_feature (1)..(318): Homolog of NCBI NO: 15237140 NR Description: WD-40 repeat protein MSI1 (sp|O22467); also
  misc_feature (1)..(324): Homolog of NCBI NO: 6677681 NR Description: retinoblastoma binding protein 4 [Mus musculus]
MVLDAVLPLPPRLAAAVAASGGAVPFPSVSVSRVAPHRGEVNRARCMPQRPYTVATKTCVDEVHVYHLGDDDGSGKSGAEVVLKGHEAEGYGLSWSPMKEGWLLSGSYDKKICLWDISSGSGAPVLDAQQVFVAHEDLVEDVAWHLKDEHIFGSVGDDCKLMMWDLRTNKPEQSILAHRKEVNSLSFNPFNEWILATASGDTTINLFDMRKLSRSLHTFDSHEAEVFQVEWNPNLATVLASSAADKRVMIWDINRIGDEQSEEDADDGPPELLFVHGGHTDKISELSWNPSEKWAIASVSEDNILQIWEMAESIYCDDLSMQVN

SEQ ID NO: 13505 - DNA, 1671 bp, Zea mays subsp. mays; identical to SEQ ID NO: 3040
  misc_feature (1)..(1671): Ceres Seq. ID no. 12594232
  misc_feature: MA Experiment ID: 20000492 Result: Up-regulated in Transcription
  misc_feature: MA Experiment 20000492 PARAMETER Experiment Name: Zm_Hybrid_Seed_Dev_P Parameter: DAP Value: 12
  misc_feature: MA Experiment 20000492 PARAMETER Experiment Name: Zm_Hybrid_Seed_Dev_P Parameter: Organism Value: Zea mays
  misc_feature: MA Experiment 20000492 PARAMETER Experiment Name: Zm_Hybrid_Seed_Dev_P Parameter: Plant Line Value: 35A19
  misc_feature: MA Experiment 20000492 PARAMETER Experiment Name: Zm_Hybrid_Seed_Dev_P Parameter: Tissue Value: Fert Kernel vs. Unfert Floret

SEQ ID NO: 13506 - protein, 491 aa, Zea mays subsp. mays; identical to SEQ ID NO: 3041
  peptide (1)..(491): Ceres Seq. ID no. 12594233
  misc_feature (75)..(108): Pfam Name: TPR Domain Pfam Description: TPR Domain
  misc_feature (32)..(491): Homolog of NCBI NO: 38175649 NR Description: tetratricopeptide repeat-containing protein-like
  misc_feature (140)..(491): Homolog of NCBI NO: 32352192 NR Description: hypothetical protein [Oryza sativa (japonica
  misc_feature (54)..(432): Homolog of NCBI NO: 18419996 NR Description: putative protein; protein id: At4g37210.1 thaliana] >gi|13877853|gb|AAK44004.1|AF370189_1 unknown protein thaliana] >gi|17065596|gb|AAL33778.1| unknown protein
  misc_feature (54)..(375): Homolog of NCBI NO: 25407799 NR Description: hypothetical protein AT4g37210 [imported] - thaliana >gi|4006859|emb|CAB16777.1| putative protein thaliana] >gi|7270704|emb|CAB80387.1| putative protein
  misc_feature (61)..(330): Homolog of NCBI NO: 4104353 NR Description: nuclear autoantigenic sperm protein autosomal
  misc_feature (59)..(136): Homolog of NCBI NO: 18129310 NR Description: hypothetical protein [Pinus pinaster]
  misc_feature (52)..(482): Homolog of NCBI NO: 123127 NR Description: HISTONE-BINDING PROTEIN N1/N2
  misc_feature (32)..(330): Homolog of NCBI NO: 13435642 NR Description: Unknown (protein for MGC:5829) [Mus musculus]
  misc_feature (61)..(330): Homolog of NCBI NO: 27262630 NR Description: nuclear autoantigenic sperm protein isoform 3;
  misc_feature (61)..(330): Homolog of NCBI NO: 30584691 NR Description: Homo sapiens nuclear autoantigenic sperm protein

SEQ ID NO: 13507 - protein, 460 aa, Zea mays subsp. mays; identical to SEQ ID NO: 3042
  peptide (1)..(460): Ceres Seq. ID no. 12594234
  misc_feature (44)..(77): Pfam Name: TPR Domain Pfam Description: TPR Domain
  misc_feature (1)..(460): Homolog of NCBI NO: 38175649 NR Description: tetratricopeptide repeat-containing protein-like
  misc_feature (109)..(460): Homolog of NCBI NO: 32352192 NR Description: hypothetical protein [Oryza sativa (japonica
  misc_feature (23)..(401): Homolog of NCBI NO: 18419996 NR Description: putative protein; protein id: At4g37210.1 thaliana] >gi|13877853|gb|AAK44004.1|AF370189_1 unknown protein thaliana] >gi|17065596|gb|AAL33778.1| unknown protein
  misc_feature (23)..(344): Homolog of NCBI NO: 25407799 NR Description: hypothetical protein AT4g37210 [imported] - thaliana >gi|4006859|emb|CAB16777.1| putative protein thaliana] >gi|7270704|emb|CAB80387.1| putative protein
  misc_feature (30)..(299): Homolog of NCBI NO: 4104353 NR Description: nuclear autoantigenic sperm protein autosomal
  misc_feature (28)..(105): Homolog of NCBI NO: 18129310 NR Description: hypothetical protein [Pinus pinaster]
  misc_feature (21)..(451): Homolog of NCBI NO: 123127 NR Description: HISTONE-BINDING PROTEIN N1/N2
  misc_feature (1)..(299): Homolog of NCBI NO: 13435642 NR Description: Unknown (protein for MGC:5829) [Mus musculus]
  misc_feature (30)..(299): Homolog of NCBI NO: 27262630 NR Description: nuclear autoantigenic sperm protein isoform 3;
  misc_feature (30)..(299): Homolog of NCBI NO: 30584691 NR Description: Homo sapiens nuclear autoantigenic sperm protein

SEQ ID NO: 13508 - protein, 280 aa, Zea mays subsp. mays; identical to SEQ ID NO: 2639
  peptide (1)..(280): Ceres Seq. ID no. 12594235
  misc_feature (1)..(119): Homolog of NCBI NO: 4104353 NR Description: nuclear autoantigenic sperm protein autosomal
  misc_feature (1)..(271): Homolog of NCBI NO: 123127 NR Description: HISTONE-BINDING PROTEIN N1/N2
  misc_feature (1)..(119): Homolog of NCBI NO: 13435642 NR Description: Unknown (protein for MGC:5829) [Mus musculus]
  misc_feature (1)..(119): Homolog of NCBI NO: 27262630 NR Description: nuclear autoantigenic sperm protein isoform 3;
  misc_feature (1)..(119): Homolog of NCBI NO: 30584691 NR Description: Homo sapiens nuclear autoantigenic sperm protein
  misc_feature (1)..(268): Homolog of NCBI NO: 28277791 NR Description: Unknown (protein for MGC:56007) [Danio rerio]
  misc_feature (1)..(280): Homolog of NCBI NO: 38175649 NR Description: tetratricopeptide repeat-containing protein-like
  misc_feature (1)..(280): Homolog of NCBI NO: 32352192 NR Description: hypothetical protein [Oryza sativa (japonica
  misc_feature (1)..(221): Homolog of NCBI NO: 18419996 NR Description: putative protein; protein id: At4g37210.1 thaliana] >gi|13877853|gb|AAK44004.1|AF370189_1 unknown protein thaliana] >gi|17065596|gb|AAL33778.1| unknown protein
  misc_feature (1)..(164): Homolog of NCBI NO: 25407799 NR Description: hypothetical protein AT4g37210 [imported] - thaliana >gi|4006859|emb|CAB16777.1| putative protein thaliana] >gi|7270704|emb|CAB80387.1| putative protein

SEQ ID NO: 13509 - DNA, 1891 bp, Zea mays subsp. mays
  misc_feature (1)..(1891): Ceres Seq. ID no. 12361798
  misc_feature: MA Experiment ID: 108527 Result: Up-regulated in Transcription
  misc_feature: MA Experiment 108527 PARAMETER Experiment Name: Zm_5mM_NO_P Parameter: Age (day) Value: 8
  misc_feature: MA Experiment 108527 PARAMETER Experiment Name: Zm_5mM_NO_P Parameter: Organism Value: Zea mays
  misc_feature: MA Experiment 108527 PARAMETER Experiment Name: Zm_5mM_NO_P Parameter: Plant Line Value: 35A19
  misc_feature: MA Experiment 108527 PARAMETER Experiment Name: Zm_5mM_NO_P Parameter: Timepoint (hr) Value: 6
  misc_feature: MA Experiment 108527 PARAMETER Experiment Name: Zm_5mM_NO_P Parameter: Tissue Value: Aerial
  misc_feature: MA Experiment 108527 PARAMETER Experiment Name: Zm_5mM_NO_P Parameter: Treatment Value: 5mM NO vs. No Treatment
  misc_feature: MA Experiment ID: 108559 Result: Up-regulated in Transcription
  misc_feature: MA Experiment 108559 PARAMETER Experiment Name: Zm_5mM_NO_P Parameter: Age (day) Value: 8
  misc_feature: MA Experiment 108559 PARAMETER Experiment Name: Zm_5mM_NO_P Parameter: Organism Value: Zea mays
  misc_feature: MA Experiment 108559 PARAMETER Experiment Name: Zm_5mM_NO_P Parameter: Plant Line Value: 35A19
  misc_feature: MA Experiment 108559 PARAMETER Experiment Name: Zm_5mM_NO_P Parameter: Timepoint (hr) Value: 12
  misc_feature: MA Experiment 108559 PARAMETER Experiment Name: Zm_5mM_NO_P Parameter: Tissue Value: Aerial
  misc_feature: MA Experiment 108559 PARAMETER Experiment Name: Zm_5mM_NO_P Parameter: Treatment Value: 5mM NO vs. No Treatment
  misc_feature: MA Experiment ID: 20000478 Result: Up-regulated in Transcription
  misc_feature: MA Experiment 20000478 PARAMETER Experiment Name: Zm_5mM_SA_P Parameter: Age (day) Value: 11
  misc_feature: MA Experiment 20000478 PARAMETER Experiment Name: Zm_5mM_SA_P Parameter: Organism Value: Zea mays
  misc_feature: MA Experiment 20000478 PARAMETER Experiment Name: Zm_5mM_SA_P Parameter: Plant Line Value: 35A19
  misc_feature: MA Experiment 20000478 PARAMETER Experiment Name: Zm_5mM_SA_P Parameter: Timepoint (hr) Value: 72
  misc_feature: MA Experiment 20000478 PARAMETER Experiment Name: Zm_5mM_SA_P Parameter: Tissue Value: Aerial
  misc_feature: MA Experiment 20000478 PARAMETER Experiment Name: Zm_5mM_SA_P Parameter: Treatment Value: 5mM SA vs. No Treatment
  misc_feature: MA Experiment ID: 20000626 Result: Up-regulated in Transcription
  misc_feature: MA Experiment 20000626 PARAMETER Experiment Name: Zm_Herbicide-Treatments_P Parameter: Timepoint (hr) Value: 12
  misc_feature: MA Experiment 20000626 PARAMETER Experiment Name: Zm_Herbicide-Treatments_P Parameter: Tissue Value: Aerial
  misc_feature: MA Experiment 20000626 PARAMETER Experiment Name: Zm_Herbicide-Treatments_P Parameter: Treatment Value: Roundup vs. No Treatment
  misc_feature: MA Experiment ID: 20001612 Result: Up-regulated in Transcription
  misc_feature: MA Experiment 20001612 PARAMETER Experiment Name: Zm_50ppm_KNO3_L-to-H_P Parameter: Age (day) Value: 19
  misc_feature: MA Experiment 20001612 PARAMETER Experiment Name: Zm_50ppm_KNO3_L-to-H_P Parameter: Organism Value: Zea mays
  misc_feature: MA Experiment 20001612 PARAMETER Experiment Name: Zm_50ppm_KNO3_L-to-H_P Parameter: Plant Line Value: 35A19
  misc_feature: MA Experiment 20001612 PARAMETER Experiment Name: Zm_50ppm_KNO3_L-to-H_P Parameter: Timepoint (hr) Value: 8
  misc_feature: MA Experiment 20001612 PARAMETER Experiment Name: Zm_50ppm_KNO3_L-to-H_P Parameter: Tissue Value: Roots
  misc_feature: MA Experiment 20001612 PARAMETER Experiment Name: Zm_50ppm_KNO3_L-to-H_P Parameter: Treatment Value: 50ppm KNO3 vs. 50ppm KCl
aggacgacgaccggtcccattccccccgccccaacttgtcaggactcaagaggctcccctcctccctcgccgcggaacacgcgcgccgtcgtcgccagcccgggttcatttctccgttccttggtgcggtggtagccgagcgctccggccatggcgttctatcggggcctcaccgcagtctcgagactgcgatcacgcatggcgcaggaggccaccacgctggggggtgtgaggtggctgcagatgcagagcgcgtccgatctcgatcttaagtcccagttgcaggaattgattccggaacaacaggatcgcttaaagaagctcaagtcagagcatggaaagacccagcttggaaacataactgtggatatggtccttggtggaatgagagggatgactggaatgctttgggaaacatccctacttgatccagaggagggtattcgttttaggggcctctcaattccagaatgccaaaaagtgctgccaacagcagttaagggcggcgaacctttgcctgagggtctcctttggcttcttttgacggggaaggtcccaaccaaagagcaagttgatgcactatcaaaggaattgcttgcgcgctcaactgttccagctcatgtctataagacaatagatgctctcccagtagatgcacatcctatgacacagtttaccacgggagtaatggctcttcaggttgagagtgaatttcaaaaggcttatgacaatggattgccaaagtcaaagttttgggagcctacttatgaagactgcttaaatttgattgctcggcttccaccagtgtcttcttatgtttaccggagaattttcaagagtgggaaatcaatagaagccgataattctttggactatgcggcaaatttctcacacatgcttggttttgacgaccaaaaaatgctggagctgatgcggctctatgtaacaattcacactgatcatgaaggcgggaatgtcagtgctcatactggtcatctggttgggagtgctctgtcagatccttatctttctttcgcagcggctctaaatgggctagctgggccactgcatggccttgcaaatcaggaagtgcttttatggatcaaatctgtaattgaggaaactgggagtggtgttaccacagatcaactcaaagactatgtctggaagacactaaagagtggaaaggttgttcctgggtttggtcatggagttctgcgtaagaccgacccacggtattcatgtcaaagggagtttgccctgaagcatttgcctgaggatccacttttccaattggtgtccaagttgtatgaagttgtacctcctatcctcactgagctgggcaaggtcaagaacccatggccaaatgttgatgctcacagtggagttttgctgaaccactttggactatctgaagcacggtattacactgtcttgttcggtgtttcaagaagcatggggataggatctcagctcatctgggaccgtgcccttggcctgccacttgagaggccgaagagtgttaccatggagtggctggagaactactgcaagaacaaggctgcttgaagcttttcacaaatgctgctttttcccaaccttggctgttaataatttaaacgcgagttatagaaatagtcattttcctttggccgttgaataacgcaagagcaatatgctcaggcggaagaattttgtatcttccgtaacttggtgaacatccagatacttgatctgcggcaacaatgggcagaagagattaggacatgctgattgatctttatacgccaacacttgtttttctttaacattacttgttcgctgcagctttaatccagctgtttgtaactgcaatttatagcaatttatagagatttgggctatggcatgc

SEQ ID NO: 13510 - protein, 472 aa, Zea mays subsp. mays
  peptide (1)..(472): Ceres Seq. ID no. 12361799
  misc_feature (78)..(455): Pfam Name: Citrate synthase Pfam Description: Citrate synthase
  misc_feature (1)..(472): Homolog of NCBI NO: 11066954 NR Description: citrate synthase [Oryza sativa]
  misc_feature (1)..(472): Homolog of NCBI NO: 18406515 NR Description: citrate synthase; protein id: At2g44350.1, by cDNA: 16528., supported by cDNA: gi_14423561 [Arabidopsis >gi|27735166|sp|P20115|CISY_ARATH Citrate synthase, mitochondrial
  misc_feature (1)..(472): Homolog of NCBI NO: 21553775 NR Description: citrate synthase [Arabidopsis thaliana]
  misc_feature (1)..(472): Homolog of NCBI NO: 15982952 NR Description: citrate synthase [Prunus persica]
  misc_feature (1)..(472): Homolog of NCBI NO: 30689693 NR Description: citrate synthase [Arabidopsis thaliana]
  misc_feature (149)..(472): Homolog of NCBI NO: 5441892 NR Description: ESTs C96653(C10531),C96654(C10531),C28571(C61641) to a region of the predicted gene.~Similar to citrate synthetase.
  misc_feature (32)..(134): Homolog of NCBI NO: 5441892 NR Description: ESTs C96653(C10531),C96654(C10531),C28571(C61641) to a region of the predicted gene.~Similar to citrate synthetase.
  misc_feature (1)..(471): Homolog of NCBI NO: 8928010 NR Description: Citrate synthase, mitochondrial precursor
  misc_feature (1)..(472): Homolog of NCBI NO: 1352088 NR Description: Citrate synthase, mitochondrial precursor
  misc_feature (1)..(468): Homolog of NCBI NO: 1556429 NR Description: citrate synthase [Nicotiana tabacum]
MAFYRGLTAVSRLRSRMAQEATTLGGVRWLQMQSASDLDLKSQLQELIPEQQDRLKKLKSEHGKTQLGNITVDMVLGGMRGMTGMLWETSLLDPEEGIRFRGLSIPECQKVLPTAVKGGEPLPEGLLWLLLTGKVPTKEQVDALSKELLARSTVPAHVYKTIDALPVDAHPMTQFTTGVMALQVESEFQKAYDNGLPKSKFWEPTYEDCLNLIARLPPVSSYVYRRIFKSGKSIEADNSLDYAANFSHMLGFDDQKMLELMRLYVTIHTDHEGGNVSAHTGHLVGSALSDPYLSFAAALNGLAGPLHGLANQEVLLWIKSVIEETGSGVTTDQLKDYVWKTLKSGKVVPGFGHGVLRKTDPRYSCQREFALKHLPEDPLFQLVSKLYEVVPPILTELGKVKNPWPNVDAHSGVLLNHFGLSEARYYTVLFGVSRSMGIGSQLIWDRALGLPLERPKSVTMEWLENYCKNKAA

SEQ ID NO: 13511 - protein, 456 aa, Zea mays subsp. mays
  peptide (1)..(456): Ceres Seq. ID no. 12361800
  misc_feature (62)..(439): Pfam Name: Citrate synthase Pfam Description: Citrate synthase
  misc_feature (1)..(456): Homolog of NCBI NO: 11066954 NR Description: citrate synthase [Oryza sativa]
  misc_feature (1)..(456): Homolog of NCBI NO: 18406515 NR Description: citrate synthase; protein id: At2g44350.1, by cDNA: 16528., supported by cDNA: gi_14423561 [Arabidopsis >gi|27735166|sp|P20115|CISY_ARATH Citrate synthase, mitochondrial
  misc_feature (1)..(456): Homolog of NCBI NO: 21553775 NR Description: citrate synthase [Arabidopsis thaliana]
  misc_feature (1)..(456): Homolog of NCBI NO: 15982952 NR Description: citrate synthase [Prunus persica]
  misc_feature (1)..(456): Homolog of NCBI NO: 30689693 NR Description: citrate synthase [Arabidopsis thaliana]
  misc_feature (133)..(456): Homolog of NCBI NO: 5441892 NR Description: ESTs C96653(C10531),C96654(C10531),C28571(C61641) to a region of the predicted gene.~Similar to citrate synthetase.
  misc_feature (16)..(118): Homolog of NCBI NO: 5441892 NR Description: ESTs C96653(C10531),C96654(C10531),C28571(C61641) to a region of the predicted gene.~Similar to citrate synthetase.
  misc_feature (1)..(455): Homolog of NCBI NO: 8928010 NR Description: Citrate synthase, mitochondrial precursor
  misc_feature (1)..(456): Homolog of NCBI NO: 1352088 NR Description: Citrate synthase, mitochondrial precursor
  misc_feature (1)..(452): Homolog of NCBI NO: 1556429 NR Description: citrate synthase [Nicotiana tabacum]
MAQEATTLGGVRWLQMQSASDLDLKSQLQELIPEQQDRLKKLKSEHGKTQLGNITVDMVLGGMRGMTGMLWETSLLDPEEGIRFRGLSIPECQKVLPTAVKGGEPLPEGLLWLLLTGKVPTKEQVDALSKELLARSTVPAHVYKTIDALPVDAHPMTQFTTGVMALQVESEFQKAYDNGLPKSKFWEPTYEDCLNLIARLPPVSSYVYRRIFKSGKSIEADNSLDYAANFSHMLGFDDQKMLELMRLYVTIHTDHEGGNVSAHTGHLVGSALSDPYLSFAAALNGLAGPLHGLANQEVLLWIKSVIEETGSGVTTDQLKDYVWKTLKSGKVVPGFGHGVLRKTDPRYSCQREFALKHLPEDPLFQLVSKLYEVVPPILTELGKVKNPWPNVDAHSGVLLNHFGLSEARYYTVLFGVSRSMGIGSQLIWDRALGLPLERPKSVTMEWLENYCKNKAA

SEQ ID NO: 13512 - protein, 441 aa, Zea mays subsp. mays
  peptide (1)..(441): Ceres Seq. ID no. 12361801
  misc_feature (47)..(424): Pfam Name: Citrate synthase Pfam Description: Citrate synthase
  misc_feature (1)..(441): Homolog of NCBI NO: 11066954 NR Description: citrate synthase [Oryza sativa]
  misc_feature (1)..(441): Homolog of NCBI NO: 18406515 NR Description: citrate synthase; protein id: At2g44350.1, by cDNA: 16528., supported by cDNA: gi_14423561 [Arabidopsis >gi|27735166|sp|P20115|CISY_ARATH Citrate synthase, mitochondrial
  misc_feature (1)..(441): Homolog of NCBI NO: 21553775 NR Description: citrate synthase [Arabidopsis thaliana]
  misc_feature (1)..(441): Homolog of NCBI NO: 15982952 NR Description: citrate synthase [Prunus persica]
  misc_feature (1)..(441): Homolog of NCBI NO: 30689693 NR Description: citrate synthase [Arabidopsis thaliana]
  misc_feature (118)..(441): Homolog of NCBI NO: 5441892 NR Description: ESTs C96653(C10531),C96654(C10531),C28571(C61641) to a region of the predicted gene.~Similar to citrate synthetase.
  misc_feature (1)..(103): Homolog of NCBI NO: 5441892 NR Description: ESTs C96653(C10531),C96654(C10531),C28571(C61641) to a region of the predicted gene.~Similar to citrate synthetase.
  misc_feature (1)..(440): Homolog of NCBI NO: 8928010 NR Description: Citrate synthase, mitochondrial precursor
  misc_feature (1)..(441): Homolog of NCBI NO: 1352088 NR Description: Citrate synthase, mitochondrial precursor
  misc_feature (1)..(437): Homolog of NCBI NO: 1556429 NR Description: citrate synthase [Nicotiana tabacum]
MQSASDLDLKSQLQELIPEQQDRLKKLKSEHGKTQLGNITVDMVLGGMRGMTGMLWETSLLDPEEGIRFRGLSIPECQKVLPTAVKGGEPLPEGLLWLLLTGKVPTKEQVDALSKELLARSTVPAHVYKTIDALPVDAHPMTQFTTGVMALQVESEFQKAYDNGLPKSKFWEPTYEDCLNLIARLPPVSSYVYRRIFKSGKSIEADNSLDYAANFSHMLGFDDQKMLELMRLYVTIHTDHEGGNVSAHTGHLVGSALSDPYLSFAAALNGLAGPLHGLANQEVLLWIKSVIEETGSGVTTDQLKDYVWKTLKSGKVVPGFGHGVLRKTDPRYSCQREFALKHLPEDPLFQLVSKLYEVVPPILTELGKVKNPWPNVDAHSGVLLNHFGLSEARYYTVLFGVSRSMGIGSQLIWDRALGLPLERPKSVTMEWLENYCKNKAA

SEQ ID NO: 13513 - DNA, 1082 bp, Zea mays subsp. mays
  misc_feature (1)..(1082): Ceres Seq. ID no. 12342470
  misc_feature: MA Experiment ID: 108527 Result: Down-regulated in Transcription
  misc_feature: MA Experiment 108527 PARAMETER Experiment Name: Zm_5mM_NO_P Parameter: Age (day) Value: 8
  misc_feature: MA Experiment 108527 PARAMETER Experiment Name: Zm_5mM_NO_P Parameter: Organism Value: Zea mays
  misc_feature: MA Experiment 108527 PARAMETER Experiment Name: Zm_5mM_NO_P Parameter: Plant Line Value: 35A19
  misc_feature: MA Experiment 108527 PARAMETER Experiment Name: Zm_5mM_NO_P Parameter: Timepoint (hr) Value: 6
  misc_feature: MA Experiment 108527 PARAMETER Experiment Name: Zm_5mM_NO_P Parameter: Tissue Value: Aerial
  misc_feature: MA Experiment 108527 PARAMETER Experiment Name: Zm_5mM_NO_P Parameter: Treatment Value: 5mM NO vs. No Treatment
  misc_feature: MA Experiment ID: 108544 Result: Up-regulated in Transcription
aagcattatcggcgcatgtccacgttgattcatcaatcagttccacaatccacttgcctcggccgctatcgtgaccgggaacaacaactgcgagatggccacggtggagacctcgggcacggcgatagggtcctccgggagatgggcactacacggcaagacagccctcgtcaccggcggcacccgcggcatcgggcgtgcggtagtggaggagctggcggcgctgggggcggccgtgcacacatgctcccggaaggcggaggagctcggcgagcgcatcaaggagtgggaggccaggggattcagcgttaccgggtccgtctgcgacctctccgagagggaccagcgggagcggttgctccgcgaggttgccgaccgcttcggcggcaagctcaacatcctcgtaaacaatgtaggaacaaacataaggaaaccaactactgagtttactgcagaggaatactcgtttctgatggctactaatcttgaatctgcatatcacttgtgccaaattgcacatcctcttttgaaattatctgggtcaggcagcattatattcatatcatctgttgctggagcgataggaatctttagtggaactatatatgctatgactaaaggtgccattaaccagctaaccaagaatttagcttgtgaatgggctaaggacaacataagagccaactctgtcgctccgtggtacatcaccacttcacttacggaaggaattttggcaaataagaactttgaggaacaagttgtgagtcgaactccgcttggacgtgtcggagaacctggagaagtatcggcacttgttgcttttctttgcatgccgggttccacttatattagcggccagacgattgcggtcgacggaggtatgactgtgaacgggttttaccctcccaagccctaggcggcagctgccatgtttctttgtgctgaggaaacgacaatagctgttgttcttggttgttgagaaaaaaaatctaataaaatgtatgtaaaggtaaggttgtcatgttgatactgttcattacattacataattctatcagggcaatgtgaagaacgttgtgttt

SEQ ID NO: 13514 - protein, 273 aa, Zea mays subsp. mays
  peptide (1)..(273): Ceres Seq. ID no. 12342471
  misc_feature (1)..(261): Homolog of NCBI NO: 34902058 NR Description: putative pfam00106, adh_short, short chain
  misc_feature (2)..(212): Homolog of NCBI NO: 29893663 NR Description: unknown protein [Oryza sativa (japonica
  misc_feature (205)..(262): Homolog of NCBI NO: 29893663 NR Description: unknown protein [Oryza sativa (japonica
  misc_feature (36)..(270): Homolog of NCBI NO: 34902060 NR Description: hypothetical protein [Oryza sativa (japonica group)] >gi|29893653|gb|AAP06907.1| hypothetical protein [Oryza
  misc_feature (10)..(34): Homolog of NCBI NO: 34902060 NR Description: hypothetical protein [Oryza sativa (japonica group)] >gi|29893653|gb|AAP06907.1| hypothetical protein [Oryza
  misc_feature (16)..(273): Homolog of NCBI NO: 15239327 NR Description: short chain alcohol dehydrogenase-like; protein
  misc_feature (16)..(273): Homolog of NCBI NO: 21536785 NR Description: short chain alcohol dehydrogenase-like
  misc_feature (11)..(268): Homolog of NCBI NO: 15227075 NR Description: putative tropinone reductase; protein id: supported by cDNA: 14555., supported by cDNA: gi_17473659, by cDNA: gi_20148626 [Arabidopsis thaliana]
  misc_feature (7)..(270): Homolog of NCBI NO: 15227060 NR Description: putative tropinone reductase; protein id: [Arabidopsis thaliana] >gi|25283419|pir||D84694 probable
  misc_feature (7)..(270): Homolog of NCBI NO: 28393476 NR Description: putative tropinone reductase [Arabidopsis
MATVETSGTAIGSSGRWALHGKTALVTGGTRGIGRAVVEELAALGAAVHTCSRKAEELGERIKEWEARGFSVTGSVCDLSERDQRERLLREVADRFGGKLNILVNNVGTNIRKPTTEFTAEEYSFLMATNLESAYHLCQIAHPLLKLSGSGSIIFISSVAGAIGIFSGTIYAMTKGAINQLTKNLACEWAKDNIRANSVAPWYITTSLTEGILANKNFEEQVVSRTPLGRVGEPGEVSALVAFLCMPGSTYISGQTIAVDGGMTVNGFYPPKP

SEQ ID NO: 13515 - protein, 147 aa, Zea mays subsp. mays
  peptide (1)..(147): Ceres Seq. ID no. 12342472
  misc_feature (1)..(135): Homolog of NCBI NO: 34902058 NR Description: putative pfam00106, adh_short, short chain
  misc_feature (1)..(86): Homolog of NCBI NO: 29893663 NR Description: unknown protein [Oryza sativa (japonica
  misc_feature (79)..(136): Homolog of NCBI NO: 29893663 NR Description: unknown protein [Oryza sativa (japonica
  misc_feature (1)..(144): Homolog of NCBI NO: 34902060 NR Description: hypothetical protein [Oryza sativa (japonica group)] >gi|29893653|gb|AAP06907.1| hypothetical protein [Oryza
  misc_feature (1)..(147): Homolog of NCBI NO: 15239327 NR Description: short chain alcohol dehydrogenase-like; protein
  misc_feature (1)..(147): Homolog of NCBI NO: 21536785 NR Description: short chain alcohol dehydrogenase-like
  misc_feature (1)..(142): Homolog of NCBI NO: 15227075 NR Description: putative tropinone reductase; protein id: supported by cDNA: 14555., supported by cDNA: gi_17473659, by cDNA: gi_20148626 [Arabidopsis thaliana]
  misc_feature (1)..(144): Homolog of NCBI NO: 15227060 NR Description: putative tropinone reductase; protein id: [Arabidopsis thaliana] >gi|25283419|pir||D84694 probable
  misc_feature (1)..(144): Homolog of NCBI NO: 28393476 NR Description: putative tropinone reductase [Arabidopsis
  misc_feature (1)..(147): Homolog of NCBI NO: 15227076 NR Description: putative tropinone reductase; protein id: supported by cDNA: 2618., supported by cDNA: gi_15010623, by cDNA: gi_19699255 [Arabidopsis thaliana]
MATNLESAYHLCQIAHPLLKLSGSGSIIFISSVAGAIGIFSGTIYAMTKGAINQLTKNLACEWAKDNIRANSVAPWYITTSLTEGILANKNFEEQVVSRTPLGRVGEPGEVSALVAFLCMPGSTYISGQTIAVDGGMTVNGFYPPKP

SEQ ID NO: 13516 - protein, 147 aa, Zea mays subsp. mays
  peptide (1)..(147): Ceres Seq. ID no. 12342473
KHYRRMSTLIHQSVPQSTCLGRYRDREQQLRDGHGGDLGHGDRVLREMGTTRQDSPRHRRHPRHRACGSGGAGGAGGGRAHMLPEGGGARRAHQGVGGQGIQRYRVRLRPLREGPAGAVAPRGCRPLRRQAQHPRKQCRNKHKETNY

SEQ ID NO: 13517 - DNA, 1405 bp, Zea mays subsp. mays
  misc_feature (1)..(1405): Ceres Seq. ID no. 12374348
  misc_feature: MA Experiment ID: 108522 Result: Up-regulated in Transcription
  misc_feature: MA Experiment 108522 PARAMETER Experiment Name: Zm_42deg_Heat_P Parameter: Age (day) Value: 8
  misc_feature: MA Experiment 108522 PARAMETER Experiment Name: Zm_42deg_Heat_P Parameter: Organism Value: Zea mays
  misc_feature: MA Experiment 108522 PARAMETER Experiment Name: Zm_42deg_Heat_P Parameter: Plant Line Value: 35A19
  misc_feature: MA Experiment 108522 PARAMETER Experiment Name: Zm_42deg_Heat_P Parameter: Temperature (deg C) Value: 42 vs. 22
  misc_feature: MA Experiment 108522 PARAMETER Experiment Name: Zm_42deg_Heat_P Parameter: Timepoint (hr) Value: 1
  misc_feature: MA Experiment 108522 PARAMETER Experiment Name: Zm_42deg_Heat_P Parameter: Tissue Value: Aerial
  misc_feature: MA Experiment ID: 108534 Result: Up-regulated in Transcription
  misc_feature: MA Experiment 108534 PARAMETER Experiment Name: Zm_4deg_Cold_P Parameter: Age (hr) Value: 8
  misc_feature: MA Experiment 108534 PARAMETER Experiment Name: Zm_4deg_Cold_P Parameter: Organism Value: Zea mays
  misc_feature: MA Experiment 108534 PARAMETER Experiment Name: Zm_4deg_Cold_P Parameter: Plant Line Value: 35A19
  misc_feature: MA Experiment 108534 PARAMETER Experiment Name: Zm_4deg_Cold_P Parameter: Temperature (deg C) Value: 4 vs. 22
  misc_feature: MA Experiment 108534 PARAMETER Experiment Name: Zm_4deg_Cold_P Parameter: Timepoint (hr) Value: 6
  misc_feature: MA Experiment 108534 PARAMETER Experiment Name: Zm_4deg_Cold_P Parameter: Tissue Value: Aerial
gattattctgtttgctctcgttcaagtcatcgtctggtcgcgtcggcagcagacacccagagccggagggagcgccatggccgcgtcggatctggagagcaaagccaaggaggccttcgtcgacgacgacttcgagctggccgccgaactctacacccaggccatcgacgccgggcccgccactgccgatctctacgccgaccgcgcccaggcgcacatcaagctcggcaactacactgaggctgtggcagatgctaacaaagcaattggtcttgatcctacaatgcataaagcctactaccggaaaggtgctgcatgcattaatcttgaagaataccaaactgcaaaggctgctcttgagttaggttcttcctatgcaccaggcgattcaaggtttacccgtctattgaaggaatgtgatgagcgcattgctgaggaatctagccaggcaccagcaaagaatgtcgatgctcctgtagctgctactgttgaggacaaggaggatgtcgcaaatatggataatacaccgccagtggtagaacccccaagcaaacctaaatataggcatgactactacaacagtgccacagaagtggtcctcacaatatatgctaagggtgttcctgctgatagtgtagtcattgattttggtgaacagatgttaagtgtatccattgaagtacctggtgaagaaccgtaccattttcagccccgtctgttttctaaggttatccctgagaaatgcaagtatcaagttttgtccaccaaggtcgaaatacgccttgcaaaagctgagcaggtgacatggacaaccctggattatagtggaagaccaaaggctattccccagaagataagcacaccagctgaaacagccccaagaccttcatacccatcttcaaagtcaaaaaaggactgggataaactggaagctgaagtaaaaaaggaggagaaggaagaaaaacttgaaggtgatgctgcattgaacaagttcttccgtgatatctacaaggatgctgatgaagatatgcggagggccatggacaagtcattcagggaatctaatggtaccgttctctcaaccaattggaaagatgttggatcaaagacggtggaagcgagccctcctgatggtatggagctcaagaagtgggaaatttgaagtttggactgcccctcttgtaaatccaggtcttggaagttatgacctagttctgtccacccatttggtgtcgtaagtttggttaagtgtgtgtgtgtttttggttcagctgtcgttcgaggaaaagctactgtaagttgtggactgtgtaaaagctgcaatagattgtgggttgtgaaaaaggtgtatgctgtttaatttaaacaagcataaaacttacacgtatctctattttttcttttt

SEQ ID NO: 13518 - protein, 386 aa, Zea mays subsp. mays
  peptide (1)..(386): Ceres Seq. ID no. 12374349
  misc_feature (185)..(272): Pfam Name: CS domain Pfam Description: CS domain
  misc_feature (27)..(385): Homolog of NCBI NO: 34912836 NR Description: Sgt1 [Oryza sativa (japonica cultivar-group)]
  misc_feature (27)..(385): Homolog of NCBI NO: 6581058 NR Description: Sgt1 [Oryza sativa]
  misc_feature (24)..(385): Homolog of NCBI NO: 17017306 NR Description: SGT1 [Hordeum vulgare]
  misc_feature (28)..(386): Homolog of NCBI NO: 29468339 NR Description: SGT1 [Nicotiana benthamiana]
  misc_feature (28)..(386): Homolog of NCBI NO: 17017308 NR Description: SGT1a [Arabidopsis thaliana]
  misc_feature (28)..(385): Homolog of NCBI NO: 40974917 NR Description: SGT1-like protein [Brassica oleracea]
  misc_feature (28)..(386): Homolog of NCBI NO: 15236528 NR Description: phosphatase like protein; protein id: supported by cDNA: gi_17017307, supported by cDNA: gi_17381043, by cDNA: gi_20465860 [Arabidopsis thaliana]
  misc_feature (28)..(385): Homolog of NCBI NO: 15237122 NR Description: putative protein; protein id: At4g11260.1, by cDNA: 152712., supported by cDNA: gi_13877932, supported by gi_16226817, supported by cDNA: gi_17017309 [Arabidopsis
  misc_feature (28)..(385): Homolog of NCBI NO: 40974915 NR Description: SGT1-like protein [Brassica oleracea]
  misc_feature (59)..(386): Homolog of NCBI NO: 6468695 NR Description: putative protein phosphatase [Rubus idaeus]
IILFALVQVIVWSRRQQTPRAGGSAMAASDLESKAKEAFVDDDFELAAELYTQAIDAGPATADLYADRAQAHIKLGNYTEAVADANKAIGLDPTMHKAYYRKGAACINLEEYQTAKAALELGSSYAPGDSRFTRLLKECDERIAEESSQAPAKNVDAPVAATVEDKEDVANMDNTPPVVEPPSKPKYRHDYYNSATEVVLTIYAKGVPADSVVIDFGEQMLSVSIEVPGEEPYHFQPRLFSKVIPEKCKYQVLSTKVEIRLAKAEQVTWTTLDYSGRPKAIPQKISTPAETAPRPSYPSSKSKKDWDKLEAEVKKEEKEEKLEGDAALNKFFRDIYKDADEDMRRAMDKSFRESNGTVLSTNWKDVGSKTVEASPPDGMELKKWEI

SEQ ID NO: 13519 - protein, 361 aa, Zea mays subsp. mays
  peptide (1)..(361): Ceres Seq. ID no. 12374350
  misc_feature (160)..(247): Pfam Name: CS domain Pfam Description: CS domain
  misc_feature (2)..(360): Homolog of NCBI NO: 34912836 NR Description: Sgt1 [Oryza sativa (japonica cultivar-group)]
  misc_feature (2)..(360): Homolog of NCBI NO: 6581058 NR Description: Sgt1 [Oryza sativa]
  misc_feature (1)..(360): Homolog of NCBI NO: 17017306 NR Description: SGT1 [Hordeum vulgare]
  misc_feature (3)..(361): Homolog of NCBI NO: 29468339 NR Description: SGT1 [Nicotiana benthamiana]
  misc_feature (3)..(361): Homolog of NCBI NO: 17017308 NR Description: SGT1a [Arabidopsis thaliana]
  misc_feature (3)..(360): Homolog of NCBI NO: 40974917 NR Description: SGT1-like protein [Brassica oleracea]
  misc_feature (3)..(361): Homolog of NCBI NO: 15236528 NR Description: phosphatase like protein; protein id: supported by cDNA: gi_17017307, supported by cDNA: gi_17381043, by cDNA: gi_20465860 [Arabidopsis thaliana]
  misc_feature (3)..(360): Homolog of NCBI NO: 15237122 NR Description: putative protein; protein id: At4g11260.1, by cDNA: 152712., supported by cDNA: gi_13877932, supported by gi_16226817, supported by cDNA: gi_17017309 [Arabidopsis
  misc_feature (3)..(360): Homolog of NCBI NO: 40974915 NR Description: SGT1-like protein [Brassica oleracea]
  misc_feature (34)..(361): Homolog of NCBI NO: 6468695 NR Description: putative protein phosphatase [Rubus idaeus]
MAASDLESKAKEAFVDDDFELAAELYTQAIDAGPATADLYADRAQAHIKLGNYTEAVADANKAIGLDPTMHKAYYRKGAACINLEEYQTAKAALELGSSYAPGDSRFTRLLKECDERIAEESSQAPAKNVDAPVAATVEDKEDVANMDNTPPVVEPPSKPKYRHDYYNSATEVVLTIYAKGVPADSVVIDFGEQMLSVSIEVPGEEPYHFQPRLFSKVIPEKCKYQVLSTKVEIRLAKAEQVTWTTLDYSGRPKAIPQKISTPAETAPRPSYPSSKSKKDWDKLEAEVKKEEKEEKLEGDAALNKFFRDIYKDADEDMRRAMDKSFRESNGTVLSTNWKDVGSKTVEASPPDGMELKKWEI

SEQ ID NO: 13520 - protein, 292 aa, Zea mays subsp. mays
  peptide (1)..(292): Ceres Seq. ID no. 12374351
  misc_feature (91)..(178): Pfam Name: CS domain Pfam Description: CS domain
  misc_feature (1)..(291): Homolog of NCBI NO: 34912836 NR Description: Sgt1 [Oryza sativa (japonica cultivar-group)]
  misc_feature (1)..(291): Homolog of NCBI NO: 6581058 NR Description: Sgt1 [Oryza sativa]
  misc_feature (1)..(291): Homolog of NCBI NO: 17017306 NR Description: SGT1 [Hordeum vulgare]
  misc_feature (1)..(292): Homolog of NCBI NO: 29468339 NR Description: SGT1 [Nicotiana benthamiana]
  misc_feature (1)..(292): Homolog of NCBI NO: 17017308 NR Description: SGT1a [Arabidopsis thaliana]
  misc_feature (1)..(291): Homolog of NCBI NO: 40974917 NR Description: SGT1-like protein [Brassica oleracea]
  misc_feature (1)..(292): Homolog of NCBI NO: 15236528 NR Description: phosphatase like protein; protein id: supported by cDNA: gi_17017307, supported by cDNA: gi_17381043, by cDNA: gi_20465860 [Arabidopsis thaliana]
  misc_feature (1)..(291): Homolog of NCBI NO: 15237122 NR Description: putative protein; protein id: At4g11260.1, by cDNA: 152712., supported by cDNA: gi_13877932, supported by gi_16226817, supported by cDNA: gi_17017309 [Arabidopsis
  misc_feature (1)..(291): Homolog of NCBI NO: 40974915 NR Description: SGT1-like protein [Brassica oleracea]
  misc_feature (1)..(292): Homolog of NCBI NO: 6468695 NR Description: putative protein phosphatase [Rubus idaeus]
MHKAYYRKGAACINLEEYQTAKAALELGSSYAPGDSRFTRLLKECDERIAEESSQAPAKNVDAPVAATVEDKEDVANMDNTPPVVEPPSKPKYRHDYYNSATEVVLTIYAKGVPADSVVIDFGEQMLSVSIEVPGEEPYHFQPRLFSKVIPEKCKYQVLSTKVEIRLAKAEQVTWTTLDYSGRPKAIPQKISTPAETAPRPSYPSSKSKKDWDKLEAEVKKEEKEEKLEGDAALNKFFRDIYKDADEDMRRAMDKSFRESNGTVLSTNWKDVGSKTVEASPPDGMELKKWEI

SEQ ID NO: 13521 - DNA, 1452 bp, Zea mays subsp. mays
  misc_feature (1)..(1452): Ceres Seq. ID no. 12364192
  misc_feature: MA Experiment ID: 108529 Result: Up-regulated in Transcription
  misc_feature: MA Experiment 108529 PARAMETER Experiment Name: Zm_Imbibed_Seeds_P Parameter: Age (day) Value: 5 vs. 2
  misc_feature: MA Experiment 108529 PARAMETER Experiment Name: Zm_Imbibed_Seeds_P Parameter: Organism Value: Zea mays
  misc_feature: MA Experiment 108529 PARAMETER Experiment Name: Zm_Imbibed_Seeds_P Parameter: Plant Line Value: 35A19
  misc_feature: MA Experiment 108529 PARAMETER Experiment Name: Zm_Imbibed_Seeds_P Parameter: Tissue Value: Roots vs. Embryo
  misc_feature: MA Experiment ID: 108530 Result: Up-regulated in Transcription
  misc_feature: MA Experiment 108530 PARAMETER Experiment Name: Zm_Imbibed_Seeds_P Parameter: Age (day) Value: 6 vs. 2
  misc_feature: MA Experiment 108530 PARAMETER Experiment Name: Zm_Imbibed_Seeds_P Parameter: Organism Value: Zea mays
  misc_feature: MA Experiment 108530 PARAMETER Experiment Name: Zm_Imbibed_Seeds_P Parameter: Plant Line Value: 35A19
  misc_feature: MA Experiment 108530 PARAMETER Experiment Name: Zm_Imbibed_Seeds_P Parameter: Tissue Value: Aerial vs. Embryo
  misc_feature: MA Experiment ID: 108534 Result: Down-regulated in Transcription
  misc_feature: MA Experiment 108534 PARAMETER Experiment Name: Zm_4deg_Cold_P Parameter: Age (hr) Value: 8
  misc_feature: MA Experiment 108534 PARAMETER Experiment Name: Zm_4deg_Cold_P Parameter: Organism Value: Zea mays
  misc_feature: MA Experiment 108534 PARAMETER Experiment Name: Zm_4deg_Cold_P Parameter: Plant Line Value: 35A19
  misc_feature: MA Experiment 108534 PARAMETER Experiment Name: Zm_4deg_Cold_P Parameter: Temperature (deg C) Value: 4 vs. 22
  misc_feature: MA Experiment 108534 PARAMETER Experiment Name: Zm_4deg_Cold_P Parameter: Timepoint (hr) Value: 6
  misc_feature: MA Experiment 108534 PARAMETER Experiment Name: Zm_4deg_Cold_P Parameter: Tissue Value: Aerial
  misc_feature: MA Experiment ID: 108535 Result: Down-regulated in Transcription
  misc_feature: MA Experiment 108535 PARAMETER Experiment Name: Zm_Meristem_P Parameter: Age (day) Value: 8
  misc_feature: MA Experiment 108535 PARAMETER Experiment Name: Zm_Meristem_P Parameter: Organism Value: Zea mays
  misc_feature: MA Experiment 108535 PARAMETER Experiment Name: Zm_Meristem_P Parameter: Plant Line Value: 35A19
  misc_feature: MA Experiment 108535 PARAMETER Experiment Name: Zm_Meristem_P Parameter: Tissue Value: Root Meristem vs. Above Root Meristem
  misc_feature: MA Experiment ID: 108544 Result: Up-regulated in Transcription
  misc_feature: MA Experiment ID: 20000535 Result: Down-regulated in Transcription
  misc_feature: MA Experiment 20000535 PARAMETER Experiment Name: Zm_Hybrid_Seed_Dev_P Parameter: DAP Value: 30 vs. 12
  misc_feature: MA Experiment 20000535 PARAMETER Experiment Name: Zm_Hybrid_Seed_Dev_P Parameter: Organism Value: Zea mays
  misc_feature: MA Experiment 20000535 PARAMETER Experiment Name: Zm_Hybrid_Seed_Dev_P Parameter: Plant Line Value: 35A19
  misc_feature: MA Experiment 20000535 PARAMETER Experiment Name: Zm_Hybrid_Seed_Dev_P Parameter: Tissue Value: Embryo vs. Unfert Floret
  misc_feature: MA Experiment ID: 20001608 Result: Down-regulated in Transcription
  misc_feature: MA Experiment 20001608 PARAMETER Experiment Name: Zm_50ppm_KNO3_L-to-H_P Parameter: Age (day) Value: 21
  misc_feature: MA Experiment 20001608 PARAMETER Experiment Name: Zm_50ppm_KNO3_L-to-H_P Parameter: Organism Value: Zea mays
  misc_feature: MA Experiment 20001608 PARAMETER Experiment Name: Zm_50ppm_KNO3_L-to-H_P Parameter: Plant Line Value: 35A19
  misc_feature: MA Experiment 20001608 PARAMETER Experiment Name: Zm_50ppm_KNO3_L-to-H_P Parameter: Timepoint (hr) Value: 48
  misc_feature: MA Experiment 20001608 PARAMETER Experiment Name: Zm_50ppm_KNO3_L-to-H_P Parameter: Tissue Value: Shoots
  misc_feature: MA Experiment 20001608 PARAMETER Experiment Name: Zm_50ppm_KNO3_L-to-H_P Parameter: Treatment Value: 50ppm KNO3 vs. 50ppm KCl
gcacgagaccattacctagaacatcctaatcaaagacgctcgtgccagcaggccattcttctcgccttactccctcacagaacccagtaaaatatcgccagtcccgccgtcgagatggccccacgccgcctgctcgtcctcgccgtcgtcgccctcgcggccaccgccgccgcggccaactccggcttcgcggactccaacccgatccgccccgtcaccgaccgcgcggcctccgcgctcgagtccacggtcttcgccgcgctcggccgcacccgcgacgcgctccgcttcgcacgcttcgccgtcaggtacggcaagagctacgagagcgcggcggaggtccacaagcggttcaggatcttctccgagagcctccagctggtccgctccaccaaccgcaaaggcctctcctaccgcctcggcatcaaccgcttcgcggacatgagctgggaggagttccgtgcgacccggctcggcgcagcccagaactgctccgccacgcttaccggcaaccaccggatgcgcgccgccgccgttgcgctgccggagacgaaagactggagggaggatgggattgtgagcccagtgaaaaaccagggccactgtggatcatgctggaccttcagcactactggtgcacttgaggctgcatatacccaggcaactggcaagcccatctctctctctgagcaacagcttgttgactgtggttttgcattcaacaatttcggatgcaacggaggccttccatcccaggcctttgaatacatcaaatacaatggtggccttgacactgaggaatcttacccttaccaaggtgtcaatggaatctgcaagtttaagaatgagaatgttggagtcaaggttttggactcggttaacatcaccctgggtgctgaggatgaactgaaggatgctgttggtctggttcgcccagttagtgttgccttcgaggtgatcactggtttcaggctgtacaagagcggagtttacactagcgaccattgtggaactacaccgatggatgtgaaccacgctgttctggctgttggctacggtgtcgaagatggtgtaccctactggctcatcaagaactcatggggcgctgactggggtgatgagggttacttcaagatggaaatgggcaagaacatgtgcggtgttgctacgtgtgcatcctaccctattgtcgcatgaggcccttacgaaatgttacatggtctgtttggcatcaataatgcatgtttaacctgagcttggcgatgggttatacagaacggaaactctgtttgtgaatagaaaatcatgaagggaaggagttgaccggattcctgcttgtacgtctccccgactgtgtaggtagattgtcagttggggttccgaagtactctactcatacgtgtgtatgacagtttatttatgaaacaaaatacgcattgatcgttatggtcc

SEQ ID NO: 13522 - protein, 360 aa, Zea mays subsp. mays
  peptide (1)..(360): Ceres Seq. ID no. 12364193
  misc_feature (143)..(358): Pfam Name: Papain family cysteine protease Pfam Description: Papain family cysteine protease
  misc_feature (1)..(360): Homolog of NCBI NO: 1491774 NR Description: cysteine protease [Zea mays]
  misc_feature (1)..(360): Homolog of NCBI NO: 1706261 NR Description: Cysteine proteinase 2 precursor
  misc_feature (6)..(360): Homolog of NCBI NO: 113603 NR Description: Thiol protease aleurain precursor
  misc_feature (1)..(360): Homolog of NCBI NO: 129233 NR Description: Oryzain gamma chain precursor
  misc_feature (6)..(360): Homolog of NCBI NO: 67656 NR Description: aleurain (EC 3.4.22.-) precursor - barley
  misc_feature (1)..(360): Homolog of NCBI NO: 6851030 NR Description: cysteine protease [Lolium multiflorum]
  misc_feature (1)..(360): Homolog of NCBI NO: 18141289 NR Description: senescence-associated cysteine protease [Brassica
  misc_feature (1)..(360): Homolog of NCBI NO: 18424347 NR Description: cysteine proteinase AALP; protein id: supported by cDNA: 8989., supported by cDNA: gi_13430721, by cDNA: gi_7230639 [Arabidopsis thaliana]
  misc_feature (1)..(360): Homolog of NCBI NO: 23397070 NR Description: putative cysteine proteinase AALP [Arabidopsis
  misc_feature (6)..(360): Homolog of NCBI NO: 8347420 NR Description: cysteine protease [Nicotiana tabacum]
MAPRRLLVLAVVALAATAAAANSGFADSNPIRPVTDRAASALESTVFAALGRTRDALRFARFAVRYGKSYESAAEVHKRFRIFSESLQLVRSTNRKGLSYRLGINRFADMSWEEFRATRLGAAQNCSATLTGNHRMRAAAVALPETKDWREDGIVSPVKNQGHCGSCWTFSTTGALEAAYTQATGKPISLSEQQLVDCGFAFNNFGCNGGLPSQAFEYIKYNGGLDTEESYPYQGVNGICKFKNENVGVKVLDSVNITLGAEDELKDAVGLVRPVSVAFEVITGFRLYKSGVYTSDHCGTTPMDVNHAVLAVGYGVEDGVPYWLIKNSWGADWGDEGYFKMEMGKNMCGVATCASYPIVA

SEQ ID NO: 13523 - protein, 251 aa, Zea mays subsp. mays
  peptide (1)..(251): Ceres Seq. ID no. 12364194
  misc_feature (34)..(249): Pfam Name: Papain family cysteine protease Pfam Description: Papain family cysteine protease
  misc_feature (1)..(251): Homolog of NCBI NO: 1491774 NR Description: cysteine protease [Zea mays]
  misc_feature (1)..(251): Homolog of NCBI NO: 1706261 NR Description: Cysteine proteinase 2 precursor
  misc_feature (1)..(251): Homolog of NCBI NO: 113603 NR Description: Thiol protease aleurain precursor
  misc_feature (1)..(251): Homolog of NCBI NO: 129233 NR Description: Oryzain gamma chain precursor
  misc_feature (1)..(251): Homolog of NCBI NO: 67656 NR Description: aleurain (EC 3.4.22.-) precursor - barley
  misc_feature (1)..(251): Homolog of NCBI NO: 6851030 NR Description: cysteine protease [Lolium multiflorum]
  misc_feature (1)..(251): Homolog of NCBI NO: 18141289 NR Description: senescence-associated cysteine protease [Brassica
  misc_feature (1)..(251): Homolog of NCBI NO: 18424347 NR Description: cysteine proteinase AALP; protein id: supported by cDNA: 8989., supported by cDNA: gi_13430721, by cDNA: gi_7230639 [Arabidopsis thaliana]
  misc_feature (1)..(251): Homolog of NCBI NO: 23397070 NR Description: putative cysteine proteinase AALP [Arabidopsis
  misc_feature (1)..(251): Homolog of NCBI NO: 8347420 NR Description: cysteine protease [Nicotiana tabacum]
MSWEEFRATRLGAAQNCSATLTGNHRMRAAAVALPETKDWREDGIVSPVKNQGHCGSCWTFSTTGALEAAYTQATGKPISLSEQQLVDCGFAFNNFGCNGGLPSQAFEYIKYNGGLDTEESYPYQGVNGICKFKNENVGVKVLDSVNITLGAEDELKDAVGLVRPVSVAFEVITGFRLYKSGVYTSDHCGTTPMDVNHAVLAVGYGVEDGVPYWLIKNSWGADWGDEGYFKMEMGKNMCGVATCASYPIVA

SEQ ID NO: 13524 - protein, 225 aa, Zea mays subsp. mays
  peptide (1)..(225): Ceres Seq. ID no. 12364195
  misc_feature (8)..(223): Pfam Name: Papain family cysteine protease Pfam Description: Papain family cysteine protease
  misc_feature (1)..(225): Homolog of NCBI NO: 1491774 NR Description: cysteine protease [Zea mays]
  misc_feature (1)..(225): Homolog of NCBI NO: 1706261 NR Description: Cysteine proteinase 2 precursor
  misc_feature (1)..(225): Homolog of NCBI NO: 113603 NR Description: Thiol protease aleurain precursor
  misc_feature (1)..(225): Homolog of NCBI NO: 129233 NR Description: Oryzain gamma chain precursor
  misc_feature (1)..(225): Homolog of NCBI NO: 67656 NR Description: aleurain (EC 3.4.22.-) precursor - barley
  misc_feature (1)..(225): Homolog of NCBI NO: 6851030 NR Description: cysteine protease [Lolium multiflorum]
  misc_feature (1)..(225): Homolog of NCBI NO: 18141289 NR Description: senescence-associated cysteine protease [Brassica
  misc_feature (1)..(225): Homolog of NCBI NO: 18424347 NR Description: cysteine proteinase AALP; protein id: supported by cDNA: 8989., supported by cDNA: gi_13430721, by cDNA: gi_7230639 [Arabidopsis thaliana]
  misc_feature (1)..(225): Homolog of NCBI NO: 23397070 NR Description: putative cysteine proteinase AALP [Arabidopsis
  misc_feature (1)..(225): Homolog of NCBI NO: 8347420 NR Description: cysteine protease [Nicotiana tabacum]
MRAAAVALPETKDWREDGIVSPVKNQGHCGSCWTFSTTGALEAAYTQATGKPISLSEQQLVDCGFAFNNFGCNGGLPSQAFEYIKYNGGLDTEESYPYQGVNGICKFKNENVGVKVLDSVNITLGAEDELKDAVGLVRPVSVAFEVITGFRLYKSGVYTSDHCGTTPMDVNHAVLAVGYGVEDGVPYWLIKNSWGADWGDEGYFKMEMGKNMCGVATCASYPIVA

SEQ ID NO: 13525 - DNA, 1422 bp, Zea mays subsp. mays
  misc_feature (1)..(1422): Ceres Seq. ID no. 12353579
  misc_feature: MA Experiment ID: 108522 Result: Down-regulated in Transcription
  misc_feature: MA Experiment 108522 PARAMETER Experiment Name: Zm_42deg_Heat_P Parameter: Age (day) Value: 8
  misc_feature: MA Experiment 108522 PARAMETER Experiment Name: Zm_42deg_Heat_P Parameter: Organism Value: Zea mays
  misc_feature: MA Experiment 108522 PARAMETER Experiment Name: Zm_42deg_Heat_P Parameter: Plant Line Value: 35A19
  misc_feature: MA Experiment 108522 PARAMETER Experiment Name: Zm_42deg_Heat_P Parameter: Temperature (deg C) Value: 42 vs. 22
  misc_feature: MA Experiment 108522 PARAMETER Experiment Name: Zm_42deg_Heat_P Parameter: Timepoint (hr) Value: 1
  misc_feature: MA Experiment 108522 PARAMETER Experiment Name: Zm_42deg_Heat_P Parameter: Tissue Value: Aerial
  misc_feature: MA Experiment ID: 108529 Result: Up-regulated in Transcription
  misc_feature: MA Experiment 108529 PARAMETER Experiment Name: Zm_Imbibed_Seeds_P Parameter: Age (day) Value: 5 vs. 2
  misc_feature: MA Experiment 108529 PARAMETER Experiment Name: Zm_Imbibed_Seeds_P Parameter: Organism Value: Zea mays
  misc_feature: MA Experiment 108529 PARAMETER Experiment Name: Zm_Imbibed_Seeds_P Parameter: Plant Line Value: 35A19
  misc_feature: MA Experiment 108529 PARAMETER Experiment Name: Zm_Imbibed_Seeds_P Parameter: Tissue Value: Roots vs. Embryo
  misc_feature: MA Experiment ID: 108545 Result: Down-regulated in Transcription
  misc_feature: MA Experiment 108545 PARAMETER Experiment Name: Zm_Imbibed_Seeds_P Parameter: Age (day) Value: 3 vs. 2
  misc_feature: MA Experiment 108545 PARAMETER Experiment Name: Zm_Imbibed_Seeds_P Parameter: Organism Value: Zea mays
  misc_feature: MA Experiment 108545 PARAMETER Experiment Name: Zm_Imbibed_Seeds_P Parameter: Plant Line Value: 35A19
  misc_feature: MA Experiment 108545 PARAMETER Experiment Name: Zm_Imbibed_Seeds_P Parameter: Tissue Value: Aerial vs. Embryo
  misc_feature: MA Experiment ID: 108547 Result: Down-regulated in Transcription
  misc_feature: MA Experiment 108547 PARAMETER Experiment Name: Zm_Imbibed_Seeds_P Parameter: Age (day) Value: 4 vs. 2
  misc_feature: MA Experiment 108547 PARAMETER Experiment Name: Zm_Imbibed_Seeds_P Parameter: Organism Value: Zea mays
  misc_feature: MA Experiment 108547 PARAMETER Experiment Name: Zm_Imbibed_Seeds_P Parameter: Plant Line Value: 35A19
  misc_feature: MA Experiment 108547 PARAMETER Experiment Name: Zm_Imbibed_Seeds_P Parameter: Tissue Value: Aerial vs. Embryo
  misc_feature: MA Experiment ID: 108688 Result: Down-regulated in Transcription
  misc_feature: MA Experiment 108688 PARAMETER Experiment Name: Zm_Embryos-Flowers__P Parameter: Tissue Value: Immature Flowers vs. Aerial+
  misc_feature: MA Experiment ID: 20000108 Result: Down-regulated in Transcription
  misc_feature: MA Experiment 20000108 PARAMETER Experiment Name: Zm_Root-Tips_P Parameter: Age (day) Value: 12
  misc_feature: MA Experiment 20000108 PARAMETER Experiment Name: Zm_Root-Tips_P Parameter: Organism Value: Zea mays
  misc_feature: MA Experiment 20000108 PARAMETER Experiment Name: Zm_Root-Tips_P Parameter: Tissue Value: Root tips vs. Root mid region    35
  misc_feature: MA Experiment 20000108 PARAMETER Experiment Name: Zm_Root-Tips_P Parameter: Tissue Value: Root tips vs. Root mid region   Sequence Listing-Misc Features (4)
  misc_feature: MA Experiment ID: 20000487 Result: Down-regulated in Transcription
  misc_feature: MA Experiment 20000487 PARAMETER Experiment Name: Zm_50mM_NH4NO3_L_to_H_P Parameter: Organism Value: Zea mays
  misc_feature: MA Experiment 20000487 PARAMETER Experiment Name: Zm_50mM_NH4NO3_L_to_H_P Parameter: Timepoint (hr) Value: 4
  misc_feature: MA Experiment 20000487 PARAMETER Experiment Name: Zm_50mM_NH4NO3_L_to_H_P Parameter: Tissue Value: Leaves
  misc_feature: MA Experiment 20000487 PARAMETER Experiment Name: Zm_50mM_NH4NO3_L_to_H_P Parameter: Treatment Value: 50mM NH4NO3 vs. 100mM Mannitol
  misc_feature: MA Experiment ID: 20000488 Result: Down-regulated in Transcription
  misc_feature: MA Experiment 20000488 PARAMETER Experiment Name: Zm_50mM_NH4NO3_L_to_H_P Parameter: Organism Value: Zea mays
  misc_feature: MA Experiment 20000488 PARAMETER Experiment Name: Zm_50mM_NH4NO3_L_to_H_P Parameter: Timepoint (hr) Value: 8
  misc_feature: MA Experiment 20000488 PARAMETER Experiment Name: Zm_50mM_NH4NO3_L_to_H_P Parameter: Tissue Value: Leaves
  misc_feature: MA Experiment 20000488 PARAMETER Experiment Name: Zm_50mM_NH4NO3_L_to_H_P Parameter: Treatment Value: 50mM NH4NO3 vs. 100mM Mannitol
  misc_feature: MA Experiment ID: 20000535 Result: Down-regulated in Transcription
  misc_feature: MA Experiment 20000535 PARAMETER Experiment Name: Zm_Hybrid_Seed_Dev_P Parameter: DAP Value: 30 vs. 12
  misc_feature: MA Experiment 20000535 PARAMETER Experiment Name: Zm_Hybrid_Seed_Dev_P Parameter: Organism Value: Zea mays
  misc_feature: MA Experiment 20000535 PARAMETER Experiment Name: Zm_Hybrid_Seed_Dev_P Parameter: Plant Line Value: 35A19
  misc_feature: MA Experiment 20000535 PARAMETER Experiment Name: Zm_Hybrid_Seed_Dev_P Parameter: Tissue Value: Embryo vs. Unfert Floret
  misc_feature: MA Experiment ID: 20000632 Result: Up-regulated in Transcription
  misc_feature: MA Experiment 20000632 PARAMETER Experiment Name: Zm_Herbicide-Treatments_P Parameter: Timepoint (hr) Value: 4
  misc_feature: MA Experiment 20000632 PARAMETER Experiment Name: Zm_Herbicide-Treatments_P Parameter: Tissue Value: Aerial
  misc_feature: MA Experiment 20000632 PARAMETER Experiment Name: Zm_Herbicide-Treatments_P Parameter: Treatment Value: Glean vs. No Treatment
  misc_feature: MA Experiment ID: 20000633 Result: Up-regulated in Transcription
  misc_feature: MA Experiment 20000633 PARAMETER Experiment Name: Zm_Herbicide-Treatments_P Parameter: Timepoint (hr) Value: 4
  misc_feature: MA Experiment 20000633 PARAMETER Experiment Name: Zm_Herbicide-Treatments_P Parameter: Tissue Value: Aerial
  misc_feature: MA Experiment 20000633 PARAMETER Experiment Name: Zm_Herbicide-Treatments_P Parameter: Treatment Value: Trimec vs. No Treatment
  misc_feature: MA Experiment ID: 20001608 Result: Down-regulated in Transcription
  misc_feature: MA Experiment 20001608 PARAMETER Experiment Name: Zm_50ppm_KNO3_L-to-H_P Parameter: Age (day) Value: 21
  misc_feature: MA Experiment 20001608 PARAMETER Experiment Name: Zm_50ppm_KNO3_L-to-H_P Parameter: Organism Value: Zea mays
  misc_feature: MA Experiment 20001608 PARAMETER Experiment Name: Zm_50ppm_KNO3_L-to-H_P Parameter: Plant Line Value: 35A19
  misc_feature: MA Experiment 20001608 PARAMETER Experiment Name: Zm_50ppm_KNO3_L-to-H_P Parameter: Timepoint (hr) Value: 48
  misc_feature: MA Experiment 20001608 PARAMETER Experiment Name: Zm_50ppm_KNO3_L-to-H_P Parameter: Tissue Value: Shoots
  misc_feature: MA Experiment 20001608 PARAMETER Experiment Name: Zm_50ppm_KNO3_L-to-H_P Parameter: Treatment Value: 50ppm KNO3 vs. 50ppm KCl
gacagccacggccgcgacggcgtccgcgtgcaccggacaccacggccagacccagacggcaacgggaggccacacagccctctgaccaaacgcacggatccggccagccacccaccccgcccccctagcggccgccacccacccgtgcgcgcggcgcaccaaggcctggcccggcagtggcagccaggctctcacacgcctcgcctagtcgccttgccgccgcgcgttatataagccgccccggcaggcacggtcggtcgatccagcaatacccgacggcgcaagccagtgccgcgcccagatctccgcgacagatcagtcgttcgtccagctaactgcactgcacgcaatggccaccacggcgaccgaggcgaccaagacgactgcaccggcgcaggagcagcaggccaacggcaacggcaacggcgagcagaagacgcgccactccgaggtcggccacaagagcctgctcaagagcgacgacctctaccagtacatcctggacacgagcgtgtacccgcgggagccggagagcatgaaggagctgcgcgagatcaccgccaagcacccatggaacctgatgaccacctccgccgacgagggccagttcctcaacatgctcatcaagctcatcggcgccaagaagaccatggagatcggcgtctacaccggctactcgctcctcgccaccgcgctcgcactcccggaggacggcacgatcttggccatggacatcaaccgcgagaactacgagctaggccttccctgcatcaacaaggccggcgtgggccacaagatcgacttccgcgagggccccgcgctccccgtcctggacgacctcgtggcggacaaggagcagcacgggtcgttcgacttcgccttcgtggacgccgacaaggacaactacctcaactaccacgagcggctcctgaagctggtgaggcccggcggcctcatcggctacgacaacacgctgtggaacggctccgtcgtgctccccgacgacgcgcccatgcgcaagtacatccgcttctaccgcgacttcgtcctcgccctcaacagcgcgctcgccgccgacgaccgcgtcgagatctgccagctccccgtcggcgacggcgtcacgctctgccgccgcgtcaagtgaaaaaaagaaagaaaaaaaaaacacacataccctgcgttcctgctgcccccggctccgtctggcccccaccgccaccgacggcggcgccgcaccccccgttccaatcatatcgtagacgacgcgcagcattaaattatcaatcaccggctctggctctttcttggccctgtactgtactactatactaatgtcccttcttgtttttttttcttgggaattgtcgccgtttcagtatacgtaaaatctcgatgtcgataatacagtactactaccaattt

SEQ ID NO: 13526 - protein, 264 aa, Zea mays subsp. mays
  peptide (1)..(264): Ceres Seq. ID no. 12353580
  misc_feature (51)..(263): Pfam Name: O-methyltransferase Pfam Description: O-methyltransferase
  misc_feature (1)..(264): Homolog of NCBI NO: 32347443 NR Description: caffeoyl CoA 3-O-methyltransferase [Zea mays]
  misc_feature (1)..(264): Homolog of NCBI NO: 32347435 NR Description: caffeoyl CoA 3-O-methyltransferase [Zea mays]
  misc_feature (1)..(264): Homolog of NCBI NO: 32347447 NR Description: caffeoyl CoA 3-O-methyltransferase [Zea mays]
  misc_feature (1)..(264): Homolog of NCBI NO: 32347449 NR Description: caffeoyl CoA 3-O-methyltransferase [Zea mays]
  misc_feature (1)..(264): Homolog of NCBI NO: 30580384 NR Description: Caffeoyl-CoA O-methyltransferase 2
  misc_feature (1)..(264): Homolog of NCBI NO: 32347441 NR Description: caffeoyl CoA 3-O-methyltransferase [Zea mays]
  misc_feature (1)..(264): Homolog of NCBI NO: 32347431 NR Description: caffeoyl CoA 3-O-methyltransferase [Zea mays]
  misc_feature (5)..(264): Homolog of NCBI NO: 32347437 NR Description: caffeoyl CoA 3-O-methyltransferase [Zea mays]
  misc_feature (1)..(264): Homolog of NCBI NO: 37221545 NR Description: caffeoyl-CoA 3-O-methyltransferase 1 [Zea mays]
  misc_feature (1)..(264): Homolog of NCBI NO: 30580385 NR Description: Caffeoyl-CoA O-methyltransferase 1
MATTATEATKTTAPAQEQQANGNGNGEQKTRHSEVGHKSLLKSDDLYQYILDTSVYPREPESMKELREITAKHPWNLMTTSADEGQFLNMLIKLIGAKKTMEIGVYTGYSLLATALALPEDGTILAMDINRENYELGLPCINKAGVGHKIDFREGPALPVLDDLVADKEQHGSFDFAFVDADKDNYLNYHERLLKLVRPGGLIGYDNTLWNGSVVLPDDAPMRKYIRFYRDFVLALNSALAADDRVEICQLPVGDGVTLCRRVK

SEQ ID NO: 13527 - protein, 253 aa, Zea mays subsp. mays
  peptide (1)..(253): Ceres Seq. ID no. 12353581
  misc_feature (1)..(216): Homolog of NCBI NO: 23018788 NR Description: hypothetical protein [Thermobifida fusca]
MEPDDHLRRRGPVPQHAHQAHRRQEDHGDRRLHRLLAPRHRARTPGGRHDLGHGHQPRELRARPSLHQQGRRGPQDRLPRGPRAPRPGRPRGGQGAARVVRLRLRGRRQGQLPQLPRAAPEAGEARRPHRLRQHAVERLRRAPRRRAHAQVHPLLPRLRPRPQQRARRRRPRRDLPAPRRRRRHALPPRQVKKRKKKKTHIPCVPAAPGSVWPPPPPTAAPHPPFQSYRRRRAALNYQSPALALSWPCTVLLY

SEQ ID NO: 13528 - protein, 202 aa, Zea mays subsp. mays
  peptide (1)..(202): Ceres Seq. ID no. 12353582
  misc_feature (1)..(201): Pfam Name: O-methyltransferase Pfam Description: O-methyltransferase
  misc_feature (1)..(202): Homolog of NCBI NO: 30580384 NR Description: Caffeoyl-CoA O-methyltransferase 2
  misc_feature (1)..(202): Homolog of NCBI NO: 32347441 NR Description: caffeoyl CoA 3-O-methyltransferase [Zea mays]
  misc_feature (1)..(202): Homolog of NCBI NO: 32347443 NR Description: caffeoyl CoA 3-O-methyltransferase [Zea mays]
  misc_feature (1)..(202): Homolog of NCBI NO: 32347435 NR Description: caffeoyl CoA 3-O-methyltransferase [Zea mays]
  misc_feature (1)..(202): Homolog of NCBI NO: 32347447 NR Description: caffeoyl CoA 3-O-methyltransferase [Zea mays]
  misc_feature (1)..(202): Homolog of NCBI NO: 32347449 NR Description: caffeoyl CoA 3-O-methyltransferase [Zea mays]
  misc_feature (1)..(202): Homolog of NCBI NO: 32347431 NR Description: caffeoyl CoA 3-O-methyltransferase [Zea mays]
  misc_feature (1)..(202): Homolog of NCBI NO: 32347437 NR Description: caffeoyl CoA 3-O-methyltransferase [Zea mays]
  misc_feature (1)..(202): Homolog of NCBI NO: 37221545 NR Description: caffeoyl-CoA 3-O-methyltransferase 1 [Zea mays]
  misc_feature (1)..(202): Homolog of NCBI NO: 30580385 NR Description: Caffeoyl-CoA O-methyltransferase 1
MKELREITAKHPWNLMTTSADEGQFLNMLIKLIGAKKTMEIGVYTGYSLLATALALPEDGTILAMDINRENYELGLPCINKAGVGHKIDFREGPALPVLDDLVADKEQHGSFDFAFVDADKDNYLNYHERLLKLVRPGGLIGYDNTLWNGSVVLPDDAPMRKYIRFYRDFVLALNSALAADDRVEICQLPVGDGVTLCRRVK

SEQ ID NO: 13529 - DNA, 1539 bp, Zea mays subsp. mays
  misc_feature (1)..(1539): Ceres Seq. ID no. 12355783
  misc_feature: MA Experiment ID: 108556 Result: Down-regulated in Transcription
  misc_feature: MA Experiment 108556 PARAMETER Experiment Name: Zm_Drought_P Parameter: Age (day) Value: 9
  misc_feature: MA Experiment 108556 PARAMETER Experiment Name: Zm_Drought_P Parameter: Organism Value: Zea mays
  misc_feature: MA Experiment 108556 PARAMETER Experiment Name: Zm_Drought_P Parameter: Plant Line Value: 35A19
  misc_feature: MA Experiment 108556 PARAMETER Experiment Name: Zm_Drought_P Parameter: Timepoint (hr) Value: 24
  misc_feature: MA Experiment 108556 PARAMETER Experiment Name: Zm_Drought_P Parameter: Tissue Value: Aerial
  misc_feature: MA Experiment 108556 PARAMETER Experiment Name: Zm_Drought_P Parameter: Treatment Value: Drought vs. No Drought
  misc_feature: MA Experiment ID: 108689 Result: Down-regulated in Transcription
  misc_feature: MA Experiment 108689 PARAMETER Experiment Name: Zm_Drought_Roots_P Parameter: Age (day) Value: 9
  misc_feature: MA Experiment 108689 PARAMETER Experiment Name: Zm_Drought_Roots_P Parameter: Organism Value: Zea mays
  misc_feature: MA Experiment 108689 PARAMETER Experiment Name: Zm_Drought_Roots_P Parameter: Plant Line Value: 35A19
  misc_feature: MA Experiment 108689 PARAMETER Experiment Name: Zm_Drought_Roots_P Parameter: Timepoint (hr) Value: 24
  misc_feature: MA Experiment 108689 PARAMETER Experiment Name: Zm_Drought_Roots_P Parameter: Tissue Value: Roots
  misc_feature: MA Experiment 108689 PARAMETER Experiment Name: Zm_Drought_Roots_P Parameter: Treatment Value: Drought vs. No Drought
  misc_feature: MA Experiment ID: 20000479 Result: Down-regulated in Transcription
  misc_feature: MA Experiment 20000479 PARAMETER Experiment Name: Zm_Drought_P Parameter: Age (day) Value: 10
  misc_feature: MA Experiment 20000479 PARAMETER Experiment Name: Zm_Drought_P Parameter: Organism Value: Zea mays
  misc_feature: MA Experiment 20000479 PARAMETER Experiment Name: Zm_Drought_P Parameter: Plant Line Value: 35A19
  misc_feature: MA Experiment 20000479 PARAMETER Experiment Name: Zm_Drought_P Parameter: Timepoint (hr) Value: 48
  misc_feature: MA Experiment 20000479 PARAMETER Experiment Name: Zm_Drought_P Parameter: Tissue Value: Aerial
  misc_feature: MA Experiment 20000479 PARAMETER Experiment Name: Zm_Drought_P Parameter: Treatment Value: Drought vs. No Drought
  misc_feature: MA Experiment ID: 20000480 Result: Down-regulated in Transcription
  misc_feature: MA Experiment 20000480 PARAMETER Experiment Name: Zm_Drought_P Parameter: Age (day) Value: 11
  misc_feature: MA Experiment 20000480 PARAMETER Experiment Name: Zm_Drought_P Parameter: Organism Value: Zea mays
  misc_feature: MA Experiment 20000480 PARAMETER Experiment Name: Zm_Drought_P Parameter: Plant Line Value: 35A19
  misc_feature: MA Experiment 20000480 PARAMETER Experiment Name: Zm_Drought_P Parameter: Timepoint (hr) Value: 72
  misc_feature: MA Experiment 20000480 PARAMETER Experiment Name: Zm_Drought_P Parameter: Tissue Value: Aerial
  misc_feature: MA Experiment 20000480 PARAMETER Experiment Name: Zm_Drought_P Parameter: Treatment Value: Drought vs. No Drought
agtgcctccttaaacctcactgacgattcttcgttcatgtctccctcgcccaggggccgcaagagggcctgcgtcacctattgcatcagctacatcctcagctgcatcaccaagcactcccccgagtacagggtcctcatgatcggccgcatcctcgggggcatcgccacctcgctgctcttctccgccttcgagtcctggctcgtcgccgagcacaacaagagaggctttgacccgcagtggctgtccataacattctccaaagccatcttccttgggaacggcttaattgccattgtatctgggctatttgcgaaccttcttgctgagaacttgggttttggtcctgtggctccatttgatgcggctgcgtgctttctggcgattggcatggctatcataatgtcctcatggagtgaaaactacggagatccatctgaaagcaaggacctgatggcccagttcaaggttgcggctaaggcaattgcgtcagatgaaaagattgcattactgggagccatacagtcattgtttgagggctccatgtacacatttgtcttcctatggactccagcattgagtccaaatgaagaagacattcctcatggttttatttttgctacattcatgctgtcatccatgctgggtagctccatcgcgtcacgtctattagcccgaaagctcaaggttgaaggctatatgcagatcgtgttctcgatatcggctgtcacccttgtcctccctgtcgccaccaacatcttagtgccaacgtcttctgtgaaaggaggcagcgtatcaattggaggttctcttcagcttcttggtttctgcacctttgaggcatgtgttggcatattctggccgtcaatcatgaagatgagatctcagtacattcctgaggaagcgagaagcacaatcatgaacttcttccgcataccactcaacttatttgtttgtgtggtgctttacaacgtgaatgcattccctatcactgtcatgtttgggatgtgttctatcttcctcttcatggcagcaatcttgcagagacggctgatggttgtctctgatcaagtacacaaatcatcaactacacaagaaatgatcggggaagatgagccactaaatccttaggtgtcgacagaaccatacatgcgaaatcagatattgaagacgacgtacatactgcatttcgtttcgtcacctgtgcaataagatggacgtcaaaaccatgtagtagagtctagtggttttcgtttctgtagtgtagatttgaccaggctgctaagtttgcacctgtcccgagaagattagatgagcaagtcaatcaatattggctattcgcattgttgtttcttttttttaaaaaaaaaaaagatgttcgctttaaagtttaaacgatacggtatatatccttgtaagtgttgcattgctgcatctgatgacaattctggtggtgctgttactgactgttgagggctctctctacttggtcgttgtaagaactgttgcttcttaatgaaaaatgggctcaacaaattc

SEQ ID NO: 13530 - protein, 376 aa, Zea mays subsp. mays
  peptide (1)..(376): Ceres Seq. ID no. 12355784
  misc_feature (18)..(276): Pfam Name: Protein of unknown function (DUF791) Pfam Description: Protein of unknown function (DUF791)
  misc_feature (18)..(376): Homolog of NCBI NO: 34902182 NR Description: Putative transporter [Oryza sativa (japonica group)] >gi|27476097|gb|AAO17028.1| Putative transporter [Oryza
  misc_feature (18)..(376): Homolog of NCBI NO: 37536124 NR Description: putative transporter [Oryza sativa (japonica group)] >gi|10122032|gb|AAG13421.1| putative transporter [Oryza
  misc_feature (18)..(376): Homolog of NCBI NO: 15217708 NR Description: unknown protein; protein id: At1g64650.1
  misc_feature (18)..(375): Homolog of NCBI NO: 18417054 NR Description: putative protein; protein id: At4g27720.1, by cDNA: 113484., supported by cDNA: gi_13272472, supported by gi_15912260, supported by cDNA: gi_16930438 [Arabidopsis
  misc_feature (18)..(374): Homolog of NCBI NO: 30693172 NR Description: expressed protein [Arabidopsis thaliana]
  misc_feature (18)..(372): Homolog of NCBI NO: 6633826 NR Description: F1N19.22 [Arabidopsis thaliana]
  misc_feature (63)..(374): Homolog of NCBI NO: 11292198 NR Description: hypothetical protein F2K15.170 - Arabidopsis >gi|6723401|emb|CAB66410.1| putative protein [Arabidopsis
  misc_feature (18)..(74): Homolog of NCBI NO: 11292198 NR Description: hypothetical protein F2K15.170 - Arabidopsis >gi|6723401|emb|CAB66410.1| putative protein [Arabidopsis
  misc_feature (18)..(249): Homolog of NCBI NO: 7487513 NR Description: hypothetical protein T29A15.210 - Arabidopsis >gi|4469023|emb|CAB38284.1| putative protein [Arabidopsis >gi|7269626|emb|CAB81422.1| putative protein [Arabidopsis
  misc_feature (267)..(324): Homolog of NCBI NO: 7487513 NR Description: hypothetical protein T29A15.210 - Arabidopsis >gi|4469023|emb|CAB38284.1| putative protein [Arabidopsis >gi|7269626|emb|CAB81422.1| putative protein [Arabidopsis
SASLNLTDDSSFMSPSPRGRKRACVTYCISYILSCITKHSPEYRVLMIGRILGGIATSLLFSAFESWLVAEHNKRGFDPQWLSITFSKAIFLGNGLIAIVSGLFANLLAENLGFGPVAPFDAAACFLAIGMAIIMSSWSENYGDPSESKDLMAQFKVAAKAIASDEKIALLGAIQSLFEGSMYTFVFLWTPALSPNEEDIPHGFIFATFMLSSMLGSSIASRLLARKLKVEGYMQIVFSISAVTLVLPVATNILVPTSSVKGGSVSIGGSLQLLGFCTFEACVGIFWPSIMKMRSQYIPEEARSTIMNFFRIPLNLFVCVVLYNVNAFPITVMFGMCSIFLFMAAILQRRLMVVSDQVHKSSTTQEMIGEDEPLNP

SEQ ID NO: 13531 - protein, 364 aa, Zea mays subsp. mays
  peptide (1)..(364): Ceres Seq. ID no. 12355785
  misc_feature (6)..(264): Pfam Name: Protein of unknown function (DUF791) Pfam Description: Protein of unknown function (DUF791)
  misc_feature (6)..(364): Homolog of NCBI NO: 34902182 NR Description: Putative transporter [Oryza sativa (japonica group)] >gi|27476097|gb|AAO17028.1| Putative transporter [Oryza
  misc_feature (6)..(364): Homolog of NCBI NO: 37536124 NR Description: putative transporter [Oryza sativa (japonica group)] >gi|10122032|gb|AAG13421.1| putative transporter [Oryza
  misc_feature (6)..(364): Homolog of NCBI NO: 15217708 NR Description: unknown protein; protein id: At1g64650.1
  misc_feature (6)..(363): Homolog of NCBI NO: 18417054 NR Description: putative protein; protein id: At4g27720.1, by cDNA: 113484., supported by cDNA: gi_13272472, supported by gi_15912260, supported by cDNA: gi_16930438 [Arabidopsis
  misc_feature (6)..(362): Homolog of NCBI NO: 30693172 NR Description: expressed protein [Arabidopsis thaliana]
  misc_feature (6)..(360): Homolog of NCBI NO: 6633826 NR Description: F1N19.22 [Arabidopsis thaliana]
  misc_feature (51)..(362): Homolog of NCBI NO: 11292198 NR Description: hypothetical protein F2K15.170 - Arabidopsis >gi|6723401|emb|CAB66410.1| putative protein [Arabidopsis
  misc_feature (6)..(62): Homolog of NCBI NO: 11292198 NR Description: hypothetical protein F2K15.170 - Arabidopsis >gi|6723401|emb|CAB66410.1| putative protein [Arabidopsis
  misc_feature (6)..(237): Homolog of NCBI NO: 7487513 NR Description: hypothetical protein T29A15.210 - Arabidopsis >gi|4469023|emb|CAB38284.1| putative protein [Arabidopsis >gi|7269626|emb|CAB81422.1| putative protein [Arabidopsis
  misc_feature (255)..(312): Homolog of NCBI NO: 7487513 NR Description: hypothetical protein T29A15.210 - Arabidopsis >gi|4469023|emb|CAB38284.1| putative protein [Arabidopsis >gi|7269626|emb|CAB81422.1| putative protein [Arabidopsis
MSPSPRGRKRACVTYCISYILSCITKHSPEYRVLMIGRILGGIATSLLFSAFESWLVAEHNKRGFDPQWLSITFSKAIFLGNGLIAIVSGLFANLLAENLGFGPVAPFDAAACFLAIGMAIIMSSWSENYGDPSESKDLMAQFKVAAKAIASDEKIALLGAIQSLFEGSMYTFVFLWTPALSPNEEDIPHGFIFATFMLSSMLGSSIASRLLARKLKVEGYMQIVFSISAVTLVLPVATNILVPTSSVKGGSVSIGGSLQLLGFCTFEACVGIFWPSIMKMRSQYIPEEARSTIMNFFRIPLNLFVCVVLYNVNAFPITVMFGMCSIFLFMAAILQRRLMVVSDQVHKSSTTQEMIGEDEPLNP

SEQ ID NO: 13532 - protein, 330 aa, Zea mays subsp. mays
  peptide (1)..(330): Ceres Seq. ID no. 12355786
  misc_feature (1)..(230): Pfam Name: Protein of unknown function (DUF791) Pfam Description: Protein of unknown function (DUF791)
  misc_feature (1)..(330): Homolog of NCBI NO: 34902182 NR Description: Putative transporter [Oryza sativa (japonica group)] >gi|27476097|gb|AAO17028.1| Putative transporter [Oryza
  misc_feature (1)..(330): Homolog of NCBI NO: 37536124 NR Description: putative transporter [Oryza sativa (japonica group)] >gi|10122032|gb|AAG13421.1| putative transporter [Oryza
  misc_feature (1)..(330): Homolog of NCBI NO: 15217708 NR Description: unknown protein; protein id: At1g64650.1
  misc_feature (1)..(329): Homolog of NCBI NO: 18417054 NR Description: putative protein; protein id: At4g27720.1, by cDNA: 113484., supported by cDNA: gi_13272472, supported by gi_15912260, supported by cDNA: gi_16930438 [Arabidopsis
  misc_feature (1)..(328): Homolog of NCBI NO: 30693172 NR Description: expressed protein [Arabidopsis thaliana]
  misc_feature (1)..(326): Homolog of NCBI NO: 6633826 NR Description: F1N19.22 [Arabidopsis thaliana]
  misc_feature (17)..(328): Homolog of NCBI NO: 11292198 NR Description: hypothetical protein F2K15.170 - Arabidopsis >gi|6723401|emb|CAB66410.1| putative protein [Arabidopsis
  misc_feature (1)..(28): Homolog of NCBI NO: 11292198 NR Description: hypothetical protein F2K15.170 - Arabidopsis >gi|6723401|emb|CAB66410.1| putative protein [Arabidopsis
  misc_feature (1)..(203): Homolog of NCBI NO: 7487513 NR Description: hypothetical protein T29A15.210 - Arabidopsis >gi|4469023|emb|CAB38284.1| putative protein [Arabidopsis >gi|7269626|emb|CAB81422.1| putative protein [Arabidopsis
  misc_feature (221)..(278): Homolog of NCBI NO: 7487513 NR Description: hypothetical protein T29A15.210 - Arabidopsis >gi|4469023|emb|CAB38284.1| putative protein [Arabidopsis >gi|7269626|emb|CAB81422.1| putative protein [Arabidopsis
MIGRILGGIATSLLFSAFESWLVAEHNKRGFDPQWLSITFSKAIFLGNGLIAIVSGLFANLLAENLGFGPVAPFDAAACFLAIGMAIIMSSWSENYGDPSESKDLMAQFKVAAKAIASDEKIALLGAIQSLFEGSMYTFVFLWTPALSPNEEDIPHGFIFATFMLSSMLGSSIASRLLARKLKVEGYMQIVFSISAVTLVLPVATNILVPTSSVKGGSVSIGGSLQLLGFCTFEACVGIFWPSIMKMRSQYIPEEARSTIMNFFRIPLNLFVCVVLYNVNAFPITVMFGMCSIFLFMAAILQRRLMVVSDQVHKSSTTQEMIGEDEPLNP

SEQ ID NO: 13533 - DNA, 1411 bp, Zea mays subsp. mays
  misc_feature (1)..(1411): Ceres Seq. ID no. 12353544
  misc_feature: MA Experiment ID: 108528 Result: Up-regulated in Transcription
  misc_feature: MA Experiment 108528 PARAMETER Experiment Name: Zm_Imbibed_Seeds_P Parameter: Age (day) Value: 5 vs. 2
  misc_feature: MA Experiment 108528 PARAMETER Experiment Name: Zm_Imbibed_Seeds_P Parameter: Organism Value: Zea mays
  misc_feature: MA Experiment 108528 PARAMETER Experiment Name: Zm_Imbibed_Seeds_P Parameter: Plant Line Value: 35A19
  misc_feature: MA Experiment 108528 PARAMETER Experiment Name: Zm_Imbibed_Seeds_P Parameter: Tissue Value: Aerial vs. Embryo
  misc_feature: MA Experiment ID: 108530 Result: Up-regulated in Transcription
  misc_feature: MA Experiment 108530 PARAMETER Experiment Name: Zm_Imbibed_Seeds_P Parameter: Age (day) Value: 6 vs. 2
  misc_feature: MA Experiment 108530 PARAMETER Experiment Name: Zm_Imbibed_Seeds_P Parameter: Organism Value: Zea mays
  misc_feature: MA Experiment 108530 PARAMETER Experiment Name: Zm_Imbibed_Seeds_P Parameter: Plant Line Value: 35A19
  misc_feature: MA Experiment 108530 PARAMETER Experiment Name: Zm_Imbibed_Seeds_P Parameter: Tissue Value: Aerial vs. Embryo
  misc_feature: MA Experiment ID: 108544 Result: Up-regulated in Transcription
  misc_feature: MA Experiment ID: 108547 Result: Up-regulated in Transcription
  misc_feature: MA Experiment 108547 PARAMETER Experiment Name: Zm_Imbibed_Seeds_P Parameter: Age (day) Value: 4 vs. 2
  misc_feature: MA Experiment 108547 PARAMETER Experiment Name: Zm_Imbibed_Seeds_P Parameter: Organism Value: Zea mays
  misc_feature: MA Experiment 108547 PARAMETER Experiment Name: Zm_Imbibed_Seeds_P Parameter: Plant Line Value: 35A19
  misc_feature: MA Experiment 108547 PARAMETER Experiment Name: Zm_Imbibed_Seeds_P Parameter: Tissue Value: Aerial vs. Embryo
  misc_feature: MA Experiment ID: 108559 Result: Down-regulated in Transcription
  misc_feature: MA Experiment 108559 PARAMETER Experiment Name: Zm_5mM_NO_P Parameter: Age (day) Value: 8
  misc_feature: MA Experiment 108559 PARAMETER Experiment Name: Zm_5mM_NO_P Parameter: Organism Value: Zea mays
  misc_feature: MA Experiment 108559 PARAMETER Experiment Name: Zm_5mM_NO_P Parameter: Plant Line Value: 35A19
  misc_feature: MA Experiment 108559 PARAMETER Experiment Name: Zm_5mM_NO_P Parameter: Timepoint (hr) Value: 12
  misc_feature: MA Experiment 108559 PARAMETER Experiment Name: Zm_5mM_NO_P Parameter: Tissue Value: Aerial
  misc_feature: MA Experiment 108559 PARAMETER Experiment Name: Zm_5mM_NO_P Parameter: Treatment Value: 5mM NO vs. No Treatment
aggaactatcgaaagaagaaaaagttgctgcttatgggagtacattgataagagattcatttgatgaacctgattatgcccttatagatacacttttctcactgggtgaagcttatctatttgctcagcttgttgatttcatagacaagaatcctggaaaagtacctgcaggcacagactatccacttatgtacagagatgtgaggtctgcggttgacttgtgtcatcgtgatggaactctaaagcggatggttgcgaaggatcctgccaggtacatcaatgaggacttggcaattgtaccaatgcttgaaatgatcaggaaatctggacgctcaacattcttagtgacaaatagtttgtgggactacaccgatgttgtcatgaactacctttgtgggccatacacttcaggtgtaggctctggtctcaatcacaagtggcttcaatattttgatattgtaataacaggcagttcgaagccaagtttcttccatgatgataaccgtgcaggattgtttgaagttgagcctgattctggaaaacttctgaatgctgatattcagatcggaagcccaagatcaagtcatcaacactcaacaccagttcagaaagtttatcaggggggcaatgttggtcatctccacagattactttctgttgcttctagttcacagattctctatgttggtgatcacatatacggagatattctgcggagcaagaaagttctaggctggcggactatgctggtgattccagaactagaacaagagctgaagcttctctcagaatcaaagtctactcgaaaggagcttagacatcttagaatggagcgtgattcgattgaagacaaaatccatcatcttgaatggtctcttaagcttgatgatatctcagaaaaccagaaggagaaattgttctctgaacatgacaatctgctgaaacagagagggcatgttcgtggtcttcatcaagaagctcagaggcaacatcatcagaagtttcataaggtgtggggacagctcatgaagactgggtaccaaaattccagatttgctcatcaggttgagagatttgcttgcttgtacagcagccaggttacaaacttcggtttgtattctcctgacaaatactatcgtccgagcgaagattacatgccccacgagtttgatgtgcttgggctgtaggagcagcccctactgctggtcggagttcctcgttgtaattgatccatagcctaggaggggacatcgtagttgccgtattatataacaggaagcttcacccattgtgaaggagagaaggtttataactatagtagctacatttctacttatcagtaagtttacctgtatataaatatgtacataactgatatatgatgcgtgttatttgtgagcacgcgataagt

SEQ ID NO: 13534 - protein, 394 aa, Zea mays subsp. mays
  peptide (1)..(394): Ceres Seq. ID no. 12353545
  misc_feature (1)..(394): Pfam Name: 5' nucleotidase family Pfam Description: 5' nucleotidase family
  misc_feature (1)..(394): Homolog of NCBI NO: 34915208 NR Description: putative N5'-nucleotidase [Oryza sativa (japonica
  misc_feature (1)..(394): Homolog of NCBI NO: 22330644 NR Description: cytosolic IMP-GMP specific 5'-nucleotidase, protein id: At1g75210.1, supported by cDNA: gi_20260153
  misc_feature (1)..(352): Homolog of NCBI NO: 25353625 NR Description: hypothetical protein F22H5.7 [imported] -
  misc_feature (245)..(394): Homolog of NCBI NO: 25353625 NR Description: hypothetical protein F22H5.7 [imported] -
  misc_feature (21)..(310): Homolog of NCBI NO: 40555840 NR Description: 5'-nucleotidase, cytosolic II [Mus musculus]
  misc_feature (304)..(391): Homolog of NCBI NO: 40555840 NR Description: 5'-nucleotidase, cytosolic II [Mus musculus]
  misc_feature (21)..(310): Homolog of NCBI NO: 6912598 NR Description: 5'-nucleotidase, cytosolic II; purine 5'
  misc_feature (304)..(391): Homolog of NCBI NO: 6912598 NR Description: 5'-nucleotidase, cytosolic II; purine 5'
  misc_feature (21)..(310): Homolog of NCBI NO: 27806031 NR Description: 5'-nucleotidase, cytosolic II [Bos taurus]
  misc_feature (304)..(391): Homolog of NCBI NO: 27806031 NR Description: 5'-nucleotidase, cytosolic II [Bos taurus]
ELSKEEKVAAYGSTLIRDSFDEPDYALIDTLFSLGEAYLFAQLVDFIDKNPGKVPAGTDYPLMYRDVRSAVDLCHRDGTLKRMVAKDPARYINEDLAIVPMLEMIRKSGRSTFLVTNSLWDYTDVVMNYLCGPYTSGVGSGLNHKWLQYFDIVITGSSKPSFFHDDNRAGLFEVEPDSGKLLNADIQIGSPRSSHQHSTPVQKVYQGGNVGHLHRLLSVASSSQILYVGDHIYGDILRSKKVLGWRTMLVIPELEQELKLLSESKSTRKELRHLRMERDSIEDKIHHLEWSLKLDDISENQKEKLFSEHDNLLKQRGHVRGLHQEAQRQHHQKFHKVWGQLMKTGYQNSRFAHQVERFACLYSSQVTNFGLYSPDKYYRPSEDYMPHEFDVLGL

SEQ ID NO: 13535 - protein, 332 aa, Zea mays subsp. mays
  peptide (1)..(332): Ceres Seq. ID no. 12353546
  misc_feature (1)..(332): Pfam Name: 5' nucleotidase family Pfam Description: 5' nucleotidase family
  misc_feature (1)..(332): Homolog of NCBI NO: 34915208 NR Description: putative N5'-nucleotidase [Oryza sativa (japonica
  misc_feature (1)..(332): Homolog of NCBI NO: 22330644 NR Description: cytosolic IMP-GMP specific 5'-nucleotidase, protein id: At1g75210.1, supported by cDNA: gi_20260153
  misc_feature (1)..(290): Homolog of NCBI NO: 25353625 NR Description: hypothetical protein F22H5.7 [imported] -
  misc_feature (183)..(332): Homolog of NCBI NO: 25353625 NR Description: hypothetical protein F22H5.7 [imported] -
  misc_feature (1)..(248): Homolog of NCBI NO: 40555840 NR Description: 5'-nucleotidase, cytosolic II [Mus musculus]
  misc_feature (242)..(329): Homolog of NCBI NO: 40555840 NR Description: 5'-nucleotidase, cytosolic II [Mus musculus]
  misc_feature (1)..(248): Homolog of NCBI NO: 6912598 NR Description: 5'-nucleotidase, cytosolic II; purine 5'
  misc_feature (242)..(329): Homolog of NCBI NO: 6912598 NR Description: 5'-nucleotidase, cytosolic II; purine 5'
  misc_feature (1)..(248): Homolog of NCBI NO: 27806031 NR Description: 5'-nucleotidase, cytosolic II [Bos taurus]
  misc_feature (242)..(329): Homolog of NCBI NO: 27806031 NR Description: 5'-nucleotidase, cytosolic II [Bos taurus]
MYRDVRSAVDLCHRDGTLKRMVAKDPARYINEDLAIVPMLEMIRKSGRSTFLVTNSLWDYTDVVMNYLCGPYTSGVGSGLNHKWLQYFDIVITGSSKPSFFHDDNRAGLFEVEPDSGKLLNADIQIGSPRSSHQHSTPVQKVYQGGNVGHLHRLLSVASSSQILYVGDHIYGDILRSKKVLGWRTMLVIPELEQELKLLSESKSTRKELRHLRMERDSIEDKIHHLEWSLKLDDISENQKEKLFSEHDNLLKQRGHVRGLHQEAQRQHHQKFHKVWGQLMKTGYQNSRFAHQVERFACLYSSQVTNFGLYSPDKYYRPSEDYMPHEFDVLGL

SEQ ID NO: 13536 - protein, 312 aa, Zea mays subsp. mays
  peptide (1)..(312): Ceres Seq. ID no. 12353547
  misc_feature (1)..(312): Pfam Name: 5' nucleotidase family Pfam Description: 5' nucleotidase family
  misc_feature (1)..(312): Homolog of NCBI NO: 34915208 NR Description: putative N5'-nucleotidase [Oryza sativa (japonica
  misc_feature (1)..(312): Homolog of NCBI NO: 22330644 NR Description: cytosolic IMP-GMP specific 5'-nucleotidase, protein id: At1g75210.1, supported by cDNA: gi_20260153
  misc_feature (1)..(270): Homolog of NCBI NO: 25353625 NR Description: hypothetical protein F22H5.7 [imported] -
  misc_feature (163)..(312): Homolog of NCBI NO: 25353625 NR Description: hypothetical protein F22H5.7 [imported] -
  misc_feature (1)..(228): Homolog of NCBI NO: 40555840 NR Description: 5'-nucleotidase, cytosolic II [Mus musculus]
  misc_feature (222)..(309): Homolog of NCBI NO: 40555840 NR Description: 5'-nucleotidase, cytosolic II [Mus musculus]
  misc_feature (1)..(228): Homolog of NCBI NO: 6912598 NR Description: 5'-nucleotidase, cytosolic II; purine 5'
  misc_feature (222)..(309): Homolog of NCBI NO: 6912598 NR Description: 5'-nucleotidase, cytosolic II; purine 5'
  misc_feature (1)..(228): Homolog of NCBI NO: 27806031 NR Description: 5'-nucleotidase, cytosolic II [Bos taurus]
  misc_feature (222)..(309): Homolog of NCBI NO: 27806031 NR Description: 5'-nucleotidase, cytosolic II [Bos taurus]
MVAKDPARYINEDLAIVPMLEMIRKSGRSTFLVTNSLWDYTDVVMNYLCGPYTSGVGSGLNHKWLQYFDIVITGSSKPSFFHDDNRAGLFEVEPDSGKLLNADIQIGSPRSSHQHSTPVQKVYQGGNVGHLHRLLSVASSSQILYVGDHIYGDILRSKKVLGWRTMLVIPELEQELKLLSESKSTRKELRHLRMERDSIEDKIHHLEWSLKLDDISENQKEKLFSEHDNLLKQRGHVRGLHQEAQRQHHQKFHKVWGQLMKTGYQNSRFAHQVERFACLYSSQVTNFGLYSPDKYYRPSEDYMPHEFDVLGL

SEQ ID NO: 13537 - DNA, 2052 bp, Zea mays subsp. mays
  misc_feature (1)..(2052): Ceres Seq. ID no. 12341362
  misc_feature: MA Experiment ID: 108545 Result: Down-regulated in Transcription
  misc_feature: MA Experiment 108545 PARAMETER Experiment Name: Zm_Imbibed_Seeds_P Parameter: Age (day) Value: 3 vs. 2
  misc_feature: MA Experiment 108545 PARAMETER Experiment Name: Zm_Imbibed_Seeds_P Parameter: Organism Value: Zea mays
  misc_feature: MA Experiment 108545 PARAMETER Experiment Name: Zm_Imbibed_Seeds_P Parameter: Plant Line Value: 35A19
  misc_feature: MA Experiment 108545 PARAMETER Experiment Name: Zm_Imbibed_Seeds_P Parameter: Tissue Value: Aerial vs. Embryo
  misc_feature: MA Experiment ID: 108547 Result: Down-regulated in Transcription
  misc_feature: MA Experiment 108547 PARAMETER Experiment Name: Zm_Imbibed_Seeds_P Parameter: Age (day) Value: 4 vs. 2
  misc_feature: MA Experiment 108547 PARAMETER Experiment Name: Zm_Imbibed_Seeds_P Parameter: Organism Value: Zea mays
  misc_feature: MA Experiment 108547 PARAMETER Experiment Name: Zm_Imbibed_Seeds_P Parameter: Plant Line Value: 35A19
  misc_feature: MA Experiment 108547 PARAMETER Experiment Name: Zm_Imbibed_Seeds_P Parameter: Tissue Value: Aerial vs. Embryo
  misc_feature: MA Experiment ID: 20000492 Result: Down-regulated in Transcription
  misc_feature: MA Experiment 20000492 PARAMETER Experiment Name: Zm_Hybrid_Seed_Dev_P Parameter: DAP Value: 12
  misc_feature: MA Experiment 20000492 PARAMETER Experiment Name: Zm_Hybrid_Seed_Dev_P Parameter: Organism Value: Zea mays
  misc_feature: MA Experiment 20000492 PARAMETER Experiment Name: Zm_Hybrid_Seed_Dev_P Parameter: Plant Line Value: 35A19
  misc_feature: MA Experiment 20000492 PARAMETER Experiment Name: Zm_Hybrid_Seed_Dev_P Parameter: Tissue Value: Fert Kernel vs. Unfert Floret
  misc_feature: MA Experiment ID: 20000535 Result: Down-regulated in Transcription
  misc_feature: MA Experiment 20000535 PARAMETER Experiment Name: Zm_Hybrid_Seed_Dev_P Parameter: DAP Value: 30 vs. 12
  misc_feature: MA Experiment 20000535 PARAMETER Experiment Name: Zm_Hybrid_Seed_Dev_P Parameter: Organism Value: Zea mays
  misc_feature: MA Experiment 20000535 PARAMETER Experiment Name: Zm_Hybrid_Seed_Dev_P Parameter: Plant Line Value: 35A19
  misc_feature: MA Experiment 20000535 PARAMETER Experiment Name: Zm_Hybrid_Seed_Dev_P Parameter: Tissue Value: Embryo vs. Unfert Floret
tctcacctccctcgcactccattggatttgggggagctcggggggcgcgggccactgatgatccccggaacgagcaccgatccgtggcgaggaaactccaccgggtagccggcccgggagcgcggggcacggcgatggcgggcgccggggcagcggccaatggcggcaggaacaagtacgcggttctcgatcggagcgaggagcgacagacggacgctaggacggagcggcggaggaggccgttggcgcccgagagcgagagggggagaagggagcggttcgtgtacgcctgcgcggtcttcgcctccctcaacgccgtcctgctcggctacgatgttggcgtaatgagtggcgcgatcatctacatgcagaaagacctccacataaccgagtttcagcaagaaatcctagtaggctgtctgagcgtggtctcactcttgggaagcctatcaggggggcgaacatctgacgcaattggcagaaaatggacaatgggcctcggtgcaattgtgttccagataggcgcgaccatcatgacgtttgctccatcattcactgtgcttatgatagggaggctccttgctggggttggcattggctttggtgccatggtatctggagtgtacattgctgagatctcccccgcaggtgcccgagggacgctcacatcccttcctgagatctgcatcaattttgggatccttcttggctacgtttccaattatgccttctcaggcctttctgagcacatcaattggaggattatgcttggtgtcggtatcctcccatcagtcttcattggctttgcgcttttcgtgatcccggagtcccctaggtggttgatgatggagaagagagtttcagaagcaagggcagtgctgctgcagattagcgagtctgaagctgaagctgaagaacggctggctgagatcgaggaagccgcaggtctgatgaaatcaatgaaatctgaggacaaagaagtgtggagggaacttttgaacccgtctcccgccgtccgtcggatgctgtacgctggttgcggtattcagttgttccaacagatcacaggaattgatgctactgtctattacagcccaacaattttcaaagatgctggcatcaagtctgatcaggagcttctcgctgcaactgttgctgtgggtttcactaagacagtgttcatcttggttgcaattttcctaattgatagagttggacggaagccacttctttatgtgagcaccattggcatgaccatctgcttatttctcttgggggttgcacttacactgcaaaaccatgcggtggggcttatgtctccacgtgttggtatcgacctagcaattttcgcagtttgtggcaacgtggcattcttttcaattggcatgggaccaatatgttgggtcttgtcctcagaggtatttcctttaagattacgagctcaagggtcagcgcttggtcaagtaggtggtagagtgagcagtggtttggtttccatgtcattcctttctatggcccgtgctatatcagtggcaggaatgttcttcgtctttgctgcaatatccactatctctgtactgtttgtgtacttttgtgtgccagaaacaaaagggaaaacactggagcagatcgaaatgatgtttgaaagtggggacgaatggggaggaggtgaaattgagcttgaggatacacagcatttaataccgagtatcaagaagtctgtgcctcttggttgatatttgtagcatcaataaaattcttattagctccatgtttcaatgacgagccaaccaaaccagctggattctgaactttggtttcgagtgatctggccacactgagccacgaccgatctgataaaagataagcttgatagacataggtgcaacgtagaagattaattgtgatgttagttcaaaatgtcaatgattttactgggaggcggtctgtaatgtatgatcttacatctcttgtaccttcttacatctctcgtacctcccagcggaagaatatactcgcagaaaagttttctactgtgcatttttttataac

SEQ ID NO: 13538 - protein, 577 aa, Zea mays subsp. mays
  peptide (1)..(577): Ceres Seq. ID no. 12341363
  misc_feature (93)..(547): Pfam Name: Sugar (and other) transporter Pfam Description: Sugar (and other) transporter
  misc_feature (48)..(577): Homolog of NCBI NO: 21742093 NR Description: OSJNBa0074L08.15 [Oryza sativa (japonica
  misc_feature (38)..(567): Homolog of NCBI NO: 32487389 NR Description: OSJNBb0017I01.3 [Oryza sativa (japonica
  misc_feature (46)..(567): Homolog of NCBI NO: 15225426 NR Description: putative sugar transporter; protein id: [Arabidopsis thaliana] >gi|25309029|pir||C84593 probable sugar
  misc_feature (88)..(567): Homolog of NCBI NO: 32487390 NR Description: OSJNBb0017I01.4 [Oryza sativa (japonica
  misc_feature (89)..(553): Homolog of NCBI NO: 30025133 NR Description: putative sorbitol transporter [Prunus cerasus]
SPPSHSIGFGGARGARATDDPRNEHRSVARKLHRVAGPGARGTAMAGAGAAANGGRNKYAVLDRSEERQTDARTERRRRPLAPESERGRRERFVYACAVFASLNAVLLGYDVGVMSGAIIYMQKDLHITEFQQEILVGCLSVVSLLGSLSGGRTSDAIGRKWTMGLGAIVFQIGATIMTFAPSFTVLMIGRLLAGVGIGFGAMVSGVYIAEISPAGARGTLTSLPEICINFGILLGYVSNYAFSGLSEHINWRIMLGVGILPSVFIGFALFVIPESPRWLMMEKRVSEARAVLLQISESEAEAEERLAEIEEAAGLMKSMKSEDKEVWRELLNPSPAVRRMLYAGCGIQLFQQITGIDATVYYSPTIFKDAGIKSDQELLAATVAVGFTKTVFILVAIFLIDRVGRKPLLYVSTIGMTICLFLLGVALTLQNHAVGLMSPRVGIDLAIFAVCGNVAFFSIGMGPICWVLSSEVFPLRLRAQGSALGQVGGRVSSGLVSMSFLSMARAISVAGMFFVFAAISTISVLFVYFCVPETKGKTLEQIEMMFESGDEWGGGEIELEDTQHLIPSIKKSVPLG

SEQ ID NO: 13539 - protein, 533 aa, Zea mays subsp. mays
  peptide (1)..(533): Ceres Seq. ID no. 12341364
  misc_feature (49)..(503): Pfam Name: Sugar (and other) transporter Pfam Description: Sugar (and other) transporter
  misc_feature (4)..(533): Homolog of NCBI NO: 21742093 NR Description: OSJNBa0074L08.15 [Oryza sativa (japonica
  misc_feature (1)..(523): Homolog of NCBI NO: 32487389 NR Description: OSJNBb0017I01.3 [Oryza sativa (japonica
  misc_feature (2)..(523): Homolog of NCBI NO: 15225426 NR Description: putative sugar transporter; protein id: [Arabidopsis thaliana] >gi|25309029|pir||C84593 probable sugar
  misc_feature (44)..(523): Homolog of NCBI NO: 32487390 NR Description: OSJNBb0017I01.4 [Oryza sativa (japonica
  misc_feature (45)..(509): Homolog of NCBI NO: 30025133 NR Description: putative sorbitol transporter [Prunus cerasus]
MAGAGAAANGGRNKYAVLDRSEERQTDARTERRRRPLAPESERGRRERFVYACAVFASLNAVLLGYDVGVMSGAIIYMQKDLHITEFQQEILVGCLSVVSLLGSLSGGRTSDAIGRKWTMGLGAIVFQIGATIMTFAPSFTVLMIGRLLAGVGIGFGAMVSGVYIAEISPAGARGTLTSLPEICINFGILLGYVSNYAFSGLSEHINWRIMLGVGILPSVFIGFALFVIPESPRWLMMEKRVSEARAVLLQISESEAEAEERLAEIEEAAGLMKSMKSEDKEVWRELLNPSPAVRRMLYAGCGIQLFQQITGIDATVYYSPTIFKDAGIKSDQELLAATVAVGFTKTVFILVAIFLIDRVGRKPLLYVSTIGMTICLFLLGVALTLQNHAVGLMSPRVGIDLAIFAVCGNVAFFSIGMGPICWVLSSEVFPLRLRAQGSALGQVGGRVSSGLVSMSFLSMARAISVAGMFFVFAAISTISVLFVYFCVPETKGKTLEQIEMMFESGDEWGGGEIELEDTQHLIPSIKKSVPLG

SEQ ID NO: 13540 - protein, 463 aa, Zea mays subsp. mays
  peptide (1)..(463): Ceres Seq. ID no. 12341365
  misc_feature (1)..(433): Pfam Name: Sugar (and other) transporter Pfam Description: Sugar (and other) transporter
  misc_feature (1)..(463): Homolog of NCBI NO: 21742093 NR Description: OSJNBa0074L08.15 [Oryza sativa (japonica
  misc_feature (1)..(453): Homolog of NCBI NO: 32487389 NR Description: OSJNBb0017I01.3 [Oryza sativa (japonica
  misc_feature (1)..(453): Homolog of NCBI NO: 15225426 NR Description: putative sugar transporter; protein id: [Arabidopsis thaliana] >gi|25309029|pir||C84593 probable sugar
  misc_feature (1)..(453): Homolog of NCBI NO: 32487390 NR Description: OSJNBb0017I01.4 [Oryza sativa (japonica
  misc_feature (1)..(439): Homolog of NCBI NO: 30025133 NR Description: putative sorbitol transporter [Prunus cerasus]
MSGAIIYMQKDLHITEFQQEILVGCLSVVSLLGSLSGGRTSDAIGRKWTMGLGAIVFQIGATIMTFAPSFTVLMIGRLLAGVGIGFGAMVSGVYIAEISPAGARGTLTSLPEICINFGILLGYVSNYAFSGLSEHINWRIMLGVGILPSVFIGFALFVIPESPRWLMMEKRVSEARAVLLQISESEAEAEERLAEIEEAAGLMKSMKSEDKEVWRELLNPSPAVRRMLYAGCGIQLFQQITGIDATVYYSPTIFKDAGIKSDQELLAATVAVGFTKTVFILVAIFLIDRVGRKPLLYVSTIGMTICLFLLGVALTLQNHAVGLMSPRVGIDLAIFAVCGNVAFFSIGMGPICWVLSSEVFPLRLRAQGSALGQVGGRVSSGLVSMSFLSMARAISVAGMFFVFAAISTISVLFVYFCVPETKGKTLEQIEMMFESGDEWGGGEIELEDTQHLIPSIKKSVPLG

SEQ ID NO: 13541 - DNA, 1414 bp, Zea mays subsp. mays
  misc_feature (1)..(1414): Ceres Seq. ID no. 12374326
  misc_feature: MA Experiment ID: 108529 Result: Up-regulated in Transcription
  misc_feature: MA Experiment 108529 PARAMETER Experiment Name: Zm_Imbibed_Seeds_P Parameter: Age (day) Value: 5 vs. 2
  misc_feature: MA Experiment 108529 PARAMETER Experiment Name: Zm_Imbibed_Seeds_P Parameter: Organism Value: Zea mays
  misc_feature: MA Experiment 108529 PARAMETER Experiment Name: Zm_Imbibed_Seeds_P Parameter: Plant Line Value: 35A19
  misc_feature: MA Experiment 108529 PARAMETER Experiment Name: Zm_Imbibed_Seeds_P Parameter: Tissue Value: Roots vs. Embryo
  misc_feature: MA Experiment ID: 108543 Result: Up-regulated in Transcription
  misc_feature: MA Experiment ID: 108544 Result: Up-regulated in Transcription
aagcgacatgttcacgcctgttggttcggttcggtttcggcatggaggtagctgagagaccgatggcctcgtcccacctggcagctctcgtctccctgctgatcccctgcctccttgcgcttctgctgctccgcctcgccgccgtgctggacccggaccccgacgccgccgtgccccgcatcaaggcggccgcgcccctccctctccggttccgccacgatggcgccttcaagatcctccaggtggcggacatgcacttcggcaacggcgccaccacgcgctgccgggacgtgggccccgaaggcggcggcgcgcgctgctccgacctcaacaccacgcggttcctgcgccgtgtcatcgaggccgagaagcccgacctcatcgccttcaccggggacaacatatttgggggcagtgcaactgacgcagcagaatcactactcagagcaatcagccctgctatcgaatacagggtgccatgggctgccatcttaggtaatcatgaccaagagtcgacaatgacccgggaggagctgatgaccttcatgtctctaatggactactcggtatctcaagtaaacccacctggttttttggtacatgggtttgggaattatcatgttggcatccatgggccattcggatccgagctggtcaatactagcctgcttaacctttacttcctggatagcggtgatcgtgaaatggtgaatggagttaaaacatatggatggatcagagagtctcaactcgcctggcttcgttctacttccctggagcttcagaaaaaaatacatgccccagcattagcgttcttccacataccaatcccagaggtccgagggctctggtactcaggcttcaagggtcagtaccaggaaggggtggcttgctcatctgtacattctggtgtccttgggacccttgtctccatgggagatgtaaaatctgtctttttgggtcacgaccatcttaatgatttttgtggcaatctcaatgggatctggttctgttatggtggtggctttggttatcatgcctatggaagaccccattggccaaggagagctcggataatttacagtgaactcaaaaaggggcagaggtcgtggttggaagttgactcgatctcgacttggaagctgctagatgatgaaaagctcacaaaaattgatgaacaggttatctggagacatagcacaggtgattctgaccacagagtctacttgtgaagaccatgaacctaaaactacttcctgtatgtgtcatgtgtataatgtttgtcgcaaagattcctccaattttataggtcgattgattattggtagtatggtgtggcacggacctattttagatttcacatttggttcaatgttgatatgctaaccctggtttgggtcgctgacctgttttc

SEQ ID NO: 13542 - protein, 409 aa, Zea mays subsp. mays
  peptide (1)..(409): Ceres Seq. ID no. 12374327
  misc_feature (76)..(325): Pfam Name: Calcineurin-like phosphoesterase Pfam Description: Calcineurin-like phosphoesterase
  misc_feature (59)..(403): Homolog of NCBI NO: 15242042 NR Description: putative protein; protein id: At5g57140.1 thaliana] >gi|8843816|dbj|BAA97364.1| to unknown protein [Arabidopsis thaliana]
  misc_feature (33)..(399): Homolog of NCBI NO: 15242654 NR Description: putative protein; protein id: At5g63140.1 thaliana] >gi|10177295|dbj|BAB10556.1|
  misc_feature (68)..(399): Homolog of NCBI NO: 7208777 NR Description: putative PTS protein [Cicer arietinum]
  misc_feature (68)..(408): Homolog of NCBI NO: 15226455 NR Description: hypothetical protein; protein id: At2g46880.1
  misc_feature (68)..(400): Homolog of NCBI NO: 25763519 NR Description: probable phosphoesterase (EC 3.1.-.-) At2g46880 -
  misc_feature (68)..(400): Homolog of NCBI NO: 30267807 NR Description: hypothetical protein [Arabidopsis thaliana]
  misc_feature (68)..(343): Homolog of NCBI NO: 30267809 NR Description: hypothetical protein [Arabidopsis thaliana]
  misc_feature (73)..(383): Homolog of NCBI NO: 6323393 NR Description: Dose-Dependent Cell cycle Regulator; Dcr2p
  misc_feature (60)..(395): Homolog of NCBI NO: 40740622 NR Description: hypothetical protein AN3604.2 [Aspergillus
  misc_feature (106)..(385): Homolog of NCBI NO: 15895233 NR Description: Predicted phosphohydrolases, Icc family acetobutylicum] >gi|25500654|pir||G97141 probable
ATCSRLLVRFGFGMEVAERPMASSHLAALVSLLIPCLLALLLLRLAAVLDPDPDAAVPRIKAAAPLPLRFRHDGAFKILQVADMHFGNGATTRCRDVGPEGGGARCSDLNTTRFLRRVIEAEKPDLIAFTGDNIFGGSATDAAESLLRAISPAIEYRVPWAAILGNHDQESTMTREELMTFMSLMDYSVSQVNPPGFLVHGFGNYHVGIHGPFGSELVNTSLLNLYFLDSGDREMVNGVKTYGWIRESQLAWLRSTSLELQKKIHAPALAFFHIPIPEVRGLWYSGFKGQYQEGVACSSVHSGVLGTLVSMGDVKSVFLGHDHLNDFCGNLNGIWFCYGGGFGYHAYGRPHWPRRARIIYSELKKGQRSWLEVDSISTWKLLDDEKLTKIDEQVIWRHSTGDSDHRVYL

SEQ ID NO: 13543 - protein, 396 aa, Zea mays subsp. mays
  peptide (1)..(396): Ceres Seq. ID no. 12374328
  misc_feature (63)..(312): Pfam Name: Calcineurin-like phosphoesterase Pfam Description: Calcineurin-like phosphoesterase
  misc_feature (93)..(372): Homolog of NCBI NO: 15895233 NR Description: Predicted phosphohydrolases, Icc family acetobutylicum] >gi|25500654|pir||G97141 probable
  misc_feature (46)..(390): Homolog of NCBI NO: 15242042 NR Description: putative protein; protein id: At5g57140.1 thaliana] >gi|8843816|dbj|BAA97364.1| to unknown protein [Arabidopsis thaliana]
  misc_feature (20)..(386): Homolog of NCBI NO: 15242654 NR Description: putative protein; protein id: At5g63140.1 thaliana] >gi|10177295|dbj|BAB10556.1|
  misc_feature (55)..(386): Homolog of NCBI NO: 7208777 NR Description: putative PTS protein [Cicer arietinum]
  misc_feature (55)..(395): Homolog of NCBI NO: 15226455 NR Description: hypothetical protein; protein id: At2g46880.1
  misc_feature (55)..(387): Homolog of NCBI NO: 25763519 NR Description: probable phosphoesterase (EC 3.1.-.-) At2g46880 -
  misc_feature (55)..(387): Homolog of NCBI NO: 30267807 NR Description: hypothetical protein [Arabidopsis thaliana]
  misc_feature (55)..(330): Homolog of NCBI NO: 30267809 NR Description: hypothetical protein [Arabidopsis thaliana]
  misc_feature (60)..(370): Homolog of NCBI NO: 6323393 NR Description: Dose-Dependent Cell cycle Regulator; Dcr2p
  misc_feature (47)..(382): Homolog of NCBI NO: 40740622 NR Description: hypothetical protein AN3604.2 [Aspergillus
MEVAERPMASSHLAALVSLLIPCLLALLLLRLAAVLDPDPDAAVPRIKAAAPLPLRFRHDGAFKILQVADMHFGNGATTRCRDVGPEGGGARCSDLNTTRFLRRVIEAEKPDLIAFTGDNIFGGSATDAAESLLRAISPAIEYRVPWAAILGNHDQESTMTREELMTFMSLMDYSVSQVNPPGFLVHGFGNYHVGIHGPFGSELVNTSLLNLYFLDSGDREMVNGVKTYGWIRESQLAWLRSTSLELQKKIHAPALAFFHIPIPEVRGLWYSGFKGQYQEGVACSSVHSGVLGTLVSMGDVKSVFLGHDHLNDFCGNLNGIWFCYGGGFGYHAYGRPHWPRRARIIYSELKKGQRSWLEVDSISTWKLLDDEKLTKIDEQVIWRHSTGDSDHRVYL

SEQ ID NO: 13544 - protein, 389 aa, Zea mays subsp. mays
  peptide (1)..(389): Ceres Seq. ID no. 12374329
  misc_feature (56)..(305): Pfam Name: Calcineurin-like phosphoesterase Pfam Description: Calcineurin-like phosphoesterase
  misc_feature (39)..(383): Homolog of NCBI NO: 15242042 NR Description: putative protein; protein id: At5g57140.1 thaliana] >gi|8843816|dbj|BAA97364.1| to unknown protein [Arabidopsis thaliana]
  misc_feature (13)..(379): Homolog of NCBI NO: 15242654 NR Description: putative protein; protein id: At5g63140.1 thaliana] >gi|10177295|dbj|BAB10556.1|
  misc_feature (48)..(379): Homolog of NCBI NO: 7208777 NR Description: putative PTS protein [Cicer arietinum]
  misc_feature (48)..(388): Homolog of NCBI NO: 15226455 NR Description: hypothetical protein; protein id: At2g46880.1
  misc_feature (48)..(380): Homolog of NCBI NO: 25763519 NR Description: probable phosphoesterase (EC 3.1.-.-) At2g46880 -
  misc_feature (48)..(380): Homolog of NCBI NO: 30267807 NR Description: hypothetical protein [Arabidopsis thaliana]
  misc_feature (48)..(323): Homolog of NCBI NO: 30267809 NR Description: hypothetical protein [Arabidopsis thaliana]
  misc_feature (53)..(363): Homolog of NCBI NO: 6323393 NR Description: Dose-Dependent Cell cycle Regulator; Dcr2p
  misc_feature (40)..(375): Homolog of NCBI NO: 40740622 NR Description: hypothetical protein AN3604.2 [Aspergillus
  misc_feature (86)..(365): Homolog of NCBI NO: 15895233 NR Description: Predicted phosphohydrolases, Icc family acetobutylicum] >gi|25500654|pir||G97141 probable
MASSHLAALVSLLIPCLLALLLLRLAAVLDPDPDAAVPRIKAAAPLPLRFRHDGAFKILQVADMHFGNGATTRCRDVGPEGGGARCSDLNTTRFLRRVIEAEKPDLIAFTGDNIFGGSATDAAESLLRAISPAIEYRVPWAAILGNHDQESTMTREELMTFMSLMDYSVSQVNPPGFLVHGFGNYHVGIHGPFGSELVNTSLLNLYFLDSGDREMVNGVKTYGWIRESQLAWLRSTSLELQKKIHAPALAFFHIPIPEVRGLWYSGFKGQYQEGVACSSVHSGVLGTLVSMGDVKSVFLGHDHLNDFCGNLNGIWFCYGGGFGYHAYGRPHWPRRARIIYSELKKGQRSWLEVDSISTWKLLDDEKLTKIDEQVIWRHSTGDSDHRVYL

SEQ ID NO: 13545 - DNA, 1458 bp, Zea mays subsp. mays; identical to SEQ ID NO: 11502
  misc_feature (1)..(1458): Ceres Seq. ID no. 12373464
  misc_feature: MA Experiment ID: 108529 Result: Down-regulated in Transcription
  misc_feature: MA Experiment 108529 PARAMETER Experiment Name: Zm_Imbibed_Seeds_P Parameter: Age (day) Value: 5 vs. 2
  misc_feature: MA Experiment 108529 PARAMETER Experiment Name: Zm_Imbibed_Seeds_P Parameter: Organism Value: Zea mays
  misc_feature: MA Experiment 108529 PARAMETER Experiment Name: Zm_Imbibed_Seeds_P Parameter: Plant Line Value: 35A19
  misc_feature: MA Experiment 108529 PARAMETER Experiment Name: Zm_Imbibed_Seeds_P Parameter: Tissue Value: Roots vs. Embryo
  misc_feature: MA Experiment ID: 108536 Result: Down-regulated in Transcription
  misc_feature: MA Experiment 108536 PARAMETER Experiment Name: Zm_Meristem_P Parameter: Age (day) Value: 8
  misc_feature: MA Experiment 108536 PARAMETER Experiment Name: Zm_Meristem_P Parameter: Organism Value: Zea mays
  misc_feature: MA Experiment 108536 PARAMETER Experiment Name: Zm_Meristem_P Parameter: Plant Line Value: 35A19
  misc_feature: MA Experiment 108536 PARAMETER Experiment Name: Zm_Meristem_P Parameter: Tissue Value: Shoot Meristem vs. Above Shoot Meristem
  misc_feature: MA Experiment ID: 108543 Result: Up-regulated in Transcription
  misc_feature: MA Experiment ID: 108546 Result: Down-regulated in Transcription
  misc_feature: MA Experiment 108546 PARAMETER Experiment Name: Zm_Imbibed_Seeds_P Parameter: Age (day) Value: 3 vs. 2
  misc_feature: MA Experiment 108546 PARAMETER Experiment Name: Zm_Imbibed_Seeds_P Parameter: Organism Value: Zea mays
  misc_feature: MA Experiment 108546 PARAMETER Experiment Name: Zm_Imbibed_Seeds_P Parameter: Plant Line Value: 35A19
  misc_feature: MA Experiment 108546 PARAMETER Experiment Name: Zm_Imbibed_Seeds_P Parameter: Tissue Value: Roots vs. Embryo
  misc_feature: MA Experiment ID: 108556 Result: Down-regulated in Transcription
  misc_feature: MA Experiment 108556 PARAMETER Experiment Name: Zm_Drought_P Parameter: Age (day) Value: 9
  misc_feature: MA Experiment 108556 PARAMETER Experiment Name: Zm_Drought_P Parameter: Organism Value: Zea mays
  misc_feature: MA Experiment 108556 PARAMETER Experiment Name: Zm_Drought_P Parameter: Plant Line Value: 35A19
  misc_feature: MA Experiment 108556 PARAMETER Experiment Name: Zm_Drought_P Parameter: Timepoint (hr) Value: 24
  misc_feature: MA Experiment 108556 PARAMETER Experiment Name: Zm_Drought_P Parameter: Tissue Value: Aerial
  misc_feature: MA Experiment 108556 PARAMETER Experiment Name: Zm_Drought_P Parameter: Treatment Value: Drought vs. No Drought
  misc_feature: MA Experiment ID: 108597 Result: Down-regulated in Transcription
  misc_feature: MA Experiment 108597 PARAMETER Experiment Name: Zm_100uM_ABA_P Parameter: Age (day) Value: 9
  misc_feature: MA Experiment 108597 PARAMETER Experiment Name: Zm_100uM_ABA_P Parameter: Organism Value: Zea mays
  misc_feature: MA Experiment 108597 PARAMETER Experiment Name: Zm_100uM_ABA_P Parameter: Plant Line Value: 35A19
  misc_feature: MA Experiment 108597 PARAMETER Experiment Name: Zm_100uM_ABA_P Parameter: Timepoint (hr) Value: 24
  misc_feature: MA Experiment 108597 PARAMETER Experiment Name: Zm_100uM_ABA_P Parameter: Tissue Value: Aerial
  misc_feature: MA Experiment 108597 PARAMETER Experiment Name: Zm_100uM_ABA_P Parameter: Treatment Value: 100uM ABA vs. No Treatment
  misc_feature: MA Experiment ID: 108688 Result: Down-regulated in Transcription
  misc_feature: MA Experiment 108688 PARAMETER Experiment Name: Zm_Embryos-Flowers__P Parameter: Tissue Value: Immature Flowers vs. Aerial+
  misc_feature: MA Experiment ID: 20000477 Result: Down-regulated in Transcription
  misc_feature: MA Experiment 20000477 PARAMETER Experiment Name: Zm_5mM_SA_P Parameter: Age (day) Value: 10
  misc_feature: MA Experiment 20000477 PARAMETER Experiment Name: Zm_5mM_SA_P Parameter: Organism Value: Zea mays
  misc_feature: MA Experiment 20000477 PARAMETER Experiment Name: Zm_5mM_SA_P Parameter: Plant Line Value: 35A19
  misc_feature: MA Experiment 20000477 PARAMETER Experiment Name: Zm_5mM_SA_P Parameter: Timepoint (hr) Value: 48
  misc_feature: MA Experiment 20000477 PARAMETER Experiment Name: Zm_5mM_SA_P Parameter: Tissue Value: Aerial
  misc_feature: MA Experiment 20000477 PARAMETER Experiment Name: Zm_5mM_SA_P Parameter: Treatment Value: 5mM SA vs. No Treatment
  misc_feature: MA Experiment ID: 20000478 Result: Down-regulated in Transcription
  misc_feature: MA Experiment 20000478 PARAMETER Experiment Name: Zm_5mM_SA_P Parameter: Age (day) Value: 11
  misc_feature: MA Experiment 20000478 PARAMETER Experiment Name: Zm_5mM_SA_P Parameter: Organism Value: Zea mays
  misc_feature: MA Experiment 20000478 PARAMETER Experiment Name: Zm_5mM_SA_P Parameter: Plant Line Value: 35A19
  misc_feature: MA Experiment 20000478 PARAMETER Experiment Name: Zm_5mM_SA_P Parameter: Timepoint (hr) Value: 72
  misc_feature: MA Experiment 20000478 PARAMETER Experiment Name: Zm_5mM_SA_P Parameter: Tissue Value: Aerial
  misc_feature: MA Experiment 20000478 PARAMETER Experiment Name: Zm_5mM_SA_P Parameter: Treatment Value: 5mM SA vs. No Treatment
  misc_feature: MA Experiment ID: 20000479 Result: Down-regulated in Transcription
  misc_feature: MA Experiment 20000479 PARAMETER Experiment Name: Zm_Drought_P Parameter: Age (day) Value: 10
  misc_feature: MA Experiment 20000479 PARAMETER Experiment Name: Zm_Drought_P Parameter: Organism Value: Zea mays
  misc_feature: MA Experiment 20000479 PARAMETER Experiment Name: Zm_Drought_P Parameter: Plant Line Value: 35A19
  misc_feature: MA Experiment 20000479 PARAMETER Experiment Name: Zm_Drought_P Parameter: Timepoint (hr) Value: 48
  misc_feature: MA Experiment 20000479 PARAMETER Experiment Name: Zm_Drought_P Parameter: Tissue Value: Aerial
  misc_feature: MA Experiment 20000479 PARAMETER Experiment Name: Zm_Drought_P Parameter: Treatment Value: Drought vs. No Drought
  misc_feature: MA Experiment ID: 20000480 Result: Down-regulated in Transcription
  misc_feature: MA Experiment 20000480 PARAMETER Experiment Name: Zm_Drought_P Parameter: Age (day) Value: 11
  misc_feature: MA Experiment 20000480 PARAMETER Experiment Name: Zm_Drought_P Parameter: Organism Value: Zea mays
  misc_feature: MA Experiment 20000480 PARAMETER Experiment Name: Zm_Drought_P Parameter: Plant Line Value: 35A19
  misc_feature: MA Experiment 20000480 PARAMETER Experiment Name: Zm_Drought_P Parameter: Timepoint (hr) Value: 72
  misc_feature: MA Experiment 20000480 PARAMETER Experiment Name: Zm_Drought_P Parameter: Tissue Value: Aerial
  misc_feature: MA Experiment 20000480 PARAMETER Experiment Name: Zm_Drought_P Parameter: Treatment Value: Drought vs. No Drought
  misc_feature: MA Experiment ID: 20000488 Result: Down-regulated in Transcription
  misc_feature: MA Experiment 20000488 PARAMETER Experiment Name: Zm_50mM_NH4NO3_L_to_H_P Parameter: Organism Value: Zea mays
  misc_feature: MA Experiment 20000488 PARAMETER Experiment Name: Zm_50mM_NH4NO3_L_to_H_P Parameter: Timepoint (hr) Value: 8
  misc_feature: MA Experiment 20000488 PARAMETER Experiment Name: Zm_50mM_NH4NO3_L_to_H_P Parameter: Tissue Value: Leaves
  misc_feature: MA Experiment 20000488 PARAMETER Experiment Name: Zm_50mM_NH4NO3_L_to_H_P Parameter: Treatment Value: 50mM NH4NO3 vs. 100mM Mannitol
  misc_feature: MA Experiment ID: 20000492 Result: Down-regulated in Transcription
  misc_feature: MA Experiment 20000492 PARAMETER Experiment Name: Zm_Hybrid_Seed_Dev_P Parameter: DAP Value: 12
  misc_feature: MA Experiment 20000492 PARAMETER Experiment Name: Zm_Hybrid_Seed_Dev_P Parameter: Organism Value: Zea mays
  misc_feature: MA Experiment 20000492 PARAMETER Experiment Name: Zm_Hybrid_Seed_Dev_P Parameter: Plant Line Value: 35A19
  misc_feature: MA Experiment 20000492 PARAMETER Experiment Name: Zm_Hybrid_Seed_Dev_P Parameter: Tissue Value: Fert Kernel vs. Unfert Floret

SEQ ID NO: 13546 - protein, 369 aa, Zea mays subsp. mays; identical to SEQ ID NO: 11503
  peptide (1)..(369): Ceres Seq. ID no. 12373465
  misc_feature (38)..(349): Pfam Name: GDSL-like Lipase/Acylhydrolase Pfam Description: GDSL-like Lipase/Acylhydrolase
  misc_feature (38)..(349): Pfam Name: GDSL-like Lipase/Acylhydrolase Pfam Description: GDSL-like Lipase/Acylhydrolase
  misc_feature (11)..(369): Homolog of NCBI NO: 34909504 NR Description: putative GDSL-motif lipase/hydrolase-like protein
  misc_feature (13)..(369): Homolog of NCBI NO: 34910808 NR Description: GDSL-motif lipase/hydrolase-like protein [Oryza
  misc_feature (14)..(369): Homolog of NCBI NO: 15242458 NR Description: GDSL-motif lipase/hydrolase-like protein; protein At5g45670.1, supported by cDNA: 18389., supported by cDNA:
  misc_feature (14)..(369): Homolog of NCBI NO: 21553940 NR Description: GDSL-motif lipase/hydrolase-like protein
  misc_feature (1)..(369): Homolog of NCBI NO: 7485419 NR Description: hypothetical protein F13C5.140 - Arabidopsis >gi|2832625|emb|CAA16754.1| putative protein [Arabidopsis >gi|7268691|emb|CAB78899.1| putative protein [Arabidopsis
  misc_feature (15)..(369): Homolog of NCBI NO: 18415211 NR Description: Expressed protein; protein id: At4g18970.1, by cDNA: 42850., supported by cDNA: gi_16604576, supported by gi_21281049 [Arabidopsis thaliana] >gi|16604577|gb|AAL24090.1|
  misc_feature (29)..(369): Homolog of NCBI NO: 15220512 NR Description: lipase/hydrolase, putative; protein id: supported by cDNA: 6680., supported by cDNA: gi_15215767
  misc_feature (29)..(369): Homolog of NCBI NO: 21594055 NR Description: lipase/hydrolase, putative [Arabidopsis thaliana]
  misc_feature (15)..(369): Homolog of NCBI NO: 21618199 NR Description: GDSL-motif lipase/hydrolase-like protein
  misc_feature (15)..(369): Homolog of NCBI NO: 21592417 NR Description: lipase/hydrolase, putative [Arabidopsis thaliana]
  misc_feature (1)..(369): Homolog of NCBI NO: 7485419 NR Description: hypothetical protein F13C5.140 - Arabidopsis >gi|2832625|emb|CAA16754.1| putative protein [Arabidopsis >gi|7268691|emb|CAB78899.1| putative protein [Arabidopsis
  misc_feature (15)..(369): Homolog of NCBI NO: 18415211 NR Description: Expressed protein; protein id: At4g18970.1, by cDNA: 42850., supported by cDNA: gi_16604576, supported by gi_21281049 [Arabidopsis thaliana] >gi|16604577|gb|AAL24090.1|
  misc_feature (29)..(369): Homolog of NCBI NO: 15220512 NR Description: lipase/hydrolase, putative; protein id: supported by cDNA: 6680., supported by cDNA: gi_15215767
  misc_feature (29)..(369): Homolog of NCBI NO: 21594055 NR Description: lipase/hydrolase, putative [Arabidopsis thaliana]
  misc_feature (15)..(369): Homolog of NCBI NO: 21618199 NR Description: GDSL-motif lipase/hydrolase-like protein
  misc_feature (15)..(369): Homolog of NCBI NO: 21592417 NR Description: lipase/hydrolase, putative [Arabidopsis thaliana]
  misc_feature (11)..(369): Homolog of NCBI NO: 34909504 NR Description: putative GDSL-motif lipase/hydrolase-like protein
  misc_feature (13)..(369): Homolog of NCBI NO: 34910808 NR Description: GDSL-motif lipase/hydrolase-like protein [Oryza
  misc_feature (14)..(369): Homolog of NCBI NO: 15242458 NR Description: GDSL-motif lipase/hydrolase-like protein; protein At5g45670.1, supported by cDNA: 18389., supported by cDNA:
  misc_feature (14)..(369): Homolog of NCBI NO: 21553940 NR Description: GDSL-motif lipase/hydrolase-like protein

SEQ ID NO: 13547 - protein, 198 aa, Zea mays subsp. mays; identical to SEQ ID NO: 11504
  peptide (1)..(198): Ceres Seq. ID no. 12373466
  misc_feature (1)..(178): Pfam Name: GDSL-like Lipase/Acylhydrolase Pfam Description: GDSL-like Lipase/Acylhydrolase
  misc_feature (1)..(178): Pfam Name: GDSL-like Lipase/Acylhydrolase Pfam Description: GDSL-like Lipase/Acylhydrolase
  misc_feature (1)..(198): Homolog of NCBI NO: 34909504 NR Description: putative GDSL-motif lipase/hydrolase-like protein
  misc_feature (1)..(198): Homolog of NCBI NO: 34910808 NR Description: GDSL-motif lipase/hydrolase-like protein [Oryza
  misc_feature (1)..(198): Homolog of NCBI NO: 15242458 NR Description: GDSL-motif lipase/hydrolase-like protein; protein At5g45670.1, supported by cDNA: 18389., supported by cDNA:
  misc_feature (1)..(198): Homolog of NCBI NO: 21553940 NR Description: GDSL-motif lipase/hydrolase-like protein
  misc_feature (1)..(198): Homolog of NCBI NO: 7485419 NR Description: hypothetical protein F13C5.140 - Arabidopsis >gi|2832625|emb|CAA16754.1| putative protein [Arabidopsis >gi|7268691|emb|CAB78899.1| putative protein [Arabidopsis
  misc_feature (1)..(198): Homolog of NCBI NO: 34910808 NR Description: GDSL-motif lipase/hydrolase-like protein [Oryza
  misc_feature (1)..(198): Homolog of NCBI NO: 21553940 NR Description: GDSL-motif lipase/hydrolase-like protein
  misc_feature (1)..(198): Homolog of NCBI NO: 21592417 NR Description: lipase/hydrolase, putative [Arabidopsis thaliana]
  misc_feature (1)..(198): Homolog of NCBI NO: 21618199 NR Description: GDSL-motif lipase/hydrolase-like protein
  misc_feature (1)..(198): Homolog of NCBI NO: 21594055 NR Description: lipase/hydrolase, putative [Arabidopsis thaliana]
  misc_feature (1)..(198): Homolog of NCBI NO: 15220512 NR Description: lipase/hydrolase, putative; protein id: supported by cDNA: 6680., supported by cDNA: gi_15215767
  misc_feature (1)..(198): Homolog of NCBI NO: 18415211 NR Description: Expressed protein; protein id: At4g18970.1, by cDNA: 42850., supported by cDNA: gi_16604576, supported by gi_21281049 [Arabidopsis thaliana] >gi|16604577|gb|AAL24090.1|
  misc_feature (1)..(198): Homolog of NCBI NO: 7485419 NR Description: hypothetical protein F13C5.140 - Arabidopsis >gi|2832625|emb|CAA16754.1| putative protein [Arabidopsis >gi|7268691|emb|CAB78899.1| putative protein [Arabidopsis
  misc_feature (1)..(198): Homolog of NCBI NO: 15242458 NR Description: GDSL-motif lipase/hydrolase-like protein; protein At5g45670.1, supported by cDNA: 18389., supported by cDNA:
  misc_feature (1)..(198): Homolog of NCBI NO: 34909504 NR Description: putative GDSL-motif lipase/hydrolase-like protein
  misc_feature (1)..(198): Homolog of NCBI NO: 18415211 NR Description: Expressed protein; protein id: At4g18970.1, by cDNA: 42850., supported by cDNA: gi_16604576, supported by gi_21281049 [Arabidopsis thaliana] >gi|16604577|gb|AAL24090.1|
  misc_feature (1)..(198): Homolog of NCBI NO: 15220512 NR Description: lipase/hydrolase, putative; protein id: supported by cDNA: 6680., supported by cDNA: gi_15215767
  misc_feature (1)..(198): Homolog of NCBI NO: 21594055 NR Description: lipase/hydrolase, putative [Arabidopsis thaliana]
  misc_feature (1)..(198): Homolog of NCBI NO: 21618199 NR Description: GDSL-motif lipase/hydrolase-like protein
  misc_feature (1)..(198): Homolog of NCBI NO: 21592417 NR Description: lipase/hydrolase, putative [Arabidopsis thaliana]

SEQ ID NO: 13548 - protein, 187 aa, Zea mays subsp. mays; identical to SEQ ID NO: 11505
  peptide (1)..(187): Ceres Seq. ID no. 12373467
  misc_feature (1)..(167): Pfam Name: GDSL-like Lipase/Acylhydrolase Pfam Description: GDSL-like Lipase/Acylhydrolase
  misc_feature (1)..(167): Pfam Name: GDSL-like Lipase/Acylhydrolase Pfam Description: GDSL-like Lipase/Acylhydrolase
  misc_feature (1)..(187): Homolog of NCBI NO: 34909504 NR Description: putative GDSL-motif lipase/hydrolase-like protein
  misc_feature (1)..(187): Homolog of NCBI NO: 34910808 NR Description: GDSL-motif lipase/hydrolase-like protein [Oryza
  misc_feature (1)..(187): Homolog of NCBI NO: 15242458 NR Description: GDSL-motif lipase/hydrolase-like protein; protein At5g45670.1, supported by cDNA: 18389., supported by cDNA:
  misc_feature (1)..(187): Homolog of NCBI NO: 21553940 NR Description: GDSL-motif lipase/hydrolase-like protein
  misc_feature (1)..(187): Homolog of NCBI NO: 7485419 NR Description: hypothetical protein F13C5.140 - Arabidopsis >gi|2832625|emb|CAA16754.1| putative protein [Arabidopsis >gi|7268691|emb|CAB78899.1| putative protein [Arabidopsis
  misc_feature (1)..(187): Homolog of NCBI NO: 34910808 NR Description: GDSL-motif lipase/hydrolase-like protein [Oryza
  misc_feature (1)..(187): Homolog of NCBI NO: 21553940 NR Description: GDSL-motif lipase/hydrolase-like protein
  misc_feature (1)..(187): Homolog of NCBI NO: 21592417 NR Description: lipase/hydrolase, putative [Arabidopsis thaliana]
  misc_feature (1)..(187): Homolog of NCBI NO: 21618199 NR Description: GDSL-motif lipase/hydrolase-like protein
  misc_feature (1)..(187): Homolog of NCBI NO: 21594055 NR Description: lipase/hydrolase, putative [Arabidopsis thaliana]
  misc_feature (1)..(187): Homolog of NCBI NO: 15220512 NR Description: lipase/hydrolase, putative; protein id: supported by cDNA: 6680., supported by cDNA: gi_15215767
  misc_feature (1)..(187): Homolog of NCBI NO: 18415211 NR Description: Expressed protein; protein id: At4g18970.1, by cDNA: 42850., supported by cDNA: gi_16604576, supported by gi_21281049 [Arabidopsis thaliana] >gi|16604577|gb|AAL24090.1|
  misc_feature (1)..(187): Homolog of NCBI NO: 7485419 NR Description: hypothetical protein F13C5.140 - Arabidopsis >gi|2832625|emb|CAA16754.1| putative protein [Arabidopsis >gi|7268691|emb|CAB78899.1| putative protein [Arabidopsis
  misc_feature (1)..(187): Homolog of NCBI NO: 15242458 NR Description: GDSL-motif lipase/hydrolase-like protein; protein At5g45670.1, supported by cDNA: 18389., supported by cDNA:
  misc_feature (1)..(187): Homolog of NCBI NO: 34909504 NR Description: putative GDSL-motif lipase/hydrolase-like protein
  misc_feature (1)..(187): Homolog of NCBI NO: 18415211 NR Description: Expressed protein; protein id: At4g18970.1, by cDNA: 42850., supported by cDNA: gi_16604576, supported by gi_21281049 [Arabidopsis thaliana] >gi|16604577|gb|AAL24090.1|
  misc_feature (1)..(187): Homolog of NCBI NO: 15220512 NR Description: lipase/hydrolase, putative; protein id: supported by cDNA: 6680., supported by cDNA: gi_15215767
  misc_feature (1)..(187): Homolog of NCBI NO: 21594055 NR Description: lipase/hydrolase, putative [Arabidopsis thaliana]
  misc_feature (1)..(187): Homolog of NCBI NO: 21618199 NR Description: GDSL-motif lipase/hydrolase-like protein
  misc_feature (1)..(187): Homolog of NCBI NO: 21592417 NR Description: lipase/hydrolase, putative [Arabidopsis thaliana]

SEQ ID NO: 13549 - DNA, 1453 bp, Zea mays subsp. mays
  misc_feature (1)..(1453): Ceres Seq. ID no. 12365159
  misc_feature: MA Experiment ID: 108504 Result: Down-regulated in Transcription
  misc_feature: MA Experiment 108504 PARAMETER Experiment Name: Zm_Drought_P Parameter: Age (day) Value: 8
  misc_feature: MA Experiment 108504 PARAMETER Experiment Name: Zm_Drought_P Parameter: Organism Value: Zea mays
  misc_feature: MA Experiment 108504 PARAMETER Experiment Name: Zm_Drought_P Parameter: Plant Line Value: 35A19
  misc_feature: MA Experiment 108504 PARAMETER Experiment Name: Zm_Drought_P Parameter: Timepoint (hr) Value: 12
  misc_feature: MA Experiment 108504 PARAMETER Experiment Name: Zm_Drought_P Parameter: Tissue Value: Aerial
  misc_feature: MA Experiment 108504 PARAMETER Experiment Name: Zm_Drought_P Parameter: Treatment Value: Drought vs. No Drought
  misc_feature: MA Experiment ID: 108528 Result: Down-regulated in Transcription
  misc_feature: MA Experiment 108528 PARAMETER Experiment Name: Zm_Imbibed_Seeds_P Parameter: Age (day) Value: 5 vs. 2
  misc_feature: MA Experiment 108528 PARAMETER Experiment Name: Zm_Imbibed_Seeds_P Parameter: Organism Value: Zea mays
  misc_feature: MA Experiment 108528 PARAMETER Experiment Name: Zm_Imbibed_Seeds_P Parameter: Plant Line Value: 35A19
  misc_feature: MA Experiment 108528 PARAMETER Experiment Name: Zm_Imbibed_Seeds_P Parameter: Tissue Value: Aerial vs. Embryo
  misc_feature: MA Experiment ID: 108530 Result: Down-regulated in Transcription
  misc_feature: MA Experiment 108530 PARAMETER Experiment Name: Zm_Imbibed_Seeds_P Parameter: Age (day) Value: 6 vs. 2
  misc_feature: MA Experiment 108530 PARAMETER Experiment Name: Zm_Imbibed_Seeds_P Parameter: Organism Value: Zea mays
  misc_feature: MA Experiment 108530 PARAMETER Experiment Name: Zm_Imbibed_Seeds_P Parameter: Plant Line Value: 35A19
  misc_feature: MA Experiment 108530 PARAMETER Experiment Name: Zm_Imbibed_Seeds_P Parameter: Tissue Value: Aerial vs. Embryo
  misc_feature: MA Experiment ID: 108543 Result: Up-regulated in Transcription
  misc_feature: MA Experiment ID: 108597 Result: Down-regulated in Transcription
  misc_feature: MA Experiment 108597 PARAMETER Experiment Name: Zm_100uM_ABA_P Parameter: Age (day) Value: 9
  misc_feature: MA Experiment 108597 PARAMETER Experiment Name: Zm_100uM_ABA_P Parameter: Organism Value: Zea mays
  misc_feature: MA Experiment 108597 PARAMETER Experiment Name: Zm_100uM_ABA_P Parameter: Plant Line Value: 35A19
  misc_feature: MA Experiment 108597 PARAMETER Experiment Name: Zm_100uM_ABA_P Parameter: Timepoint (hr) Value: 24
  misc_feature: MA Experiment 108597 PARAMETER Experiment Name: Zm_100uM_ABA_P Parameter: Tissue Value: Aerial
  misc_feature: MA Experiment 108597 PARAMETER Experiment Name: Zm_100uM_ABA_P Parameter: Treatment Value: 100uM ABA vs. No Treatment
  misc_feature: MA Experiment ID: 108689 Result: Down-regulated in Transcription
  misc_feature: MA Experiment 108689 PARAMETER Experiment Name: Zm_Drought_Roots_P Parameter: Age (day) Value: 9
  misc_feature: MA Experiment 108689 PARAMETER Experiment Name: Zm_Drought_Roots_P Parameter: Organism Value: Zea mays
  misc_feature: MA Experiment 108689 PARAMETER Experiment Name: Zm_Drought_Roots_P Parameter: Plant Line Value: 35A19
  misc_feature: MA Experiment 108689 PARAMETER Experiment Name: Zm_Drought_Roots_P Parameter: Timepoint (hr) Value: 24
  misc_feature: MA Experiment 108689 PARAMETER Experiment Name: Zm_Drought_Roots_P Parameter: Tissue Value: Roots
  misc_feature: MA Experiment 108689 PARAMETER Experiment Name: Zm_Drought_Roots_P Parameter: Treatment Value: Drought vs. No Drought
  misc_feature: MA Experiment ID: 20000477 Result: Down-regulated in Transcription
  misc_feature: MA Experiment 20000477 PARAMETER Experiment Name: Zm_5mM_SA_P Parameter: Age (day) Value: 10
  misc_feature: MA Experiment 20000477 PARAMETER Experiment Name: Zm_5mM_SA_P Parameter: Organism Value: Zea mays
  misc_feature: MA Experiment 20000477 PARAMETER Experiment Name: Zm_5mM_SA_P Parameter: Plant Line Value: 35A19
  misc_feature: MA Experiment 20000477 PARAMETER Experiment Name: Zm_5mM_SA_P Parameter: Timepoint (hr) Value: 48
  misc_feature: MA Experiment 20000477 PARAMETER Experiment Name: Zm_5mM_SA_P Parameter: Tissue Value: Aerial
  misc_feature: MA Experiment 20000477 PARAMETER Experiment Name: Zm_5mM_SA_P Parameter: Treatment Value: 5mM SA vs. No Treatment
  misc_feature: MA Experiment ID: 20000478 Result: Down-regulated in Transcription
  misc_feature: MA Experiment 20000478 PARAMETER Experiment Name: Zm_5mM_SA_P Parameter: Age (day) Value: 11
  misc_feature: MA Experiment 20000478 PARAMETER Experiment Name: Zm_5mM_SA_P Parameter: Organism Value: Zea mays
  misc_feature: MA Experiment 20000478 PARAMETER Experiment Name: Zm_5mM_SA_P Parameter: Plant Line Value: 35A19
  misc_feature: MA Experiment 20000478 PARAMETER Experiment Name: Zm_5mM_SA_P Parameter: Timepoint (hr) Value: 72
  misc_feature: MA Experiment 20000478 PARAMETER Experiment Name: Zm_5mM_SA_P Parameter: Tissue Value: Aerial
  misc_feature: MA Experiment 20000478 PARAMETER Experiment Name: Zm_5mM_SA_P Parameter: Treatment Value: 5mM SA vs. No Treatment
  misc_feature: MA Experiment ID: 20000479 Result: Down-regulated in Transcription
  misc_feature: MA Experiment 20000479 PARAMETER Experiment Name: Zm_Drought_P Parameter: Age (day) Value: 10
  misc_feature: MA Experiment 20000479 PARAMETER Experiment Name: Zm_Drought_P Parameter: Organism Value: Zea mays
  misc_feature: MA Experiment 20000479 PARAMETER Experiment Name: Zm_Drought_P Parameter: Plant Line Value: 35A19
  misc_feature: MA Experiment 20000479 PARAMETER Experiment Name: Zm_Drought_P Parameter: Timepoint (hr) Value: 48
  misc_feature: MA Experiment 20000479 PARAMETER Experiment Name: Zm_Drought_P Parameter: Tissue Value: Aerial
  misc_feature: MA Experiment 20000479 PARAMETER Experiment Name: Zm_Drought_P Parameter: Treatment Value: Drought vs. No Drought
  misc_feature: MA Experiment ID: 20000480 Result: Down-regulated in Transcription
  misc_feature: MA Experiment 20000480 PARAMETER Experiment Name: Zm_Drought_P Parameter: Age (day) Value: 11
  misc_feature: MA Experiment 20000480 PARAMETER Experiment Name: Zm_Drought_P Parameter: Organism Value: Zea mays
  misc_feature: MA Experiment 20000480 PARAMETER Experiment Name: Zm_Drought_P Parameter: Plant Line Value: 35A19
  misc_feature: MA Experiment 20000480 PARAMETER Experiment Name: Zm_Drought_P Parameter: Timepoint (hr) Value: 72
  misc_feature: MA Experiment 20000480 PARAMETER Experiment Name: Zm_Drought_P Parameter: Tissue Value: Aerial
  misc_feature: MA Experiment 20000480 PARAMETER Experiment Name: Zm_Drought_P Parameter: Treatment Value: Drought vs. No Drought
gcacgagaccattacctagaacatcctaatcgaaaaaatcttttttcctcttgacggcgcacataaatccgcgccaaatcgtcaaaccaaaaccaggccgcgcccgcctcgtcagtcctcagtcctcactttcgggccgagctccggatatccagcggcggcaatggcagccgaagccagcgccgtccagcagctcgctggcctcctggaccaagtggacgcgccgctgaagaagacatttgagaatgtgcatcagggctacccaacagagacattattgcgtttccttaaagctagagagtggcatgtgaataaggctcacaggatgcttgaagattctttgaattggaggatgcaaaatgaaatcgatagtatattggagaaacctattatcccagtagatttgtatagatcaattcgtgatacacagcttattgggttatcaggatactccaaagagggcattcctgtatttgcagttggtgttgggctgagtacatatgacaaagcttcggttaactactatgtgcaatctcacattcagatcaatgagtaccgagatcgttttattttgcctacagtgacaaagaagtatgggagacctattaccacctgtataaaggttctcgatatgactggtctgaaattgtcagcactacaccaaatgaagattgtgactgcaatatctacagttgatgatttgaattaccctgaaaagactgagacctattatatagtaaacgctccatacatattttctgcatgttggaaggtcgtgaagcctctgttgcaagagagaacaaggaagaaagttcatgtgttgcgtggctgcgggagagacgagcttctacagatcatggactactcctccctcccccatttctgcagacaggagggctcgggctcatccaaacattcgtcaggcgacgccgataactgcttctctctcgaccacccgttccaccaggagctctacagcttcatccaggagcaggcgctgaaccaggagctcatcaagcagggctccttgcacgtgaaaatccccgagcaggaccctgaggacgcaaagatcgtggaggtcatcgaggccgagttccacaagcttggcgtgcagaacgggtccgccaatggcatcgaccaagcatagcacctttgtctaataagaccagcctgattcaaccgagacgttgcttgccacttctgatgcaactaatcctactgtttattttttttggtggggtgggcccacccccgttgctgtttcctggggggaggggggtgattggtattggtggtatacatagcaaagtcatttgcagatccatccatgatgcaggactgagatagacgatatcacctgtgtaaacttgcagatttgcaatgtgtcctcatctcatatgtatgctgagttgagatgaaatgaataaatcatcctacaagttttttttgagcc

SEQ ID NO: 13550 - protein, 327 aa, Zea mays subsp. mays
  peptide (1)..(327): Ceres Seq. ID no. 12365160
  misc_feature (134)..(238): Pfam Name: CRAL/TRIO domain Pfam Description: CRAL/TRIO domain
MAAEASAVQQLAGLLDQVDAPLKKTFENVHQGYPTETLLRFLKAREWHVNKAHRMLEDSLNWRMQNEIDSILEKPIIPVDLYRSIRDTQLIGLSGYSKEGIPVFAVGVGLSTYDKASVNYYVQSHIQINEYRDRFILPTVTKKYGRPITTCIKVLDMTGLKLSALHQMKIVTAISTVDDLNYPEKTETYYIVNAPYIFSACWKVVKPLLQERTRKKVHVLRGCGRDELLQIMDYSSLPHFCRQEGSGSSKHSSGDADNCFSLDHPFHQELYSFIQEQALNQELIKQGSLHVKIPEQDPEDAKIVEVIEAEFHKLGVQNGSANGIDQA

SEQ ID NO: 13551 - protein, 273 aa, Zea mays subsp. mays
  peptide (1)..(273): Ceres Seq. ID no. 12365161
  misc_feature (80)..(184): Pfam Name: CRAL/TRIO domain Pfam Description: CRAL/TRIO domain
MLEDSLNWRMQNEIDSILEKPIIPVDLYRSIRDTQLIGLSGYSKEGIPVFAVGVGLSTYDKASVNYYVQSHIQINEYRDRFILPTVTKKYGRPITTCIKVLDMTGLKLSALHQMKIVTAISTVDDLNYPEKTETYYIVNAPYIFSACWKVVKPLLQERTRKKVHVLRGCGRDELLQIMDYSSLPHFCRQEGSGSSKHSSGDADNCFSLDHPFHQELYSFIQEQALNQELIKQGSLHVKIPEQDPEDAKIVEVIEAEFHKLGVQNGSANGIDQA

SEQ ID NO: 13552 - protein, 264 aa, Zea mays subsp. mays
  peptide (1)..(264): Ceres Seq. ID no. 12365162
  misc_feature (71)..(175): Pfam Name: CRAL/TRIO domain Pfam Description: CRAL/TRIO domain
MQNEIDSILEKPIIPVDLYRSIRDTQLIGLSGYSKEGIPVFAVGVGLSTYDKASVNYYVQSHIQINEYRDRFILPTVTKKYGRPITTCIKVLDMTGLKLSALHQMKIVTAISTVDDLNYPEKTETYYIVNAPYIFSACWKVVKPLLQERTRKKVHVLRGCGRDELLQIMDYSSLPHFCRQEGSGSSKHSSGDADNCFSLDHPFHQELYSFIQEQALNQELIKQGSLHVKIPEQDPEDAKIVEVIEAEFHKLGVQNGSANGIDQA

SEQ ID NO: 13553 - DNA, 849 bp, Zea mays subsp. mays
  misc_feature (1)..(849): Ceres Seq. ID no. 12379687
  misc_feature: MA Experiment ID: 108535 Result: Up-regulated in Transcription
  misc_feature: MA Experiment 108535 PARAMETER Experiment Name: Zm_Meristem_P Parameter: Age (day) Value: 8
  misc_feature: MA Experiment 108535 PARAMETER Experiment Name: Zm_Meristem_P Parameter: Organism Value: Zea mays
  misc_feature: MA Experiment 108535 PARAMETER Experiment Name: Zm_Meristem_P Parameter: Plant Line Value: 35A19
  misc_feature: MA Experiment 108535 PARAMETER Experiment Name: Zm_Meristem_P Parameter: Tissue Value: Root Meristem vs. Above Root Meristem
ctctaaagttttgctctggccaaacacgtcaatagtagagattttggactagattcgtgcaaaacactagaaaagaaaaggccatcgaaaacgccgccgccgcctctgatgctttccgccgtgcgatgtggtgcccttcgccggtggcgcccgccgccgcacctcctcccacgcatcctttcctcctcctttggtacatctcccgcgcgaccacaggtgggggcgctgctggagctcccggaggtggagaaggtactgcgcgacgtacgagcgggtgacgtgcgcgtattccccgtcggcgagagcggtctgcacggcggggcctgcgccgactacatggtcgtcgccacaggccgctccgattggcacgtccgtaacatcgcgcaggcgctcctctacaagataaagcaaaagcagaagggctctgatagaatattgatgccaagtgtagaaggtcagcaagcgggaaaatgggttgtcattgattctggaagcataatcatccatgcacttgaagaaagggcaagagagtattatgatttagagagcatttggtcaaaagaggtgtcccctaacacttccattcaggagttggagacctcgctggtgaagacacgtcgccggaacctatcacagaaacccatgaagagcatctgaactaggggatctggtacgatgatccgtgaaccgagataaattacgggaggtcgagcttttatctctttccattttgtagcatcttttacttacctaaacttgtcttattatggtggtagttaatgtaagattcactgcaaacattactgagttcaccatggggtaaatccagtctcacatgagtcatctagt

SEQ ID NO: 13554 - protein, 182 aa, Zea mays subsp. mays
  peptide (1)..(182): Ceres Seq. ID no. 12379688
  misc_feature (40)..(150): Pfam Name: Domain of unknown function DUF143 Pfam Description: Domain of unknown function DUF143
  misc_feature (6)..(180): Homolog of NCBI NO: 18408812 NR Description: expressed protein; protein id: At1g67620.1, by cDNA: 10531. [Arabidopsis thaliana]
  misc_feature (6)..(180): Homolog of NCBI NO: 21536608 NR Description: unknown [Arabidopsis thaliana]
  misc_feature (50)..(159): Homolog of NCBI NO: 15890026 NR Description: AGR_C_5039p [Agrobacterium tumefaciens]
  misc_feature (50)..(159): Homolog of NCBI NO: 17936652 NR Description: conserved hypothetical protein [Agrobacterium str. C58 (U. Washington)] >gi|25523549|pir||AH2917 conserved
  misc_feature (52)..(150): Homolog of NCBI NO: 39998299 NR Description: iojap-related protein [Geobacter sulfurreducens
  misc_feature (75)..(150): Homolog of NCBI NO: 33519773 NR Description: conserved hypothetical protein [Candidatus floridanus] >gi|33504118|emb|CAD83380.1| conserved hypothetical
  misc_feature (22)..(150): Homolog of NCBI NO: 21232046 NR Description: conserved hypothetical protein [Xanthomonas pv. campestris str. ATCC 33913] >gi|21113786|gb|AAM41887.1| hypothetical protein [Xanthomonas campestris pv. campestris str.
  misc_feature (38)..(149): Homolog of NCBI NO: 22983541 NR Description: hypothetical protein [Burkholderia fungorum]
  misc_feature (30)..(150): Homolog of NCBI NO: 23109914 NR Description: hypothetical protein [Novosphingobium
  misc_feature (46)..(152): Homolog of NCBI NO: 24372753 NR Description: iojap domain protein [Shewanella oneidensis MR-1]
MLSAVRCGALRRWRPPPHLLPRILSSSFGTSPARPQVGALLELPEVEKVLRDVRAGDVRVFPVGESGLHGGACADYMVVATGRSDWHVRNIAQALLYKIKQKQKGSDRILMPSVEGQQAGKWVVIDSGSIIIHALEERAREYYDLESIWSKEVSPNTSIQELETSLVKTRRRNLSQKPMKSI

SEQ ID NO: 13555 - protein, 106 aa, Zea mays subsp. mays
  peptide (1)..(106): Ceres Seq. ID no. 12379689
  misc_feature (1)..(74): Pfam Name: Domain of unknown function DUF143 Pfam Description: Domain of unknown function DUF143
  misc_feature (1)..(104): Homolog of NCBI NO: 18408812 NR Description: expressed protein; protein id: At1g67620.1, by cDNA: 10531. [Arabidopsis thaliana]
  misc_feature (1)..(104): Homolog of NCBI NO: 21536608 NR Description: unknown [Arabidopsis thaliana]
  misc_feature (1)..(83): Homolog of NCBI NO: 15890026 NR Description: AGR_C_5039p [Agrobacterium tumefaciens]
  misc_feature (1)..(83): Homolog of NCBI NO: 17936652 NR Description: conserved hypothetical protein [Agrobacterium str. C58 (U. Washington)] >gi|25523549|pir||AH2917 conserved
  misc_feature (1)..(74): Homolog of NCBI NO: 39998299 NR Description: iojap-related protein [Geobacter sulfurreducens
  misc_feature (1)..(74): Homolog of NCBI NO: 33519773 NR Description: conserved hypothetical protein [Candidatus floridanus] >gi|33504118|emb|CAD83380.1| conserved hypothetical
  misc_feature (1)..(74): Homolog of NCBI NO: 21232046 NR Description: conserved hypothetical protein [Xanthomonas pv. campestris str. ATCC 33913] >gi|21113786|gb|AAM41887.1| hypothetical protein [Xanthomonas campestris pv. campestris str.
  misc_feature (1)..(73): Homolog of NCBI NO: 22983541 NR Description: hypothetical protein [Burkholderia fungorum]
  misc_feature (1)..(74): Homolog of NCBI NO: 23109914 NR Description: hypothetical protein [Novosphingobium
  misc_feature (1)..(76): Homolog of NCBI NO: 24372753 NR Description: iojap domain protein [Shewanella oneidensis MR-1]
MVVATGRSDWHVRNIAQALLYKIKQKQKGSDRILMPSVEGQQAGKWVVIDSGSIIIHALEERAREYYDLESIWSKEVSPNTSIQELETSLVKTRRRNLSQKPMKSI

SEQ ID NO: 13556 - DNA, 1623 bp, Zea mays subsp. mays
  misc_feature (1)..(1623): Ceres Seq. ID no. 12462280
  misc_feature: MA Experiment ID: 20000487 Result: Up-regulated in Transcription
  misc_feature: MA Experiment 20000487 PARAMETER Experiment Name: Zm_50mM_NH4NO3_L_to_H_P Parameter: Organism Value: Zea mays
  misc_feature: MA Experiment 20000487 PARAMETER Experiment Name: Zm_50mM_NH4NO3_L_to_H_P Parameter: Timepoint (hr) Value: 4
  misc_feature: MA Experiment 20000487 PARAMETER Experiment Name: Zm_50mM_NH4NO3_L_to_H_P Parameter: Tissue Value: Leaves
  misc_feature: MA Experiment 20000487 PARAMETER Experiment Name: Zm_50mM_NH4NO3_L_to_H_P Parameter: Treatment Value: 50mM NH4NO3 vs. 100mM Mannitol
  misc_feature: MA Experiment ID: 20000488 Result: Up-regulated in Transcription
  misc_feature: MA Experiment 20000488 PARAMETER Experiment Name: Zm_50mM_NH4NO3_L_to_H_P Parameter: Organism Value: Zea mays
  misc_feature: MA Experiment 20000488 PARAMETER Experiment Name: Zm_50mM_NH4NO3_L_to_H_P Parameter: Timepoint (hr) Value: 8
  misc_feature: MA Experiment 20000488 PARAMETER Experiment Name: Zm_50mM_NH4NO3_L_to_H_P Parameter: Tissue Value: Leaves
  misc_feature: MA Experiment 20000488 PARAMETER Experiment Name: Zm_50mM_NH4NO3_L_to_H_P Parameter: Treatment Value: 50mM NH4NO3 vs. 100mM Mannitol
  misc_feature: MA Experiment ID: 20001612 Result: Up-regulated in Transcription
  misc_feature: MA Experiment 20001612 PARAMETER Experiment Name: Zm_50ppm_KNO3_L-to-H_P Parameter: Age (day) Value: 19
  misc_feature: MA Experiment 20001612 PARAMETER Experiment Name: Zm_50ppm_KNO3_L-to-H_P Parameter: Organism Value: Zea mays
  misc_feature: MA Experiment 20001612 PARAMETER Experiment Name: Zm_50ppm_KNO3_L-to-H_P Parameter: Plant Line Value: 35A19
  misc_feature: MA Experiment 20001612 PARAMETER Experiment Name: Zm_50ppm_KNO3_L-to-H_P Parameter: Timepoint (hr) Value: 8
  misc_feature: MA Experiment 20001612 PARAMETER Experiment Name: Zm_50ppm_KNO3_L-to-H_P Parameter: Tissue Value: Roots
  misc_feature: MA Experiment 20001612 PARAMETER Experiment Name: Zm_50ppm_KNO3_L-to-H_P Parameter: Treatment Value: 50ppm KNO3 vs. 50ppm KCl
tgccttctgcgccctccatttcggcctctgtcccttgcaagttcaatctcacctccaaccatgggtaaagagaagtcccacatcaacattgtggttattggccacgttgactctggcaagtcgaccaccacaggacacctgatctacaagcttggaggcattgacaagcgtgtgatcgagaggttcgagaaggaggctgctgaaatgaacaagcggtccttcaagtacgcatgggtgctcgacaagctcaaggctgagcgtgagagaggtatcaccattgatatcgctctgtggaagtttgagaccaccaagtactactgcacggtcattgatgcccctggacaccgtgacttcatcaagaacatgatcactggtacctcccaggctgactgtgctgtccttatcattgactccaccactggtggttttgaggctggtatctccaaggatggccagacccgtgaacatgctctccttgcgttcacccttggtgtgaagcagatgatttgctgctgcaacaagatggatgcaaccactcccaaatactccaaggcacgttatgatgagattgtgaaggaagtctcatcctacctcaagaaagttgggtacaaccctgataagattgccttcgttcccatttctggttttgagggcgacaacatgattgagaggtccaccaaccttgactggtacaaaggcccaaccctgcttgaggctcttgaccagatcaccgagcccaagaggccttcagacaagcccctgcgtctagccctccaggatgtgtacaagattggtggtattggaactgtaccggttggtcgtgtggagactggtgtcatcaagcctggtatggtagtcacctttggtccaactggcctgactactgaggtgaagtctgttgagatgcaccatgaggcgcttcaggaggctcttccgggcgacaatgttggcttcaacgtgaagaacgttgctgtcaaggatctcaagcgtgggttcgtggcctccaactccaaggatgaccctgccaaggaggctgccagcttcacctcccaggtcatcatcatgaaccaccctgggcagattggcaacggctatgccccagtgctggactgccacacctcccacatcgccgtcaagtttgctgagctcattaccaagatcgacaggcgatctggcaaggagctcgagaaggagcccaagttcctgaagaacggtgatgctggtatggtgaagatgattcccaccaagcctatggtggtggagacattctccgcgtatcctcccctgggtaggtttgccgtccgcgacatgaggcagacggttgctgttggagtcatcaagagtgtggagaagaaggacccaaccggcgccaaggtgaccaaggcggccgccaagaagaaatgatcgatccgtgtctgctttgcagtgcctggataacttgccactaaagttgtgtatgcggttgttgctgttattgcgtggactgtttgctgcggtgtctcctgtttgtttgggtagcgcagcgtctggcctcttcaggtgtctgttgtctgttgtctttactatcagtaatgctcctgagacttctatttgtccttttggcgccgctaaatggaattttcg

SEQ ID NO: 13557 - protein, 467 aa, Zea mays subsp. mays
  peptide (1)..(467): Ceres Seq. ID no. 12462281
  misc_feature (25)..(247): Pfam Name: Elongation factor Tu GTP binding domain Pfam Description: Elongation factor Tu GTP binding domain
  misc_feature (25)..(247): Pfam Name: Elongation factor Tu GTP binding domain Pfam Description: Elongation factor Tu GTP binding domain
  misc_feature (21)..(467): Homolog of NCBI NO: 7230387 NR Description: elongation factor 1 alpha [Zea mays]
  misc_feature (21)..(467): Homolog of NCBI NO: 7230385 NR Description: elongation factor 1 alpha [Zea mays]
  misc_feature (21)..(467): Homolog of NCBI NO: 7230397 NR Description: elongation factor 1 alpha [Zea mays]
  misc_feature (21)..(467): Homolog of NCBI NO: 2282584 NR Description: elongation factor 1-alpha [Zea mays]
  misc_feature (21)..(467): Homolog of NCBI NO: 2662341 NR Description: EF-1 alpha [Oryza sativa]
  misc_feature (21)..(467): Homolog of NCBI NO: 7230385 NR Description: elongation factor 1 alpha [Zea mays]
  misc_feature (21)..(467): Homolog of NCBI NO: 2282584 NR Description: elongation factor 1-alpha [Zea mays]
  misc_feature (21)..(467): Homolog of NCBI NO: 9802384 NR Description: elongation factor [Saccharum officinarum]
  misc_feature (21)..(467): Homolog of NCBI NO: 3122071 NR Description: ELONGATION FACTOR 1-ALPHA (EF-1-ALPHA)
  misc_feature (21)..(467): Homolog of NCBI NO: 6015059 NR Description: ELONGATION FACTOR 1-ALPHA (EF-1-ALPHA)
  misc_feature (21)..(467): Homolog of NCBI NO: 2662343 NR Description: EF-1 alpha [Oryza sativa]
  misc_feature (21)..(467): Homolog of NCBI NO: 7230391 NR Description: elongation factor 1 alpha [Zea mays]
  misc_feature (21)..(467): Homolog of NCBI NO: 2662341 NR Description: EF-1 alpha [Oryza sativa]
  misc_feature (21)..(467): Homolog of NCBI NO: 7230397 NR Description: elongation factor 1 alpha [Zea mays]
  misc_feature (21)..(467): Homolog of NCBI NO: 7230387 NR Description: elongation factor 1 alpha [Zea mays]
  misc_feature (21)..(467): Homolog of NCBI NO: 7230391 NR Description: elongation factor 1 alpha [Zea mays]
  misc_feature (21)..(467): Homolog of NCBI NO: 2662343 NR Description: EF-1 alpha [Oryza sativa]
  misc_feature (21)..(467): Homolog of NCBI NO: 6015059 NR Description: ELONGATION FACTOR 1-ALPHA (EF-1-ALPHA)
  misc_feature (21)..(467): Homolog of NCBI NO: 3122071 NR Description: ELONGATION FACTOR 1-ALPHA (EF-1-ALPHA)
  misc_feature (21)..(467): Homolog of NCBI NO: 9802384 NR Description: elongation factor [Saccharum officinarum]
CLLRPPFRPLSLASSISPPTMGKEKSHINIVVIGHVDSGKSTTTGHLIYKLGGIDKRVIERFEKEAAEMNKRSFKYAWVLDKLKAERERGITIDIALWKFETTKYYCTVIDAPGHRDFIKNMITGTSQADCAVLIIDSTTGGFEAGISKDGQTREHALLAFTLGVKQMICCCNKMDATTPKYSKARYDEIVKEVSSYLKKVGYNPDKIAFVPISGFEGDNMIERSTNLDWYKGPTLLEALDQITEPKRPSDKPLRLALQDVYKIGGIGTVPVGRVETGVIKPGMVVTFGPTGLTTEVKSVEMHHEALQEALPGDNVGFNVKNVAVKDLKRGFVASNSKDDPAKEAASFTSQVIIMNHPGQIGNGYAPVLDCHTSHIAVKFAELITKIDRRSGKELEKEPKFLKNGDAGMVKMIPTKPMVVETFSAYPPLGRFAVRDMRQTVAVGVIKSVEKKDPTGAKVTKAAAKKK

SEQ ID NO: 13558 - protein, 447 aa, Zea mays subsp. mays
  peptide (1)..(447): Ceres Seq. ID no. 12462282
  misc_feature (5)..(227): Pfam Name: Elongation factor Tu GTP binding domain Pfam Description: Elongation factor Tu GTP binding domain
  misc_feature (5)..(227): Pfam Name: Elongation factor Tu GTP binding domain Pfam Description: Elongation factor Tu GTP binding domain
  misc_feature (1)..(447): Homolog of NCBI NO: 7230387 NR Description: elongation factor 1 alpha [Zea mays]
  misc_feature (1)..(447): Homolog of NCBI NO: 7230385 NR Description: elongation factor 1 alpha [Zea mays]
  misc_feature (1)..(447): Homolog of NCBI NO: 7230397 NR Description: elongation factor 1 alpha [Zea mays]
  misc_feature (1)..(447): Homolog of NCBI NO: 2282584 NR Description: elongation factor 1-alpha [Zea mays]
  misc_feature (1)..(447): Homolog of NCBI NO: 2662341 NR Description: EF-1 alpha [Oryza sativa]
  misc_feature (1)..(447): Homolog of NCBI NO: 7230385 NR Description: elongation factor 1 alpha [Zea mays]
  misc_feature (1)..(447): Homolog of NCBI NO: 2282584 NR Description: elongation factor 1-alpha [Zea mays]
  misc_feature (1)..(447): Homolog of NCBI NO: 9802384 NR Description: elongation factor [Saccharum officinarum]
  misc_feature (1)..(447): Homolog of NCBI NO: 3122071 NR Description: ELONGATION FACTOR 1-ALPHA (EF-1-ALPHA)
  misc_feature (1)..(447): Homolog of NCBI NO: 6015059 NR Description: ELONGATION FACTOR 1-ALPHA (EF-1-ALPHA)
  misc_feature (1)..(447): Homolog of NCBI NO: 2662343 NR Description: EF-1 alpha [Oryza sativa]
  misc_feature (1)..(447): Homolog of NCBI NO: 7230391 NR Description: elongation factor 1 alpha [Zea mays]
  misc_feature (1)..(447): Homolog of NCBI NO: 2662341 NR Description: EF-1 alpha [Oryza sativa]
  misc_feature (1)..(447): Homolog of NCBI NO: 7230397 NR Description: elongation factor 1 alpha [Zea mays]
  misc_feature (1)..(447): Homolog of NCBI NO: 7230387 NR Description: elongation factor 1 alpha [Zea mays]
  misc_feature (1)..(447): Homolog of NCBI NO: 7230391 NR Description: elongation factor 1 alpha [Zea mays]
  misc_feature (1)..(447): Homolog of NCBI NO: 2662343 NR Description: EF-1 alpha [Oryza sativa]
  misc_feature (1)..(447): Homolog of NCBI NO: 6015059 NR Description: ELONGATION FACTOR 1-ALPHA (EF-1-ALPHA)
  misc_feature (1)..(447): Homolog of NCBI NO: 3122071 NR Description: ELONGATION FACTOR 1-ALPHA (EF-1-ALPHA)
  misc_feature (1)..(447): Homolog of NCBI NO: 9802384 NR Description: elongation factor [Saccharum officinarum]
MGKEKSHINIVVIGHVDSGKSTTTGHLIYKLGGIDKRVIERFEKEAAEMNKRSFKYAWVLDKLKAERERGITIDIALWKFETTKYYCTVIDAPGHRDFIKNMITGTSQADCAVLIIDSTTGGFEAGISKDGQTREHALLAFTLGVKQMICCCNKMDATTPKYSKARYDEIVKEVSSYLKKVGYNPDKIAFVPISGFEGDNMIERSTNLDWYKGPTLLEALDQITEPKRPSDKPLRLALQDVYKIGGIGTVPVGRVETGVIKPGMVVTFGPTGLTTEVKSVEMHHEALQEALPGDNVGFNVKNVAVKDLKRGFVASNSKDDPAKEAASFTSQVIIMNHPGQIGNGYAPVLDCHTSHIAVKFAELITKIDRRSGKELEKEPKFLKNGDAGMVKMIPTKPMVVETFSAYPPLGRFAVRDMRQTVAVGVIKSVEKKDPTGAKVTKAAAKKK

SEQ ID NO: 13559 - protein, 399 aa, Zea mays subsp. mays
  peptide (1)..(399): Ceres Seq. ID no. 12462283
  misc_feature (1)..(179): Pfam Name: Elongation factor Tu GTP binding domain Pfam Description: Elongation factor Tu GTP binding domain
  misc_feature (1)..(179): Pfam Name: Elongation factor Tu GTP binding domain Pfam Description: Elongation factor Tu GTP binding domain
  misc_feature (1)..(399): Homolog of NCBI NO: 7230387 NR Description: elongation factor 1 alpha [Zea mays]
  misc_feature (1)..(399): Homolog of NCBI NO: 7230385 NR Description: elongation factor 1 alpha [Zea mays]
  misc_feature (1)..(399): Homolog of NCBI NO: 7230397 NR Description: elongation factor 1 alpha [Zea mays]
  misc_feature (1)..(399): Homolog of NCBI NO: 2282584 NR Description: elongation factor 1-alpha [Zea mays]
  misc_feature (1)..(399): Homolog of NCBI NO: 2662341 NR Description: EF-1 alpha [Oryza sativa]
  misc_feature (1)..(399): Homolog of NCBI NO: 7230385 NR Description: elongation factor 1 alpha [Zea mays]
  misc_feature (1)..(399): Homolog of NCBI NO: 2282584 NR Description: elongation factor 1-alpha [Zea mays]
  misc_feature (1)..(399): Homolog of NCBI NO: 9802384 NR Description: elongation factor [Saccharum officinarum]
  misc_feature (1)..(399): Homolog of NCBI NO: 3122071 NR Description: ELONGATION FACTOR 1-ALPHA (EF-1-ALPHA)
  misc_feature (1)..(399): Homolog of NCBI NO: 6015059 NR Description: ELONGATION FACTOR 1-ALPHA (EF-1-ALPHA)
  misc_feature (1)..(399): Homolog of NCBI NO: 2662343 NR Description: EF-1 alpha [Oryza sativa]
  misc_feature (1)..(399): Homolog of NCBI NO: 7230391 NR Description: elongation factor 1 alpha [Zea mays]
  misc_feature (1)..(399): Homolog of NCBI NO: 2662341 NR Description: EF-1 alpha [Oryza sativa]
  misc_feature (1)..(399): Homolog of NCBI NO: 7230397 NR Description: elongation factor 1 alpha [Zea mays]
  misc_feature (1)..(399): Homolog of NCBI NO: 7230387 NR Description: elongation factor 1 alpha [Zea mays]
  misc_feature (1)..(399): Homolog of NCBI NO: 7230391 NR Description: elongation factor 1 alpha [Zea mays]
  misc_feature (1)..(399): Homolog of NCBI NO: 2662343 NR Description: EF-1 alpha [Oryza sativa]
  misc_feature (1)..(399): Homolog of NCBI NO: 6015059 NR Description: ELONGATION FACTOR 1-ALPHA (EF-1-ALPHA)
  misc_feature (1)..(399): Homolog of NCBI NO: 3122071 NR Description: ELONGATION FACTOR 1-ALPHA (EF-1-ALPHA)
  misc_feature (1)..(399): Homolog of NCBI NO: 9802384 NR Description: elongation factor [Saccharum officinarum]
MNKRSFKYAWVLDKLKAERERGITIDIALWKFETTKYYCTVIDAPGHRDFIKNMITGTSQADCAVLIIDSTTGGFEAGISKDGQTREHALLAFTLGVKQMICCCNKMDATTPKYSKARYDEIVKEVSSYLKKVGYNPDKIAFVPISGFEGDNMIERSTNLDWYKGPTLLEALDQITEPKRPSDKPLRLALQDVYKIGGIGTVPVGRVETGVIKPGMVVTFGPTGLTTEVKSVEMHHEALQEALPGDNVGFNVKNVAVKDLKRGFVASNSKDDPAKEAASFTSQVIIMNHPGQIGNGYAPVLDCHTSHIAVKFAELITKIDRRSGKELEKEPKFLKNGDAGMVKMIPTKPMVVETFSAYPPLGRFAVRDMRQTVAVGVIKSVEKKDPTGAKVTKAAAKKK

SEQ ID NO: 13560 - DNA, 2017 bp, Zea mays subsp. mays
  misc_feature (1)..(2017): Ceres Seq. ID no. 12434851
  misc_feature: MA Experiment ID: 108528 Result: Up-regulated in Transcription
  misc_feature: MA Experiment 108528 PARAMETER Experiment Name: Zm_Imbibed_Seeds_P Parameter: Age (day) Value: 5 vs. 2
  misc_feature: MA Experiment 108528 PARAMETER Experiment Name: Zm_Imbibed_Seeds_P Parameter: Organism Value: Zea mays
  misc_feature: MA Experiment 108528 PARAMETER Experiment Name: Zm_Imbibed_Seeds_P Parameter: Plant Line Value: 35A19
  misc_feature: MA Experiment 108528 PARAMETER Experiment Name: Zm_Imbibed_Seeds_P Parameter: Tissue Value: Aerial vs. Embryo
  misc_feature: MA Experiment ID: 108530 Result: Up-regulated in Transcription
  misc_feature: MA Experiment 108530 PARAMETER Experiment Name: Zm_Imbibed_Seeds_P Parameter: Age (day) Value: 6 vs. 2
  misc_feature: MA Experiment 108530 PARAMETER Experiment Name: Zm_Imbibed_Seeds_P Parameter: Organism Value: Zea mays
  misc_feature: MA Experiment 108530 PARAMETER Experiment Name: Zm_Imbibed_Seeds_P Parameter: Plant Line Value: 35A19
  misc_feature: MA Experiment 108530 PARAMETER Experiment Name: Zm_Imbibed_Seeds_P Parameter: Tissue Value: Aerial vs. Embryo
  misc_feature: MA Experiment ID: 108545 Result: Up-regulated in Transcription
  misc_feature: MA Experiment 108545 PARAMETER Experiment Name: Zm_Imbibed_Seeds_P Parameter: Age (day) Value: 3 vs. 2
  misc_feature: MA Experiment 108545 PARAMETER Experiment Name: Zm_Imbibed_Seeds_P Parameter: Organism Value: Zea mays
  misc_feature: MA Experiment 108545 PARAMETER Experiment Name: Zm_Imbibed_Seeds_P Parameter: Plant Line Value: 35A19
  misc_feature: MA Experiment 108545 PARAMETER Experiment Name: Zm_Imbibed_Seeds_P Parameter: Tissue Value: Aerial vs. Embryo
  misc_feature: MA Experiment ID: 108547 Result: Up-regulated in Transcription
  misc_feature: MA Experiment 108547 PARAMETER Experiment Name: Zm_Imbibed_Seeds_P Parameter: Age (day) Value: 4 vs. 2
  misc_feature: MA Experiment 108547 PARAMETER Experiment Name: Zm_Imbibed_Seeds_P Parameter: Organism Value: Zea mays
  misc_feature: MA Experiment 108547 PARAMETER Experiment Name: Zm_Imbibed_Seeds_P Parameter: Plant Line Value: 35A19
  misc_feature: MA Experiment 108547 PARAMETER Experiment Name: Zm_Imbibed_Seeds_P Parameter: Tissue Value: Aerial vs. Embryo
  misc_feature: MA Experiment ID: 20000488 Result: Up-regulated in Transcription
  misc_feature: MA Experiment 20000488 PARAMETER Experiment Name: Zm_50mM_NH4NO3_L_to_H_P Parameter: Organism Value: Zea mays
  misc_feature: MA Experiment 20000488 PARAMETER Experiment Name: Zm_50mM_NH4NO3_L_to_H_P Parameter: Timepoint (hr) Value: 8
  misc_feature: MA Experiment 20000488 PARAMETER Experiment Name: Zm_50mM_NH4NO3_L_to_H_P Parameter: Tissue Value: Leaves
  misc_feature: MA Experiment 20000488 PARAMETER Experiment Name: Zm_50mM_NH4NO3_L_to_H_P Parameter: Treatment Value: 50mM NH4NO3 vs. 100mM Mannitol
cgcaattaaccctcactaaagggaacaaaagctggagctccaccgcggtggcggccgctctagaactagtggatcccccgggctgcaggaattcgcacgagaccattacctagaacatcctaatcgaaaaatgcatcccgattactatctgccgagccgaccagcggcaccagaacccacaaggttcactcatggcgcccacgtccatgctcccgttcgcgccctccaatacgtcgctgccctattcctcccgcgccacaactgccgccgcgttcgctcctcgtgggctccaccacgccgcggccggaaggagcggcggcggccaacggctcgcgtgcgctgcgcctcggcgccgccgcggagggggtcttgtggtcagggcgtcgnccgactactacgcgacgctgggcgtgccgcgcgccgccagtaacagagacatcaaggccgcgtaccggaagctcgcgcgccagtatcatcctgatgtcaataaggagcctggagcgactgaaaagtttaaagagataagtgcagcatatgaggtgctgtcagatgaaaagaagagggcgttgtatgaccaatatggtgaagctggtgttaagagtgcagttggaggctccggtggagcttacacaaccaatccatttgatctgtttgagacattttttggagcaagcatgggtggtttttctggcatggaccagagcgcgtttaggacaagcaggcgaagcactgctatacagggtgaagacatcagatatgatgtgattctggggttcacagaggcgatatttggaacagagaaagatattatattatctcatttggaaacatgtgatacatgtggtggttctggatcaaaggctggctccaagatgagaatatgttccacatgtggtgggcgagggcaagtaatgcgaactgagcaaacaccatttggtctgttctcccaggtttctatttgccccacttgtgcaggagagggcgaagtcatttcagagtattgcaggaaatgttctggagaggggcgtatccgtgtcagaaaggagatcaaagtaaaaatccctccaggagtgagcaaaggcagtactcttcgtgtacgtggggaaggtgatgctggaccaaaaggtgggcctcctggagatctctttgtttgccttgatatagaggagccatcagatatcaagagggatggtataaacttgtattcaactgtgtcaataagctatcttgaagctattttgggcactgttatgcaagtcagaactgttgatggaaccagtgaccttcgaatacctccaggtatccaacctggtgatgtaattgtcttagcgaagcaaggagttccatcattgaataagccgtctatacgtggtgatcatctcttcactgttaaagtcgcaataccgaagcgcataagtgggcgtgaaagagaattacttgaggaacttgcatctttgagtaatggtcgctttgcacgaacagacactaagccaaaacctgcccagccaaaagccatacatcaagagaaagaagttggtgctagtcaagaagatacaagcaaatctaaagaagcagagggtgactggttgaagaaacttacagattttgctgggtccattgttaatggcgctgcgaagtggctgaacgacaacctgtaggctgtaaatatttactgcaggatagaagattgtcttacatggtgctgtagtccaatcaaagttcttagattcattggtggtccccacgagctcgtatattcgttttattggagagctgcaagattttcaggctgagtggcaaccgagggagtgaaagttgtcaactaatatcgtcgcggcgttggtcccttgtcattcttgccaagcaattatttttatgtagttggagtccttttcagtctggcaagcggcgtagaagtctgaagctgtgggatgctgatcccaaaccccgggactagacaaacactgtacttgaggttttggattaatcaaattcaccgatatcgaattgcaaactt

SEQ ID NO: 13561 - protein, 488 aa, Zea mays subsp. mays
  peptide (1)..(488): Ceres Seq. ID no. 12434852
  misc_feature (298)..(420): Pfam Name: DnaJ C terminal region Pfam Description: DnaJ C terminal region
  misc_feature (10)..(488): Homolog of NCBI NO: 18412605 NR Description: DnaJ protein, putative; protein id: At1g80030.1,
  misc_feature (10)..(488): Homolog of NCBI NO: 14326568 NR Description: At1g80030/F18B13_37 [Arabidopsis thaliana]
  misc_feature (54)..(488): Homolog of NCBI NO: 7441921 NR Description: heat shock protein dnaJ - garden pea
  misc_feature (53)..(474): Homolog of NCBI NO: 25296044 NR Description: hypothetical protein F18B13.12 [imported] - thaliana >gi|5902381|gb|AAD55483.1|AC009322_23 Similar to DNAJ
  misc_feature (55)..(430): Homolog of NCBI NO: 7441920 NR Description: heat shock protein T5J17.130, dnaJ-type -
  misc_feature (55)..(430): Homolog of NCBI NO: 18420568 NR Description: DnaJ - like protein; protein id: At4g39960.1, by cDNA: gi_15450580, supported by cDNA: gi_17380627 [Arabidopsis >gi|15450581|gb|AAK96562.1| AT4g39960/T5J17_130 [Arabidopsis
  misc_feature (6)..(421): Homolog of NCBI NO: 16326131 NR Description: DNAJ homologue [Oryza sativa]
  misc_feature (55)..(433): Homolog of NCBI NO: 30794072 NR Description: putative DnaJ protein [Arabidopsis thaliana]
  misc_feature (55)..(433): Homolog of NCBI NO: 18399949 NR Description: putative DnaJ protein; protein id: At2g22360.1, by cDNA: 10312. [Arabidopsis thaliana]
  misc_feature (55)..(433): Homolog of NCBI NO: 25296019 NR Description: probable DnaJ protein [imported] - Arabidopsis
  misc_feature (66)..(66): Xaa is any aa, unknown or other
MAPTSMLPFAPSNTSLPYSSRATTAAAFAPRGLHHAAAGRSGGGQRLACAAPRRRRGGGLVVRASXDYYATLGVPRAASNRDIKAAYRKLARQYHPDVNKEPGATEKFKEISAAYEVLSDEKKRALYDQYGEAGVKSAVGGSGGAYTTNPFDLFETFFGASMGGFSGMDQSAFRTSRRSTAIQGEDIRYDVILGFTEAIFGTEKDIILSHLETCDTCGGSGSKAGSKMRICSTCGGRGQVMRTEQTPFGLFSQVSICPTCAGEGEVISEYCRKCSGEGRIRVRKEIKVKIPPGVSKGSTLRVRGEGDAGPKGGPPGDLFVCLDIEEPSDIKRDGINLYSTVSISYLEAILGTVMQVRTVDGTSDLRIPPGIQPGDVIVLAKQGVPSLNKPSIRGDHLFTVKVAIPKRISGRERELLEELASLSNGRFARTDTKPKPAQPKAIHQEKEVGASQEDTSKSKEAEGDWLKKLTDFAGSIVNGAAKWLNDNL

SEQ ID NO: 13562 - protein, 483 aa, Zea mays subsp. mays
  peptide (1)..(483): Ceres Seq. ID no. 12434853
  misc_feature (293)..(415): Pfam Name: DnaJ C terminal region Pfam Description: DnaJ C terminal region
  misc_feature (50)..(428): Homolog of NCBI NO: 18399949 NR Description: putative DnaJ protein; protein id: At2g22360.1, by cDNA: 10312. [Arabidopsis thaliana]
  misc_feature (5)..(483): Homolog of NCBI NO: 18412605 NR Description: DnaJ protein, putative; protein id: At1g80030.1,
  misc_feature (49)..(483): Homolog of NCBI NO: 7441921 NR Description: heat shock protein dnaJ - garden pea
  misc_feature (50)..(425): Homolog of NCBI NO: 7441920 NR Description: heat shock protein T5J17.130, dnaJ-type -
  misc_feature (1)..(416): Homolog of NCBI NO: 16326131 NR Description: DNAJ homologue [Oryza sativa]
  misc_feature (50)..(428): Homolog of NCBI NO: 30794072 NR Description: putative DnaJ protein [Arabidopsis thaliana]
  misc_feature (50)..(425): Homolog of NCBI NO: 18420568 NR Description: DnaJ - like protein; protein id: At4g39960.1, by cDNA: gi_15450580, supported by cDNA: gi_17380627 [Arabidopsis >gi|15450581|gb|AAK96562.1| AT4g39960/T5J17_130 [Arabidopsis
  misc_feature (48)..(469): Homolog of NCBI NO: 25296044 NR Description: hypothetical protein F18B13.12 [imported] - thaliana >gi|5902381|gb|AAD55483.1|AC009322_23 Similar to DNAJ
  misc_feature (5)..(483): Homolog of NCBI NO: 14326568 NR Description: At1g80030/F18B13_37 [Arabidopsis thaliana]
  misc_feature (50)..(428): Homolog of NCBI NO: 25296019 NR Description: probable DnaJ protein [imported] - Arabidopsis
  misc_feature (61)..(61): Xaa is any aa, unknown or other
MLPFAPSNTSLPYSSRATTAAAFAPRGLHHAAAGRSGGGQRLACAAPRRRRGGGLVVRASXDYYATLGVPRAASNRDIKAAYRKLARQYHPDVNKEPGATEKFKEISAAYEVLSDEKKRALYDQYGEAGVKSAVGGSGGAYTTNPFDLFETFFGASMGGFSGMDQSAFRTSRRSTAIQGEDIRYDVILGFTEAIFGTEKDIILSHLETCDTCGGSGSKAGSKMRICSTCGGRGQVMRTEQTPFGLFSQVSICPTCAGEGEVISEYCRKCSGEGRIRVRKEIKVKIPPGVSKGSTLRVRGEGDAGPKGGPPGDLFVCLDIEEPSDIKRDGINLYSTVSISYLEAILGTVMQVRTVDGTSDLRIPPGIQPGDVIVLAKQGVPSLNKPSIRGDHLFTVKVAIPKRISGRERELLEELASLSNGRFARTDTKPKPAQPKAIHQEKEVGASQEDTSKSKEAEGDWLKKLTDFAGSIVNGAAKWLNDNL

SEQ ID NO: 13563 - protein, 327 aa, Zea mays subsp. mays
  peptide (1)..(327): Ceres Seq. ID no. 12434854
  misc_feature (137)..(259): Pfam Name: DnaJ C terminal region Pfam Description: DnaJ C terminal region
  misc_feature (1)..(327): Homolog of NCBI NO: 18412605 NR Description: DnaJ protein, putative; protein id: At1g80030.1,
  misc_feature (1)..(327): Homolog of NCBI NO: 14326568 NR Description: At1g80030/F18B13_37 [Arabidopsis thaliana]
  misc_feature (1)..(327): Homolog of NCBI NO: 7441921 NR Description: heat shock protein dnaJ - garden pea
  misc_feature (1)..(313): Homolog of NCBI NO: 25296044 NR Description: hypothetical protein F18B13.12 [imported] - thaliana >gi|5902381|gb|AAD55483.1|AC009322_23 Similar to DNAJ
  misc_feature (1)..(269): Homolog of NCBI NO: 7441920 NR Description: heat shock protein T5J17.130, dnaJ-type -
  misc_feature (1)..(269): Homolog of NCBI NO: 18420568 NR Description: DnaJ - like protein; protein id: At4g39960.1, by cDNA: gi_15450580, supported by cDNA: gi_17380627 [Arabidopsis >gi|15450581|gb|AAK96562.1| AT4g39960/T5J17_130 [Arabidopsis
  misc_feature (1)..(260): Homolog of NCBI NO: 16326131 NR Description: DNAJ homologue [Oryza sativa]
  misc_feature (1)..(272): Homolog of NCBI NO: 30794072 NR Description: putative DnaJ protein [Arabidopsis thaliana]
  misc_feature (1)..(272): Homolog of NCBI NO: 18399949 NR Description: putative DnaJ protein; protein id: At2g22360.1, by cDNA: 10312. [Arabidopsis thaliana]
  misc_feature (1)..(272): Homolog of NCBI NO: 25296019 NR Description: probable DnaJ protein [imported] - Arabidopsis
MGGFSGMDQSAFRTSRRSTAIQGEDIRYDVILGFTEAIFGTEKDIILSHLETCDTCGGSGSKAGSKMRICSTCGGRGQVMRTEQTPFGLFSQVSICPTCAGEGEVISEYCRKCSGEGRIRVRKEIKVKIPPGVSKGSTLRVRGEGDAGPKGGPPGDLFVCLDIEEPSDIKRDGINLYSTVSISYLEAILGTVMQVRTVDGTSDLRIPPGIQPGDVIVLAKQGVPSLNKPSIRGDHLFTVKVAIPKRISGRERELLEELASLSNGRFARTDTKPKPAQPKAIHQEKEVGASQEDTSKSKEAEGDWLKKLTDFAGSIVNGAAKWLNDNL

SEQ ID NO: 13564 - DNA, 1467 bp, Zea mays subsp. mays
  misc_feature (1)..(1467): Ceres Seq. ID no. 12368243
  misc_feature: MA Experiment ID: 20000492 Result: Down-regulated in Transcription
  misc_feature: MA Experiment 20000492 PARAMETER Experiment Name: Zm_Hybrid_Seed_Dev_P Parameter: DAP Value: 12
  misc_feature: MA Experiment 20000492 PARAMETER Experiment Name: Zm_Hybrid_Seed_Dev_P Parameter: Organism Value: Zea mays
  misc_feature: MA Experiment 20000492 PARAMETER Experiment Name: Zm_Hybrid_Seed_Dev_P Parameter: Plant Line Value: 35A19
  misc_feature: MA Experiment 20000492 PARAMETER Experiment Name: Zm_Hybrid_Seed_Dev_P Parameter: Tissue Value: Fert Kernel vs. Unfert Floret
gcacgagaccattacctagaacatcctaatcgaaaaagaggaaacgccctgcacagcacgactcctccccatctaccgctacctttctacctacccatctagcacccctcgctcgccaagccaaggtctgagccgttcgaggagaaggacggagttaagctgccgagctacaggggcgacaacgtcaacggcgacgacttcaccgagaagagccgcgtgccggacccgcagaggatgatccgcgcctacgcacagtcggtggcgacactcaacctgctccgcgcgttcgccaccggagggtacgctgccatgcagcgcgtcactcagtggaacctcgatttcatggatcacaacgagcaaggtgataggtaccgtgaattggcccatagggtggatgatgctcttgggttcatgactgcatcggggcttacagtcgaccacccgataatgacgactactgacttctggacctcgcacgagtgccttctcttaccctacgagcaggctcttacccgtgaggattccaccagtggccttttctatgattgttcggcccacatgttgtgggttggtgagcgcactcgacaactcgatggagctcatgttgaattcctccgtggtgttgccaaccctctgggcataaaggtgagcgacaaaatgaaccccagtgagttggtgaagctgattgatattctgaacccttcaaacaaacctggaaggatcaccataattacaaggatgggggcagagaacatgagggtgaagttgcctcatctcatccgtgctgttcgcaatgctggactgattgtcacatggattactgatcctatgcatggaaacaccatcaaggccccttgtggcctgaagactcgtccatttgactccattctggctgaagtgcgtgcttcttcgatgtgcatgaccaagaaggaagccaccctgggggcgtccaccttgaaatgactgggcagaacgtgaccgagtatcggtggatcacggaccgtgaccttcgacgatctgagcgaccgctaccacacccactgcgacccaaggctgaatgcctcccagtccctggagctcgcctttatcatcgcagagaggctgaggaagaggaggatgcgatcggggctcaacagcagcctgccactgccgccactggcttctgagtagccggagccaaacacaaaggagggtaggaatagctgtggtgactcggaagagaaagagacagtcgacgccttgttttgttgatgcttagtgtggtgacctggtggtggtggtggtgggtgttcttggcacaagttacatgctggggatagctataggaggtacctgttgaggtgtgtaagacagtagctagcaaccgtatgccttggtttcctgtttgggtgcgtgacttgccgactttctagctgcttctggggttttgacctcggtaaggaaagaataaaaagataatcggagtgc

SEQ ID NO: 13565 - protein, 242 aa, Zea mays subsp. mays
  peptide (1)..(242): Ceres Seq. ID no. 12368244
  misc_feature (1)..(242): Pfam Name: Class-II DAHP synthetase family Pfam Description: Class-II DAHP synthetase family
  misc_feature (1)..(242): Homolog of NCBI NO: 34906844 NR Description: putative phospho-2-dehydro-3-deoxyheptonate
  misc_feature (1)..(242): Homolog of NCBI NO: 2398679 NR Description: 3-deoxy-D-arabino-heptulosonate 7-phosphate
  misc_feature (1)..(242): Homolog of NCBI NO: 2546988 NR Description: 2-dehydro-3-deoxyphosphoheptonate aldolase;
  misc_feature (1)..(242): Homolog of NCBI NO: 15219878 NR Description: 3-deoxy-D-arabino-heptulosonate 7-phosphate, protein id: At1g22410.1 [Arabidopsis thaliana]
  misc_feature (1)..(242): Homolog of NCBI NO: 7488957 NR Description: probable 2-dehydro-3-deoxy-phosphoheptonate
  misc_feature (1)..(242): Homolog of NCBI NO: 584777 NR Description: Phospho-2-dehydro-3-deoxyheptonate aldolase 1,
  misc_feature (1)..(242): Homolog of NCBI NO: 24745903 NR Description: 3-deoxy-D-arabino-heptulosonate 7-phosphate
  misc_feature (1)..(242): Homolog of NCBI NO: 2398681 NR Description: 3-deoxy-D-arabino-heptulosonate 7-phosphate
  misc_feature (1)..(242): Homolog of NCBI NO: 584778 NR Description: Phospho-2-dehydro-3-deoxyheptonate aldolase 2,
  misc_feature (1)..(242): Homolog of NCBI NO: 114193 NR Description: Phospho-2-dehydro-3-deoxyheptonate aldolase 1,
MIRAYAQSVATLNLLRAFATGGYAAMQRVTQWNLDFMDHNEQGDRYRELAHRVDDALGFMTASGLTVDHPIMTTTDFWTSHECLLLPYEQALTREDSTSGLFYDCSAHMLWVGERTRQLDGAHVEFLRGVANPLGIKVSDKMNPSELVKLIDILNPSNKPGRITIITRMGAENMRVKLPHLIRAVRNAGLIVTWITDPMHGNTIKAPCGLKTRPFDSILAEVRASSMCMTKKEATLGASTLK

SEQ ID NO: 13566 - protein, 217 aa, Zea mays subsp. mays
  peptide (1)..(217): Ceres Seq. ID no. 12368245
  misc_feature (1)..(217): Pfam Name: Class-II DAHP synthetase family Pfam Description: Class-II DAHP synthetase family
  misc_feature (1)..(217): Homolog of NCBI NO: 34906844 NR Description: putative phospho-2-dehydro-3-deoxyheptonate
  misc_feature (1)..(217): Homolog of NCBI NO: 2398679 NR Description: 3-deoxy-D-arabino-heptulosonate 7-phosphate
  misc_feature (1)..(217): Homolog of NCBI NO: 2546988 NR Description: 2-dehydro-3-deoxyphosphoheptonate aldolase;
  misc_feature (1)..(217): Homolog of NCBI NO: 15219878 NR Description: 3-deoxy-D-arabino-heptulosonate 7-phosphate, protein id: At1g22410.1 [Arabidopsis thaliana]
  misc_feature (1)..(217): Homolog of NCBI NO: 7488957 NR Description: probable 2-dehydro-3-deoxy-phosphoheptonate
  misc_feature (1)..(217): Homolog of NCBI NO: 584777 NR Description: Phospho-2-dehydro-3-deoxyheptonate aldolase 1,
  misc_feature (1)..(217): Homolog of NCBI NO: 24745903 NR Description: 3-deoxy-D-arabino-heptulosonate 7-phosphate
  misc_feature (1)..(217): Homolog of NCBI NO: 2398681 NR Description: 3-deoxy-D-arabino-heptulosonate 7-phosphate
  misc_feature (1)..(217): Homolog of NCBI NO: 584778 NR Description: Phospho-2-dehydro-3-deoxyheptonate aldolase 2,
  misc_feature (1)..(217): Homolog of NCBI NO: 114193 NR Description: Phospho-2-dehydro-3-deoxyheptonate aldolase 1,
MQRVTQWNLDFMDHNEQGDRYRELAHRVDDALGFMTASGLTVDHPIMTTTDFWTSHECLLLPYEQALTREDSTSGLFYDCSAHMLWVGERTRQLDGAHVEFLRGVANPLGIKVSDKMNPSELVKLIDILNPSNKPGRITIITRMGAENMRVKLPHLIRAVRNAGLIVTWITDPMHGNTIKAPCGLKTRPFDSILAEVRASSMCMTKKEATLGASTLK

SEQ ID NO: 13567 - protein, 206 aa, Zea mays subsp. mays
  peptide (1)..(206): Ceres Seq. ID no. 12368246
  misc_feature (1)..(206): Pfam Name: Class-II DAHP synthetase family Pfam Description: Class-II DAHP synthetase family
  misc_feature (1)..(206): Homolog of NCBI NO: 34906844 NR Description: putative phospho-2-dehydro-3-deoxyheptonate
  misc_feature (1)..(206): Homolog of NCBI NO: 2398679 NR Description: 3-deoxy-D-arabino-heptulosonate 7-phosphate
  misc_feature (1)..(206): Homolog of NCBI NO: 2546988 NR Description: 2-dehydro-3-deoxyphosphoheptonate aldolase;
  misc_feature (1)..(206): Homolog of NCBI NO: 15219878 NR Description: 3-deoxy-D-arabino-heptulosonate 7-phosphate, protein id: At1g22410.1 [Arabidopsis thaliana]
  misc_feature (1)..(206): Homolog of NCBI NO: 7488957 NR Description: probable 2-dehydro-3-deoxy-phosphoheptonate
  misc_feature (1)..(206): Homolog of NCBI NO: 584777 NR Description: Phospho-2-dehydro-3-deoxyheptonate aldolase 1,
  misc_feature (1)..(206): Homolog of NCBI NO: 24745903 NR Description: 3-deoxy-D-arabino-heptulosonate 7-phosphate
  misc_feature (1)..(206): Homolog of NCBI NO: 2398681 NR Description: 3-deoxy-D-arabino-heptulosonate 7-phosphate
  misc_feature (1)..(206): Homolog of NCBI NO: 584778 NR Description: Phospho-2-dehydro-3-deoxyheptonate aldolase 2,
  misc_feature (1)..(206): Homolog of NCBI NO: 114193 NR Description: Phospho-2-dehydro-3-deoxyheptonate aldolase 1,
MDHNEQGDRYRELAHRVDDALGFMTASGLTVDHPIMTTTDFWTSHECLLLPYEQALTREDSTSGLFYDCSAHMLWVGERTRQLDGAHVEFLRGVANPLGIKVSDKMNPSELVKLIDILNPSNKPGRITIITRMGAENMRVKLPHLIRAVRNAGLIVTWITDPMHGNTIKAPCGLKTRPFDSILAEVRASSMCMTKKEATLGASTLK

SEQ ID NO: 13568 - DNA, 1406 bp, Zea mays subsp. mays
  misc_feature (1)..(1406): Ceres Seq. ID no. 12341374
  misc_feature: MA Experiment ID: 108527 Result: Down-regulated in Transcription
  misc_feature: MA Experiment 108527 PARAMETER Experiment Name: Zm_5mM_NO_P Parameter: Age (day) Value: 8
  misc_feature: MA Experiment 108527 PARAMETER Experiment Name: Zm_5mM_NO_P Parameter: Organism Value: Zea mays
  misc_feature: MA Experiment 108527 PARAMETER Experiment Name: Zm_5mM_NO_P Parameter: Plant Line Value: 35A19
  misc_feature: MA Experiment 108527 PARAMETER Experiment Name: Zm_5mM_NO_P Parameter: Timepoint (hr) Value: 6
  misc_feature: MA Experiment 108527 PARAMETER Experiment Name: Zm_5mM_NO_P Parameter: Tissue Value: Aerial
  misc_feature: MA Experiment 108527 PARAMETER Experiment Name: Zm_5mM_NO_P Parameter: Treatment Value: 5mM NO vs. No Treatment
  misc_feature: MA Experiment ID: 108528 Result: Up-regulated in Transcription
  misc_feature: MA Experiment 108528 PARAMETER Experiment Name: Zm_Imbibed_Seeds_P Parameter: Age (day) Value: 5 vs. 2
  misc_feature: MA Experiment 108528 PARAMETER Experiment Name: Zm_Imbibed_Seeds_P Parameter: Organism Value: Zea mays
  misc_feature: MA Experiment 108528 PARAMETER Experiment Name: Zm_Imbibed_Seeds_P Parameter: Plant Line Value: 35A19
  misc_feature: MA Experiment 108528 PARAMETER Experiment Name: Zm_Imbibed_Seeds_P Parameter: Tissue Value: Aerial vs. Embryo
  misc_feature: MA Experiment ID: 108529 Result: Up-regulated in Transcription
  misc_feature: MA Experiment 108529 PARAMETER Experiment Name: Zm_Imbibed_Seeds_P Parameter: Age (day) Value: 5 vs. 2
  misc_feature: MA Experiment 108529 PARAMETER Experiment Name: Zm_Imbibed_Seeds_P Parameter: Organism Value: Zea mays
  misc_feature: MA Experiment 108529 PARAMETER Experiment Name: Zm_Imbibed_Seeds_P Parameter: Plant Line Value: 35A19
  misc_feature: MA Experiment 108529 PARAMETER Experiment Name: Zm_Imbibed_Seeds_P Parameter: Tissue Value: Roots vs. Embryo
  misc_feature: MA Experiment ID: 108530 Result: Up-regulated in Transcription
  misc_feature: MA Experiment 108530 PARAMETER Experiment Name: Zm_Imbibed_Seeds_P Parameter: Age (day) Value: 6 vs. 2
  misc_feature: MA Experiment 108530 PARAMETER Experiment Name: Zm_Imbibed_Seeds_P Parameter: Organism Value: Zea mays
  misc_feature: MA Experiment 108530 PARAMETER Experiment Name: Zm_Imbibed_Seeds_P Parameter: Plant Line Value: 35A19
  misc_feature: MA Experiment 108530 PARAMETER Experiment Name: Zm_Imbibed_Seeds_P Parameter: Tissue Value: Aerial vs. Embryo
  misc_feature: MA Experiment ID: 108543 Result: Up-regulated in Transcription
  misc_feature: MA Experiment ID: 108545 Result: Down-regulated in Transcription
  misc_feature: MA Experiment 108545 PARAMETER Experiment Name: Zm_Imbibed_Seeds_P Parameter: Age (day) Value: 3 vs. 2
  misc_feature: MA Experiment 108545 PARAMETER Experiment Name: Zm_Imbibed_Seeds_P Parameter: Organism Value: Zea mays
  misc_feature: MA Experiment 108545 PARAMETER Experiment Name: Zm_Imbibed_Seeds_P Parameter: Plant Line Value: 35A19
  misc_feature: MA Experiment 108545 PARAMETER Experiment Name: Zm_Imbibed_Seeds_P Parameter: Tissue Value: Aerial vs. Embryo
  misc_feature: MA Experiment ID: 108546 Result: Up-regulated in Transcription
  misc_feature: MA Experiment 108546 PARAMETER Experiment Name: Zm_Imbibed_Seeds_P Parameter: Age (day) Value: 3 vs. 2
  misc_feature: MA Experiment 108546 PARAMETER Experiment Name: Zm_Imbibed_Seeds_P Parameter: Organism Value: Zea mays
  misc_feature: MA Experiment 108546 PARAMETER Experiment Name: Zm_Imbibed_Seeds_P Parameter: Plant Line Value: 35A19
  misc_feature: MA Experiment 108546 PARAMETER Experiment Name: Zm_Imbibed_Seeds_P Parameter: Tissue Value: Roots vs. Embryo
  misc_feature: MA Experiment ID: 108559 Result: Down-regulated in Transcription
  misc_feature: MA Experiment 108559 PARAMETER Experiment Name: Zm_5mM_NO_P Parameter: Age (day) Value: 8
  misc_feature: MA Experiment 108559 PARAMETER Experiment Name: Zm_5mM_NO_P Parameter: Organism Value: Zea mays
  misc_feature: MA Experiment 108559 PARAMETER Experiment Name: Zm_5mM_NO_P Parameter: Plant Line Value: 35A19
  misc_feature: MA Experiment 108559 PARAMETER Experiment Name: Zm_5mM_NO_P Parameter: Timepoint (hr) Value: 12
  misc_feature: MA Experiment 108559 PARAMETER Experiment Name: Zm_5mM_NO_P Parameter: Tissue Value: Aerial
  misc_feature: MA Experiment 108559 PARAMETER Experiment Name: Zm_5mM_NO_P Parameter: Treatment Value: 5mM NO vs. No Treatment
  misc_feature: MA Experiment ID: 108689 Result: Up-regulated in Transcription
  misc_feature: MA Experiment 108689 PARAMETER Experiment Name: Zm_Drought_Roots_P Parameter: Age (day) Value: 9
  misc_feature: MA Experiment 108689 PARAMETER Experiment Name: Zm_Drought_Roots_P Parameter: Organism Value: Zea mays
  misc_feature: MA Experiment 108689 PARAMETER Experiment Name: Zm_Drought_Roots_P Parameter: Plant Line Value: 35A19
  misc_feature: MA Experiment 108689 PARAMETER Experiment Name: Zm_Drought_Roots_P Parameter: Timepoint (hr) Value: 24
  misc_feature: MA Experiment 108689 PARAMETER Experiment Name: Zm_Drought_Roots_P Parameter: Tissue Value: Roots
  misc_feature: MA Experiment 108689 PARAMETER Experiment Name: Zm_Drought_Roots_P Parameter: Treatment Value: Drought vs. No Drought
  misc_feature: MA Experiment ID: 20000535 Result: Down-regulated in Transcription
  misc_feature: MA Experiment 20000535 PARAMETER Experiment Name: Zm_Hybrid_Seed_Dev_P Parameter: DAP Value: 30 vs. 12
  misc_feature: MA Experiment 20000535 PARAMETER Experiment Name: Zm_Hybrid_Seed_Dev_P Parameter: Organism Value: Zea mays
  misc_feature: MA Experiment 20000535 PARAMETER Experiment Name: Zm_Hybrid_Seed_Dev_P Parameter: Plant Line Value: 35A19
  misc_feature: MA Experiment 20000535 PARAMETER Experiment Name: Zm_Hybrid_Seed_Dev_P Parameter: Tissue Value: Embryo vs. Unfert Floret
aaaaattgcaagagtttgagccaacacacacagagagaggacaactcctcacaactctcccttccctcctgtaggggccaaaagggttagagagtaggagaagtagttccctagcccaacacaagaaaaacaagctcgatctcctcatcaccctaatccaagcaactgctttgtgtgttgggaaattcttgtgacccctgttatattattatccgtgtagctactagcttcattcccccctttgtacccatcaaatggctggcatgtctctgcaacacccctgggcgtttgctttcggtctactaggtaacgtcatctccttcatgaccttcctggccccgataccgacgttctaccgcatctacaagagcaagtcgacggaaggcttccagtcggttccctacgtggttgccctgttcagcgccatgctgtggatcttctacgcactgatcaagtccaacgagaccttcctcatcaccatcaacgccgccggctgcgtcatcgagaccatctacgtcgtcatgtacttcgtctacgcgcccaagaaagccaagctgttcacggccaagatcatggtcctcctcaatggcggcgtctttggggtcatcctcctgctcacccttctcctcttcaagggcagtaagcgcgttgtgctgcttggctggatctgcgtcggtttctccgtcagtgtcttcgtcgcgccactcagcatcatgagacgagtgatccagacgaagagcgtggagtacatgcccttctccctctccctctcgctcaccctcagcgccgtcgtctggttcctctacggcctcctcatcaaggacaaatacgtcgcgcttccaaacatcctggggttcaccttcggcgtggtccagatggtgctctacgtgttgtacatgaacaagacgccggtggcggcgactgccgagggcaaggatgccggcaagctttcctcagctgcagacgagcacgtcctcgtcaacatcgccaagctcagcccagccctcccggagaggagctccggggtgcacccagtcacccagatggcgggcgttcccgtcaggagctgcgctgctgaagcaaccgcgccggcgatgctgcccaacagggacgtggtcgacgtcttcgtcagccgacacagccccgccgtccacgtggcatagattctcgatcgatcgcgtgcatggcccatgcatgcgcccgccacacgtacgctagcttttatatattcgaaggacttgctgctggtcgtgagcatatatatgatggagaaaatgattaagtagtatatatgtaagtaattaactgccatggaagcttgctaatggatggaggcagaggccagaacgatgaagggggaagctatacatatatgtgtgtaatatagatatatggggtttgtgtcc

SEQ ID NO: 13569 - protein, 302 aa, Zea mays subsp. mays
  peptide (1)..(302): Ceres Seq. ID no. 12341375
  misc_feature (12)..(99): Pfam Name: MtN3/saliva family Pfam Description: MtN3/saliva family
  misc_feature (10)..(296): Homolog of NCBI NO: 15241278 NR Description: MtN3-like protein; protein id: At5g50800.1,
  misc_feature (10)..(296): Homolog of NCBI NO: 21593109 NR Description: MtN3-like protein [Arabidopsis thaliana]
  misc_feature (1)..(252): Homolog of NCBI NO: 15237803 NR Description: MtN3-like protein; protein id: At5g23660.1, by cDNA: gi_15982722, supported by cDNA: gi_16323439, supported
  misc_feature (1)..(232): Homolog of NCBI NO: 15229019 NR Description: MTN3-like protein; protein id: At3g48740.1, by cDNA: gi_13605687, supported by cDNA: gi_16930410, supported
  misc_feature (10)..(228): Homolog of NCBI NO: 14715258 NR Description: N3 like protein [Medicago truncatula]
  misc_feature (4)..(227): Homolog of NCBI NO: 1619602 NR Description: MtN3 [Medicago truncatula]
  misc_feature (4)..(262): Homolog of NCBI NO: 15234863 NR Description: MtN3 - like protein; protein id: At4g25010.1
  misc_feature (4)..(231): Homolog of NCBI NO: 21554178 NR Description: similar to MtN3 protein [Arabidopsis thaliana]
  misc_feature (8)..(231): Homolog of NCBI NO: 15225014 NR Description: similar to MtN3 protein; protein id: At2g39060.1, by cDNA: 20810. [Arabidopsis thaliana] >gi|25354616|pir||F84812
  misc_feature (3)..(261): Homolog of NCBI NO: 15240040 NR Description: senescence-associated protein (SAG29); protein At5g13170.1, supported by cDNA: 38843., supported by cDNA:
MAGMSLQHPWAFAFGLLGNVISFMTFLAPIPTFYRIYKSKSTEGFQSVPYVVALFSAMLWIFYALIKSNETFLITINAAGCVIETIYVVMYFVYAPKKAKLFTAKIMVLLNGGVFGVILLLTLLLFKGSKRVVLLGWICVGFSVSVFVAPLSIMRRVIQTKSVEYMPFSLSLSLTLSAVVWFLYGLLIKDKYVALPNILGFTFGVVQMVLYVLYMNKTPVAATAEGKDAGKLSSAADEHVLVNIAKLSPALPERSSGVHPVTQMAGVPVRSCAAEATAPAMLPNRDVVDVFVSRHSPAVHVA

SEQ ID NO: 13570 - protein, 299 aa, Zea mays subsp. mays
  peptide (1)..(299): Ceres Seq. ID no. 12341376
  misc_feature (9)..(96): Pfam Name: MtN3/saliva family Pfam Description: MtN3/saliva family
  misc_feature (7)..(293): Homolog of NCBI NO: 15241278 NR Description: MtN3-like protein; protein id: At5g50800.1,
  misc_feature (7)..(293): Homolog of NCBI NO: 21593109 NR Description: MtN3-like protein [Arabidopsis thaliana]
  misc_feature (1)..(249): Homolog of NCBI NO: 15237803 NR Description: MtN3-like protein; protein id: At5g23660.1, by cDNA: gi_15982722, supported by cDNA: gi_16323439, supported
  misc_feature (1)..(229): Homolog of NCBI NO: 15229019 NR Description: MTN3-like protein; protein id: At3g48740.1, by cDNA: gi_13605687, supported by cDNA: gi_16930410, supported
  misc_feature (7)..(225): Homolog of NCBI NO: 14715258 NR Description: N3 like protein [Medicago truncatula]
  misc_feature (1)..(224): Homolog of NCBI NO: 1619602 NR Description: MtN3 [Medicago truncatula]
  misc_feature (1)..(259): Homolog of NCBI NO: 15234863 NR Description: MtN3 - like protein; protein id: At4g25010.1
  misc_feature (1)..(228): Homolog of NCBI NO: 21554178 NR Description: similar to MtN3 protein [Arabidopsis thaliana]
  misc_feature (5)..(228): Homolog of NCBI NO: 15225014 NR Description: similar to MtN3 protein; protein id: At2g39060.1, by cDNA: 20810. [Arabidopsis thaliana] >gi|25354616|pir||F84812
  misc_feature (1)..(258): Homolog of NCBI NO: 15240040 NR Description: senescence-associated protein (SAG29); protein At5g13170.1, supported by cDNA: 38843., supported by cDNA:
MSLQHPWAFAFGLLGNVISFMTFLAPIPTFYRIYKSKSTEGFQSVPYVVALFSAMLWIFYALIKSNETFLITINAAGCVIETIYVVMYFVYAPKKAKLFTAKIMVLLNGGVFGVILLLTLLLFKGSKRVVLLGWICVGFSVSVFVAPLSIMRRVIQTKSVEYMPFSLSLSLTLSAVVWFLYGLLIKDKYVALPNILGFTFGVVQMVLYVLYMNKTPVAATAEGKDAGKLSSAADEHVLVNIAKLSPALPERSSGVHPVTQMAGVPVRSCAAEATAPAMLPNRDVVDVFVSRHSPAVHVA

SEQ ID NO: 13571 - protein, 279 aa, Zea mays subsp. mays
  peptide (1)..(279): Ceres Seq. ID no. 12341377
  misc_feature (1)..(76): Pfam Name: MtN3/saliva family Pfam Description: MtN3/saliva family
  misc_feature (1)..(273): Homolog of NCBI NO: 15241278 NR Description: MtN3-like protein; protein id: At5g50800.1,
  misc_feature (1)..(273): Homolog of NCBI NO: 21593109 NR Description: MtN3-like protein [Arabidopsis thaliana]
  misc_feature (1)..(229): Homolog of NCBI NO: 15237803 NR Description: MtN3-like protein; protein id: At5g23660.1, by cDNA: gi_15982722, supported by cDNA: gi_16323439, supported
  misc_feature (1)..(209): Homolog of NCBI NO: 15229019 NR Description: MTN3-like protein; protein id: At3g48740.1, by cDNA: gi_13605687, supported by cDNA: gi_16930410, supported
  misc_feature (1)..(205): Homolog of NCBI NO: 14715258 NR Description: N3 like protein [Medicago truncatula]
  misc_feature (1)..(204): Homolog of NCBI NO: 1619602 NR Description: MtN3 [Medicago truncatula]
  misc_feature (1)..(239): Homolog of NCBI NO: 15234863 NR Description: MtN3 - like protein; protein id: At4g25010.1
  misc_feature (1)..(208): Homolog of NCBI NO: 21554178 NR Description: similar to MtN3 protein [Arabidopsis thaliana]
  misc_feature (1)..(208): Homolog of NCBI NO: 15225014 NR Description: similar to MtN3 protein; protein id: At2g39060.1, by cDNA: 20810. [Arabidopsis thaliana] >gi|25354616|pir||F84812
  misc_feature (1)..(238): Homolog of NCBI NO: 15240040 NR Description: senescence-associated protein (SAG29); protein At5g13170.1, supported by cDNA: 38843., supported by cDNA:
MTFLAPIPTFYRIYKSKSTEGFQSVPYVVALFSAMLWIFYALIKSNETFLITINAAGCVIETIYVVMYFVYAPKKAKLFTAKIMVLLNGGVFGVILLLTLLLFKGSKRVVLLGWICVGFSVSVFVAPLSIMRRVIQTKSVEYMPFSLSLSLTLSAVVWFLYGLLIKDKYVALPNILGFTFGVVQMVLYVLYMNKTPVAATAEGKDAGKLSSAADEHVLVNIAKLSPALPERSSGVHPVTQMAGVPVRSCAAEATAPAMLPNRDVVDVFVSRHSPAVHVA

SEQ ID NO: 13572 - DNA, 1250 bp, Zea mays subsp. mays
  misc_feature (1)..(1250): Ceres Seq. ID no. 12411217
  misc_feature: MA Experiment ID: 108522 Result: Down-regulated in Transcription
  misc_feature: MA Experiment 108522 PARAMETER Experiment Name: Zm_42deg_Heat_P Parameter: Age (day) Value: 8
  misc_feature: MA Experiment 108522 PARAMETER Experiment Name: Zm_42deg_Heat_P Parameter: Organism Value: Zea mays
  misc_feature: MA Experiment 108522 PARAMETER Experiment Name: Zm_42deg_Heat_P Parameter: Plant Line Value: 35A19
  misc_feature: MA Experiment 108522 PARAMETER Experiment Name: Zm_42deg_Heat_P Parameter: Temperature (deg C) Value: 42 vs. 22
  misc_feature: MA Experiment 108522 PARAMETER Experiment Name: Zm_42deg_Heat_P Parameter: Timepoint (hr) Value: 1
  misc_feature: MA Experiment 108522 PARAMETER Experiment Name: Zm_42deg_Heat_P Parameter: Tissue Value: Aerial
  misc_feature: MA Experiment ID: 20000478 Result: Up-regulated in Transcription
  misc_feature: MA Experiment 20000478 PARAMETER Experiment Name: Zm_5mM_SA_P Parameter: Age (day) Value: 11
  misc_feature: MA Experiment 20000478 PARAMETER Experiment Name: Zm_5mM_SA_P Parameter: Organism Value: Zea mays
  misc_feature: MA Experiment 20000478 PARAMETER Experiment Name: Zm_5mM_SA_P Parameter: Plant Line Value: 35A19
  misc_feature: MA Experiment 20000478 PARAMETER Experiment Name: Zm_5mM_SA_P Parameter: Timepoint (hr) Value: 72
  misc_feature: MA Experiment 20000478 PARAMETER Experiment Name: Zm_5mM_SA_P Parameter: Tissue Value: Aerial
  misc_feature: MA Experiment 20000478 PARAMETER Experiment Name: Zm_5mM_SA_P Parameter: Treatment Value: 5mM SA vs. No Treatment
  misc_feature: MA Experiment ID: 20000488 Result: Down-regulated in Transcription
  misc_feature: MA Experiment 20000488 PARAMETER Experiment Name: Zm_50mM_NH4NO3_L_to_H_P Parameter: Organism Value: Zea mays
  misc_feature: MA Experiment 20000488 PARAMETER Experiment Name: Zm_50mM_NH4NO3_L_to_H_P Parameter: Timepoint (hr) Value: 8
  misc_feature: MA Experiment 20000488 PARAMETER Experiment Name: Zm_50mM_NH4NO3_L_to_H_P Parameter: Tissue Value: Leaves
  misc_feature: MA Experiment 20000488 PARAMETER Experiment Name: Zm_50mM_NH4NO3_L_to_H_P Parameter: Treatment Value: 50mM NH4NO3 vs. 100mM Mannitol
  misc_feature: MA Experiment ID: 20000627 Result: Up-regulated in Transcription
  misc_feature: MA Experiment 20000627 PARAMETER Experiment Name: Zm_Herbicide-Treatments_P Parameter: Timepoint (hr) Value: 12
  misc_feature: MA Experiment 20000627 PARAMETER Experiment Name: Zm_Herbicide-Treatments_P Parameter: Tissue Value: Aerial
  misc_feature: MA Experiment 20000627 PARAMETER Experiment Name: Zm_Herbicide-Treatments_P Parameter: Treatment Value: Finale vs. No Treatment
aagtcaaggacaaggagcaaagcaaacgctgcaagcgaactcgccgccccacaaagcagtgccagggtctggctgattggctcccaccatggcatcgacctctccgcaccgctcctccggcggggatccaccttcctcgtccacgcccctcatctcctcgccgacctccccggcatccggctcctccggcggcccgctagggcggctcacgagcctccgcggcgcagcgcggttcatccggcgcacggggagccggcgtttgatgagggagccctccgtggcggtgcgggagacggctgccgagcacctagaggagcgtcagaccgactgggcctactctaagcccgtcatcgtggtcgacatgctctggaacgtcgccttcgtcgcaatcgccgcggccgtcgtcgccgcgtcgctgggcgagattcccgccgtgcctctccgcgtctggatcgcgggctacgtgctccagtgcctcctccacatcctctgcgtcacagtcgaatacaggcgtcgacgcagggacgcggaccaggagggagtgggtgttgacttcaagttcaggaggagggagcatctgaagatgacgtaaacaacctttccaaattcaaatttcggacaatgagtgatgcagacaagctagctgccggcattgcagcacctgtgggtggagtgatgacagagtgcggtaccaatcctcctgtcgaacatattctttcggctgaggatgcagagtgctgtatctgcctatgcccgtatgaagatggcgtggaactacgtgagctcccttgcaaccaccattttcactgcagctgtatagacaagtggcttcacataaatgctacatgcccattgtgcaagttcaacatcgtcaagagcaatctccacagagaagaggtctaggtcaataaggaaaaaaaaataatcatggcaacacatttcggcatgtcccatcccagctgtgctcgtcagtattgccacatttgccaactggagttgtgactacctgtcttgtagtcaagtcataaaagtcactggtgatgcgcaggtggttgcaatgtcggttctcgtgaatattccttgtaacagtttgctgcaggggctgtacattctcgttctgctcgatctgattgcattgcgatttatttgtacatgaacacgtggccatgttggatcatgaaagcggtcagtcgtttgtaaaatgattcatgaattggaggctagtatgcaggctgctatctcttgtctcg

SEQ ID NO: 13573 - protein, 167 aa, Zea mays subsp. mays
  peptide (1)..(167): Ceres Seq. ID no. 12411218
  misc_feature (1)..(167): Homolog of NCBI NO: 33146524 NR Description: putative RES protein [Oryza sativa (japonica
  misc_feature (1)..(145): Homolog of NCBI NO: 9502381 NR Description: T12C24.29 [Arabidopsis thaliana] unknown protein [Arabidopsis thaliana]
  misc_feature (1)..(145): Homolog of NCBI NO: 15222059 NR Description: unknown protein; protein id: At1g12760.1
  misc_feature (14)..(153): Homolog of NCBI NO: 18413629 NR Description: putative protein; protein id: At4g11680.1, by cDNA: gi_16323217 [Arabidopsis thaliana]
  misc_feature (14)..(153): Homolog of NCBI NO: 7487667 NR Description: hypothetical protein T5C23.110 - Arabidopsis >gi|4539459|emb|CAB39939.1| putative protein [Arabidopsis >gi|7267868|emb|CAB78211.1| putative protein [Arabidopsis
  misc_feature (59)..(155): Homolog of NCBI NO: 38344371 NR Description: OSJNBb0032E06.5 [Oryza sativa (japonica
  misc_feature (16)..(148): Homolog of NCBI NO: 18407748 NR Description: expressed protein; protein id: At1g63170.1, by cDNA: 21249., supported by cDNA: gi_16604387 [Arabidopsis
  misc_feature (16)..(148): Homolog of NCBI NO: 21554228 NR Description: unknown [Arabidopsis thaliana]
  misc_feature (16)..(148): Homolog of NCBI NO: 16604388 NR Description: At1g63170/F16M19_7 [Arabidopsis thaliana]
  misc_feature (17)..(144): Homolog of NCBI NO: 18411876 NR Description: putative protein; protein id: At3g61180.1, by cDNA: gi_16648920, supported by cDNA: gi_17978714 [Arabidopsis >gi|16648921|gb|AAL24312.1| putative protein [Arabidopsis
MASTSPHRSSGGDPPSSSTPLISSPTSPASGSSGGPLGRLTSLRGAARFIRRTGSRRLMREPSVAVRETAAEHLEERQTDWAYSKPVIVVDMLWNVAFVAIAAAVVAASLGEIPAVPLRVWIAGYVLQCLLHILCVTVEYRRRRRDADQEGVGVDFKFRRREHLKMT

SEQ ID NO: 13574 - protein, 113 aa, Zea mays subsp. mays
  peptide (1)..(113): Ceres Seq. ID no. 12411219
KSRTRSKANAASELAAPQSSARVWLIGSHHGIDLSAPLLRRGSTFLVHAPHLLADLPGIRLLRRPARAAHEPPRRSAVHPAHGEPAFDEGALRGGAGDGCRAPRGASDRLGLL

SEQ ID NO: 13575 - protein, 109 aa, Zea mays subsp. mays
  peptide (1)..(109): Ceres Seq. ID no. 12411220
  misc_feature (1)..(109): Homolog of NCBI NO: 33146524 NR Description: putative RES protein [Oryza sativa (japonica
  misc_feature (1)..(87): Homolog of NCBI NO: 9502381 NR Description: T12C24.29 [Arabidopsis thaliana] unknown protein [Arabidopsis thaliana]
  misc_feature (1)..(87): Homolog of NCBI NO: 15222059 NR Description: unknown protein; protein id: At1g12760.1
  misc_feature (1)..(95): Homolog of NCBI NO: 18413629 NR Description: putative protein; protein id: At4g11680.1, by cDNA: gi_16323217 [Arabidopsis thaliana]
  misc_feature (1)..(95): Homolog of NCBI NO: 7487667 NR Description: hypothetical protein T5C23.110 - Arabidopsis >gi|4539459|emb|CAB39939.1| putative protein [Arabidopsis >gi|7267868|emb|CAB78211.1| putative protein [Arabidopsis
  misc_feature (1)..(97): Homolog of NCBI NO: 38344371 NR Description: OSJNBb0032E06.5 [Oryza sativa (japonica
  misc_feature (1)..(90): Homolog of NCBI NO: 18407748 NR Description: expressed protein; protein id: At1g63170.1, by cDNA: 21249., supported by cDNA: gi_16604387 [Arabidopsis
  misc_feature (1)..(90): Homolog of NCBI NO: 21554228 NR Description: unknown [Arabidopsis thaliana]
  misc_feature (1)..(90): Homolog of NCBI NO: 16604388 NR Description: At1g63170/F16M19_7 [Arabidopsis thaliana]
  misc_feature (1)..(86): Homolog of NCBI NO: 18411876 NR Description: putative protein; protein id: At3g61180.1, by cDNA: gi_16648920, supported by cDNA: gi_17978714 [Arabidopsis >gi|16648921|gb|AAL24312.1| putative protein [Arabidopsis
MREPSVAVRETAAEHLEERQTDWAYSKPVIVVDMLWNVAFVAIAAAVVAASLGEIPAVPLRVWIAGYVLQCLLHILCVTVEYRRRRRDADQEGVGVDFKFRRREHLKMT

SEQ ID NO: 13576 - DNA, 1597 bp, Zea mays subsp. mays
  misc_feature (1)..(1597): Ceres Seq. ID no. 12411213
  misc_feature: MA Experiment ID: 20000535 Result: Down-regulated in Transcription
  misc_feature: MA Experiment 20000535 PARAMETER Experiment Name: Zm_Hybrid_Seed_Dev_P Parameter: DAP Value: 30 vs. 12
  misc_feature: MA Experiment 20000535 PARAMETER Experiment Name: Zm_Hybrid_Seed_Dev_P Parameter: Organism Value: Zea mays
  misc_feature: MA Experiment 20000535 PARAMETER Experiment Name: Zm_Hybrid_Seed_Dev_P Parameter: Plant Line Value: 35A19
  misc_feature: MA Experiment 20000535 PARAMETER Experiment Name: Zm_Hybrid_Seed_Dev_P Parameter: Tissue Value: Embryo vs. Unfert Floret
gtcaccgtccgtcgtcgcagacgagcccagtggcgactggcgattcgctttcgaaccgcagtcgtccctgctgtgttcccggttccctcccttcctcctcctatagttggcttctcgccaccctctgccttcgaccaactttctcccttctcccctccccgttcccctctccaactccaatccatggcctccacggatcgctccgcgccggcggaggaccagcaacagccgcagcgcccgtccctcttctcgccgtaccagatgccccacttccgcctcgcgcaccgggtggtgctggcgccgatgaccaggtgccgggcgcccgatgcgctcccgggccccgcgctcgcggagtactacgcgcagcggtccacggaaggcggcttgctcatctccgagggcaccatcatctcgcccgccagccctgggttccctcgtgtccctgggatatacaatcaagagcagactgatgcatggaaaaaggtggttgatgctgttcatgccaagggagccatctttttctgccaactatggcatgtaggtcgagcttctcaccaagtatatcagccgggtggttctgctccaatatcctctactgataaaccaatatcatcaagatggaggatactgatgcccgatggatcctatggcaagtatccaactccgaggcgcctagccacatccgagataccagaaattgtcgagcaataccgacaggctgccataaacgccatcaaagcaggtttcgatggcatcgagatccacggtgcccatggctacctaatcgaccagttcctcaaggacggtatcaacgacagggctgacgagtacggtggctcactctccaaccgctgccggttcctcctggaggtgacgcgcgccgtggtctccgcgataggggcagaccgggtggcggtccgggtgtccccggccatcgaccacctcgacgcgtacgactccaacccgctgcagctcggcctggccgtagtggaccgcctcaacgctctccaggaggagaccgggcggctggcctacctgcacgtgacgcagccacggtacacggcgtacgggcagacggagtccggccagcacgggagcgccgaggaggagagccggctgatgcgcgccctgcggggcgcctaccgcggcacgttcatgtgcagcggtgggtacacgcgcgagctcggcgtggaggccgtcgagtcgtgggacgccgacctggtgtcctacgggcggctgttcatcgctaacccggacctggtggagcggttccggcgcgacgccccgctgaacagatacgtgcgcaagacgttctacaccccggatcccgtcgttggttacacggactacccgttcctcggccagcctaaggcgcgcatgtgattattagttaggttggtaactataagaggcggactattgttcgtgtattgtggcttgagaaaataagcaaacacatggtggtagtgctgtgcaataagccttaggtgcaaacatgagcctcctgggcctttagataatgatctaattatagatgtaattatagttttgtcaagaagttaatgtttatttgcacagcaatcagcagtcatctctc

SEQ ID NO: 13577 - protein, 460 aa, Zea mays subsp. mays
  peptide (1)..(460): Ceres Seq. ID no. 12411214
  misc_feature (82)..(431): Pfam Name: NADH:flavin oxidoreductase / NADH oxidase family Pfam Description: NADH:flavin oxidoreductase / NADH oxidase family
  misc_feature (71)..(453): Homolog of NCBI NO: 12056507 NR Description: 12-oxophytodienoate reductase 3 [Lycopersicon
  misc_feature (81)..(460): Homolog of NCBI NO: 6707797 NR Description: 12-oxo-phytodienoate reductase [Arabidopsis
  misc_feature (81)..(460): Homolog of NCBI NO: 5059115 NR Description: OPDA-reductase homolog [Arabidopsis thaliana]
  misc_feature (81)..(460): Homolog of NCBI NO: 10242314 NR Description: 12-oxo-phytodienoate reductase [Arabidopsis
  misc_feature (81)..(460): Homolog of NCBI NO: 7688991 NR Description: 12-oxo-phytodienoate reductase [Arabidopsis
  misc_feature (81)..(460): Homolog of NCBI NO: 15225045 NR Description: 12-oxophytodienoate reductase (OPR3)(DDE1); id: At2g06050.1, supported by cDNA: gi_10242313, supported by
  misc_feature (69)..(453): Homolog of NCBI NO: 23495288 NR Description: 12-oxophytodienoic acid reductase [Oryza sativa]
  misc_feature (74)..(453): Homolog of NCBI NO: 40645459 NR Description: LEDI-5c protein [Lithospermum erythrorhizon]
  misc_feature (62)..(453): Homolog of NCBI NO: 7449901 NR Description: probable 12-oxophytodienoate reductase (EC
  misc_feature (73)..(453): Homolog of NCBI NO: 14277800 NR Description: Chain A, Crystal Structure Of 12-Oxophytodienoate
VTVRRRRRAQWRLAIRFRTAVVPAVFPVPSLPPPIVGFSPPSAFDQLSPFSPPRSPLQLQSMASTDRSAPAEDQQQPQRPSLFSPYQMPHFRLAHRVVLAPMTRCRAPDALPGPALAEYYAQRSTEGGLLISEGTIISPASPGFPRVPGIYNQEQTDAWKKVVDAVHAKGAIFFCQLWHVGRASHQVYQPGGSAPISSTDKPISSRWRILMPDGSYGKYPTPRRLATSEIPEIVEQYRQAAINAIKAGFDGIEIHGAHGYLIDQFLKDGINDRADEYGGSLSNRCRFLLEVTRAVVSAIGADRVAVRVSPAIDHLDAYDSNPLQLGLAVVDRLNALQEETGRLAYLHVTQPRYTAYGQTESGQHGSAEEESRLMRALRGAYRGTFMCSGGYTRELGVEAVESWDADLVSYGRLFIANPDLVERFRRDAPLNRYVRKTFYTPDPVVGYTDYPFLGQPKARM

SEQ ID NO: 13578 - protein, 399 aa, Zea mays subsp. mays
  peptide (1)..(399): Ceres Seq. ID no. 12411215
  misc_feature (21)..(370): Pfam Name: NADH:flavin oxidoreductase / NADH oxidase family Pfam Description: NADH:flavin oxidoreductase / NADH oxidase family
  misc_feature (10)..(392): Homolog of NCBI NO: 12056507 NR Description: 12-oxophytodienoate reductase 3 [Lycopersicon
  misc_feature (20)..(399): Homolog of NCBI NO: 6707797 NR Description: 12-oxo-phytodienoate reductase [Arabidopsis
  misc_feature (20)..(399): Homolog of NCBI NO: 5059115 NR Description: OPDA-reductase homolog [Arabidopsis thaliana]
  misc_feature (20)..(399): Homolog of NCBI NO: 10242314 NR Description: 12-oxo-phytodienoate reductase [Arabidopsis
  misc_feature (20)..(399): Homolog of NCBI NO: 7688991 NR Description: 12-oxo-phytodienoate reductase [Arabidopsis
  misc_feature (20)..(399): Homolog of NCBI NO: 15225045 NR Description: 12-oxophytodienoate reductase (OPR3)(DDE1); id: At2g06050.1, supported by cDNA: gi_10242313, supported by
  misc_feature (8)..(392): Homolog of NCBI NO: 23495288 NR Description: 12-oxophytodienoic acid reductase [Oryza sativa]
  misc_feature (13)..(392): Homolog of NCBI NO: 40645459 NR Description: LEDI-5c protein [Lithospermum erythrorhizon]
  misc_feature (1)..(392): Homolog of NCBI NO: 7449901 NR Description: probable 12-oxophytodienoate reductase (EC
  misc_feature (12)..(392): Homolog of NCBI NO: 14277800 NR Description: Chain A, Crystal Structure Of 12-Oxophytodienoate
MASTDRSAPAEDQQQPQRPSLFSPYQMPHFRLAHRVVLAPMTRCRAPDALPGPALAEYYAQRSTEGGLLISEGTIISPASPGFPRVPGIYNQEQTDAWKKVVDAVHAKGAIFFCQLWHVGRASHQVYQPGGSAPISSTDKPISSRWRILMPDGSYGKYPTPRRLATSEIPEIVEQYRQAAINAIKAGFDGIEIHGAHGYLIDQFLKDGINDRADEYGGSLSNRCRFLLEVTRAVVSAIGADRVAVRVSPAIDHLDAYDSNPLQLGLAVVDRLNALQEETGRLAYLHVTQPRYTAYGQTESGQHGSAEEESRLMRALRGAYRGTFMCSGGYTRELGVEAVESWDADLVSYGRLFIANPDLVERFRRDAPLNRYVRKTFYTPDPVVGYTDYPFLGQPKARM

SEQ ID NO: 13579 - protein, 373 aa, Zea mays subsp. mays
  peptide (1)..(373): Ceres Seq. ID no. 12411216
  misc_feature (1)..(344): Pfam Name: NADH:flavin oxidoreductase / NADH oxidase family Pfam Description: NADH:flavin oxidoreductase / NADH oxidase family
  misc_feature (1)..(366): Homolog of NCBI NO: 12056507 NR Description: 12-oxophytodienoate reductase 3 [Lycopersicon
  misc_feature (1)..(373): Homolog of NCBI NO: 6707797 NR Description: 12-oxo-phytodienoate reductase [Arabidopsis
  misc_feature (1)..(373): Homolog of NCBI NO: 5059115 NR Description: OPDA-reductase homolog [Arabidopsis thaliana]
  misc_feature (1)..(373): Homolog of NCBI NO: 10242314 NR Description: 12-oxo-phytodienoate reductase [Arabidopsis
  misc_feature (1)..(373): Homolog of NCBI NO: 7688991 NR Description: 12-oxo-phytodienoate reductase [Arabidopsis
  misc_feature (1)..(373): Homolog of NCBI NO: 15225045 NR Description: 12-oxophytodienoate reductase (OPR3)(DDE1); id: At2g06050.1, supported by cDNA: gi_10242313, supported by
  misc_feature (1)..(366): Homolog of NCBI NO: 23495288 NR Description: 12-oxophytodienoic acid reductase [Oryza sativa]
  misc_feature (1)..(366): Homolog of NCBI NO: 40645459 NR Description: LEDI-5c protein [Lithospermum erythrorhizon]
  misc_feature (1)..(366): Homolog of NCBI NO: 7449901 NR Description: probable 12-oxophytodienoate reductase (EC
  misc_feature (1)..(366): Homolog of NCBI NO: 14277800 NR Description: Chain A, Crystal Structure Of 12-Oxophytodienoate
MPHFRLAHRVVLAPMTRCRAPDALPGPALAEYYAQRSTEGGLLISEGTIISPASPGFPRVPGIYNQEQTDAWKKVVDAVHAKGAIFFCQLWHVGRASHQVYQPGGSAPISSTDKPISSRWRILMPDGSYGKYPTPRRLATSEIPEIVEQYRQAAINAIKAGFDGIEIHGAHGYLIDQFLKDGINDRADEYGGSLSNRCRFLLEVTRAVVSAIGADRVAVRVSPAIDHLDAYDSNPLQLGLAVVDRLNALQEETGRLAYLHVTQPRYTAYGQTESGQHGSAEEESRLMRALRGAYRGTFMCSGGYTRELGVEAVESWDADLVSYGRLFIANPDLVERFRRDAPLNRYVRKTFYTPDPVVGYTDYPFLGQPKARM

SEQ ID NO: 13580 - DNA, 1561 bp, Zea mays subsp. mays
  misc_feature (1)..(1561): Ceres Seq. ID no. 12411207
  misc_feature: MA Experiment ID: 108543 Result: Down-regulated in Transcription
  misc_feature: MA Experiment ID: 108544 Result: Down-regulated in Transcription
aaaattcacgctgagccgccgcctgttccacggttccacctctccaaaccaaaaactcctaggttttctaaacgtgaattccaatcactgcacacgcggtcgtttcggtgtgatttgccaggaagagggggcgaattcgtggtgctaaaagagaccccatctggtgcggttctggggttcgaggagcggcgaggcaggtgggaaatgagggatgtggtcgtggttgacgaagattgcgtccgcgtgcttgggcccggtccggaggtgcgcgcgtacgaggaaggatgaggacgacagcgataatggccgcggcgtcgccgacgacctgctgtggtcgcgggacctcgggcgccacgcggcggggtcagttctcgtttgccgtcgtgcaggccaacgaggcgttggaggaccacagccaagtggagacaggctctgccgcaactttcgtaggcgtctacgacggtcatggcggcgctgaggctgcccgcttcatatctgaccacctcttcgcacacctcattcgacttgctcaggaaaatggaacaatatctgaggatgttgttcggagtgcgttttctgctacggaggaaggcttcttgacactcgtgcggagaacacgttttataaagcctttgattgctgcggttggatcctgctgtctagttggtgtcatatggagaggaacactatatgtggctaatctaggcgattccagggctgttattggcgttctaggtagatcaaacaagatcgtggctgagccactcacaagagatcataatgcaagtagggaggaggtcaggcaggagcttatatcccgtcatccagatgattctcaaattgtggttctcaagcatggtgtttggcgcatcaagggcataattcaggtttcaagaacaattggagatgcttacttgaagaggcgggaatttgctcttgatccatctatcactcgtttccgcctttcggagcctctccgccagcctgttctcacagcagagccatctatctatacaagggtgcttaacccacaagataaatttattatttttgcatctgatggtctttgggagcacttgacaaatcaacaggccgttgaaattgtccacagcaatccacgatcaggaattgcaaagaggctggtaacggcagcgttgaaacaagctgcacggaagagggaaatgaggtatgatgacctcaggaaagttgagaagggaattcgccgcttcttccacgatgacattacagtagttgttgtttacatagatcacggattactgcaagagagggatacttccgtgccagagctctcagtccgtggctttgttgactccgttggcccctcaaatttctcagggataaccgccatatcatgactcactactaatcgagcagcacaattttggtgtacggcattcaagtagcatttgactatctgagtgttatgctttaccaggcttttgcttttagtattgcctttatattgagtactactacaatacttcatgtcgctttgttttcaaaaatactttatgtcaattttgcaagtctgatttgctcc

SEQ ID NO: 13581 - protein, 363 aa, Zea mays subsp. mays
  peptide (1)..(363): Ceres Seq. ID no. 12411208
  misc_feature (27)..(299): Pfam Name: Protein phosphatase 2C Pfam Description: Protein phosphatase 2C
  misc_feature (27)..(363): Homolog of NCBI NO: 38346816 NR Description: OSJNBa0088A01.23 [Oryza sativa (japonica
  misc_feature (27)..(357): Homolog of NCBI NO: 18415301 NR Description: protein phosphatase 2C-like; protein id: supported by cDNA: 115504. [Arabidopsis thaliana] putative protein phosphatase 2C [Arabidopsis thaliana]
  misc_feature (27)..(357): Homolog of NCBI NO: 21536936 NR Description: protein phosphatase 2C-like [Arabidopsis thaliana]
  misc_feature (27)..(357): Homolog of NCBI NO: 9759303 NR Description: protein phosphatase 2C-like [Arabidopsis thaliana]
  misc_feature (27)..(346): Homolog of NCBI NO: 15239244 NR Description: protein phosphatase 2C-like protein; protein id:
  misc_feature (21)..(346): Homolog of NCBI NO: 20340237 NR Description: protein phosphatase 2c-like protein
  misc_feature (21)..(354): Homolog of NCBI NO: 9294356 NR Description: protein phosphatase 2C [Arabidopsis thaliana]
  misc_feature (21)..(354): Homolog of NCBI NO: 15230540 NR Description: protein phosphatase 2C, putative; protein id: [Arabidopsis thaliana] >gi|12321955|gb|AAG51012.1|AC069474_11
  misc_feature (21)..(346): Homolog of NCBI NO: 13357263 NR Description: putative protein phosphatase 2C [Oryza sativa
  misc_feature (21)..(346): Homolog of NCBI NO: 37536574 NR Description: putative protein phosphatase 2C [Oryza sativa
MRTTAIMAAASPTTCCGRGTSGATRRGQFSFAVVQANEALEDHSQVETGSAATFVGVYDGHGGAEAARFISDHLFAHLIRLAQENGTISEDVVRSAFSATEEGFLTLVRRTRFIKPLIAAVGSCCLVGVIWRGTLYVANLGDSRAVIGVLGRSNKIVAEPLTRDHNASREEVRQELISRHPDDSQIVVLKHGVWRIKGIIQVSRTIGDAYLKRREFALDPSITRFRLSEPLRQPVLTAEPSIYTRVLNPQDKFIIFASDGLWEHLTNQQAVEIVHSNPRSGIAKRLVTAALKQAARKREMRYDDLRKVEKGIRRFFHDDITVVVVYIDHGLLQERDTSVPELSVRGFVDSVGPSNFSGITAIS

SEQ ID NO: 13582 - protein, 357 aa, Zea mays subsp. mays
  peptide (1)..(357): Ceres Seq. ID no. 12411209
  misc_feature (21)..(293): Pfam Name: Protein phosphatase 2C Pfam Description: Protein phosphatase 2C
  misc_feature (21)..(357): Homolog of NCBI NO: 38346816 NR Description: OSJNBa0088A01.23 [Oryza sativa (japonica
  misc_feature (21)..(351): Homolog of NCBI NO: 18415301 NR Description: protein phosphatase 2C-like; protein id: supported by cDNA: 115504. [Arabidopsis thaliana] putative protein phosphatase 2C [Arabidopsis thaliana]
  misc_feature (21)..(351): Homolog of NCBI NO: 21536936 NR Description: protein phosphatase 2C-like [Arabidopsis thaliana]
  misc_feature (21)..(351): Homolog of NCBI NO: 9759303 NR Description: protein phosphatase 2C-like [Arabidopsis thaliana]
  misc_feature (21)..(340): Homolog of NCBI NO: 15239244 NR Description: protein phosphatase 2C-like protein; protein id:
  misc_feature (15)..(340): Homolog of NCBI NO: 20340237 NR Description: protein phosphatase 2c-like protein
  misc_feature (15)..(348): Homolog of NCBI NO: 9294356 NR Description: protein phosphatase 2C [Arabidopsis thaliana]
  misc_feature (15)..(348): Homolog of NCBI NO: 15230540 NR Description: protein phosphatase 2C, putative; protein id: [Arabidopsis thaliana] >gi|12321955|gb|AAG51012.1|AC069474_11
  misc_feature (15)..(340): Homolog of NCBI NO: 13357263 NR Description: putative protein phosphatase 2C [Oryza sativa
  misc_feature (15)..(340): Homolog of NCBI NO: 37536574 NR Description: putative protein phosphatase 2C [Oryza sativa
MAAASPTTCCGRGTSGATRRGQFSFAVVQANEALEDHSQVETGSAATFVGVYDGHGGAEAARFISDHLFAHLIRLAQENGTISEDVVRSAFSATEEGFLTLVRRTRFIKPLIAAVGSCCLVGVIWRGTLYVANLGDSRAVIGVLGRSNKIVAEPLTRDHNASREEVRQELISRHPDDSQIVVLKHGVWRIKGIIQVSRTIGDAYLKRREFALDPSITRFRLSEPLRQPVLTAEPSIYTRVLNPQDKFIIFASDGLWEHLTNQQAVEIVHSNPRSGIAKRLVTAALKQAARKREMRYDDLRKVEKGIRRFFHDDITVVVVYIDHGLLQERDTSVPELSVRGFVDSVGPSNFSGITAIS

SEQ ID NO: 13583 - DNA, 980 bp, Zea mays subsp. mays
  misc_feature (1)..(980): Ceres Seq. ID no. 13637386
  misc_feature: MA Experiment ID: 108527 Result: Down-regulated in Transcription
  misc_feature: MA Experiment 108527 PARAMETER Experiment Name: Zm_5mM_NO_P Parameter: Age (day) Value: 8
  misc_feature: MA Experiment 108527 PARAMETER Experiment Name: Zm_5mM_NO_P Parameter: Organism Value: Zea mays
  misc_feature: MA Experiment 108527 PARAMETER Experiment Name: Zm_5mM_NO_P Parameter: Plant Line Value: 35A19
  misc_feature: MA Experiment 108527 PARAMETER Experiment Name: Zm_5mM_NO_P Parameter: Timepoint (hr) Value: 6
  misc_feature: MA Experiment 108527 PARAMETER Experiment Name: Zm_5mM_NO_P Parameter: Tissue Value: Aerial
  misc_feature: MA Experiment 108527 PARAMETER Experiment Name: Zm_5mM_NO_P Parameter: Treatment Value: 5mM NO vs. No Treatment
  misc_feature: MA Experiment ID: 108530 Result: Down-regulated in Transcription
  misc_feature: MA Experiment 108530 PARAMETER Experiment Name: Zm_Imbibed_Seeds_P Parameter: Age (day) Value: 6 vs. 2
  misc_feature: MA Experiment 108530 PARAMETER Experiment Name: Zm_Imbibed_Seeds_P Parameter: Organism Value: Zea mays
  misc_feature: MA Experiment 108530 PARAMETER Experiment Name: Zm_Imbibed_Seeds_P Parameter: Plant Line Value: 35A19
  misc_feature: MA Experiment 108530 PARAMETER Experiment Name: Zm_Imbibed_Seeds_P Parameter: Tissue Value: Aerial vs. Embryo
  misc_feature: MA Experiment ID: 108535 Result: Up-regulated in Transcription
  misc_feature: MA Experiment 108535 PARAMETER Experiment Name: Zm_Meristem_P Parameter: Age (day) Value: 8
  misc_feature: MA Experiment 108535 PARAMETER Experiment Name: Zm_Meristem_P Parameter: Organism Value: Zea mays
  misc_feature: MA Experiment 108535 PARAMETER Experiment Name: Zm_Meristem_P Parameter: Plant Line Value: 35A19
  misc_feature: MA Experiment 108535 PARAMETER Experiment Name: Zm_Meristem_P Parameter: Tissue Value: Root Meristem vs. Above Root Meristem
  misc_feature: MA Experiment ID: 108544 Result: Down-regulated in Transcription
  misc_feature: MA Experiment ID: 20000108 Result: Up-regulated in Transcription
  misc_feature: MA Experiment 20000108 PARAMETER Experiment Name: Zm_Root-Tips_P Parameter: Age (day) Value: 12
  misc_feature: MA Experiment 20000108 PARAMETER Experiment Name: Zm_Root-Tips_P Parameter: Organism Value: Zea mays
  misc_feature: MA Experiment 20000108 PARAMETER Experiment Name: Zm_Root-Tips_P Parameter: Tissue Value: Root tips vs. Root mid region    35
  misc_feature: MA Experiment 20000108 PARAMETER Experiment Name: Zm_Root-Tips_P Parameter: Tissue Value: Root tips vs. Root mid region   Sequence Listing-Misc Features (4)
  misc_feature: MA Experiment ID: 20000487 Result: Up-regulated in Transcription
  misc_feature: MA Experiment 20000487 PARAMETER Experiment Name: Zm_50mM_NH4NO3_L_to_H_P Parameter: Organism Value: Zea mays
  misc_feature: MA Experiment 20000487 PARAMETER Experiment Name: Zm_50mM_NH4NO3_L_to_H_P Parameter: Timepoint (hr) Value: 4
  misc_feature: MA Experiment 20000487 PARAMETER Experiment Name: Zm_50mM_NH4NO3_L_to_H_P Parameter: Tissue Value: Leaves
  misc_feature: MA Experiment 20000487 PARAMETER Experiment Name: Zm_50mM_NH4NO3_L_to_H_P Parameter: Treatment Value: 50mM NH4NO3 vs. 100mM Mannitol
  misc_feature: MA Experiment ID: 20000488 Result: Up-regulated in Transcription
  misc_feature: MA Experiment 20000488 PARAMETER Experiment Name: Zm_50mM_NH4NO3_L_to_H_P Parameter: Organism Value: Zea mays
  misc_feature: MA Experiment 20000488 PARAMETER Experiment Name: Zm_50mM_NH4NO3_L_to_H_P Parameter: Timepoint (hr) Value: 8
  misc_feature: MA Experiment 20000488 PARAMETER Experiment Name: Zm_50mM_NH4NO3_L_to_H_P Parameter: Tissue Value: Leaves
  misc_feature: MA Experiment 20000488 PARAMETER Experiment Name: Zm_50mM_NH4NO3_L_to_H_P Parameter: Treatment Value: 50mM NH4NO3 vs. 100mM Mannitol
  misc_feature: MA Experiment ID: 20000492 Result: Up-regulated in Transcription
  misc_feature: MA Experiment 20000492 PARAMETER Experiment Name: Zm_Hybrid_Seed_Dev_P Parameter: DAP Value: 12
  misc_feature: MA Experiment 20000492 PARAMETER Experiment Name: Zm_Hybrid_Seed_Dev_P Parameter: Organism Value: Zea mays
  misc_feature: MA Experiment 20000492 PARAMETER Experiment Name: Zm_Hybrid_Seed_Dev_P Parameter: Plant Line Value: 35A19
  misc_feature: MA Experiment 20000492 PARAMETER Experiment Name: Zm_Hybrid_Seed_Dev_P Parameter: Tissue Value: Fert Kernel vs. Unfert Floret
  misc_feature: MA Experiment ID: 20000534 Result: Down-regulated in Transcription
  misc_feature: MA Experiment 20000534 PARAMETER Experiment Name: Zm_Hybrid_Pollen_P Parameter: Age (day) Value: 8
  misc_feature: MA Experiment 20000534 PARAMETER Experiment Name: Zm_Hybrid_Pollen_P Parameter: Organism Value: Zea mays
  misc_feature: MA Experiment 20000534 PARAMETER Experiment Name: Zm_Hybrid_Pollen_P Parameter: Plant Line Value: 35A19
  misc_feature: MA Experiment 20000534 PARAMETER Experiment Name: Zm_Hybrid_Pollen_P Parameter: Tissue Value: Pollen vs. Aerial
  misc_feature: MA Experiment ID: 20000535 Result: Up-regulated in Transcription
  misc_feature: MA Experiment 20000535 PARAMETER Experiment Name: Zm_Hybrid_Seed_Dev_P Parameter: DAP Value: 30 vs. 12
  misc_feature: MA Experiment 20000535 PARAMETER Experiment Name: Zm_Hybrid_Seed_Dev_P Parameter: Organism Value: Zea mays
  misc_feature: MA Experiment 20000535 PARAMETER Experiment Name: Zm_Hybrid_Seed_Dev_P Parameter: Plant Line Value: 35A19
  misc_feature: MA Experiment 20000535 PARAMETER Experiment Name: Zm_Hybrid_Seed_Dev_P Parameter: Tissue Value: Embryo vs. Unfert Floret
  misc_feature: MA Experiment ID: 20000632 Result: Down-regulated in Transcription
  misc_feature: MA Experiment 20000632 PARAMETER Experiment Name: Zm_Herbicide-Treatments_P Parameter: Timepoint (hr) Value: 4
  misc_feature: MA Experiment 20000632 PARAMETER Experiment Name: Zm_Herbicide-Treatments_P Parameter: Tissue Value: Aerial
  misc_feature: MA Experiment 20000632 PARAMETER Experiment Name: Zm_Herbicide-Treatments_P Parameter: Treatment Value: Glean vs. No Treatment
  misc_feature: MA Experiment ID: 20000633 Result: Down-regulated in Transcription
  misc_feature: MA Experiment 20000633 PARAMETER Experiment Name: Zm_Herbicide-Treatments_P Parameter: Timepoint (hr) Value: 4
  misc_feature: MA Experiment 20000633 PARAMETER Experiment Name: Zm_Herbicide-Treatments_P Parameter: Tissue Value: Aerial
  misc_feature: MA Experiment 20000633 PARAMETER Experiment Name: Zm_Herbicide-Treatments_P Parameter: Treatment Value: Trimec vs. No Treatment
ctctccgtcgcatttcccgtccggtctttccgttacccggcggcttaaaccctagttcccattccatcttcgtttccgctccgccgccgtcgatggagttctggggtctcgaggtcaaacctggatccactgtcaagtgtgagcctggacatggctttatcctgcacgtttcccaggctgcccttggggaatcaaagaaaagtgacagtgccttaatgtatgtcaaagttgatgacaagaagcttgccattggaacgctctctatcgacaaatacccacagatacaattcgatttggttttcaataaagagtttgagctgtcacacacatcgaaaactaccagtgtatttttctctggttacaaggttgagcagccaattgagggagatgaaatggatcttgattctgaggatgaagaggaggagctaaacattccagtaatcaaggaaaatggcaaaggtgatgggaaggaggagcagaaaaatcaagagaaggcagtagctgctacagcttcaaaatcaagtcttggccttgaaaagaaaagcaaggatgactctgatgattctgatgaggatgagtctgatgattctgatgaggatgattctgatgattctgatgagggcgagggattatctcctgacgaaggcgatgatgattcaagtgatgaggatgataccagtgatgatgacgaggaagaaaccccaactcctaaaaagccagaggcaggcaagaagagaggtgctgaaaatgctctgaaaacgcctctttntgataagaaagcaaaggttgccacaccgccagcccagaaaacaggtggcaagaagggtgccacccatgtggcaactccacacccagcaaaaggcaagacccctgcaaacaatgacaaatcaacggagaagtctccaaaatntggtgggtcagtcccttgcaaatcatgcaacaagacattcaatagtgagatggctntgcaggctcagctc

SEQ ID NO: 13584 - protein, 326 aa, Zea mays subsp. mays
  peptide (1)..(326): Ceres Seq. ID no. 13637387
  misc_feature (54)..(230): Pfam Name: Nucleoplasmin Pfam Description: Nucleoplasmin
  misc_feature (31)..(324): Homolog of NCBI NO: 7716948 NR Description: histone deacetylase 2 isoform b [Zea mays]
  misc_feature (31)..(324): Homolog of NCBI NO: 7489751 NR Description: histone deacetylase (EC 3.5.1.-) HD2-p39,
  misc_feature (31)..(324): Homolog of NCBI NO: 7716950 NR Description: histone deacetylase 2 isoform c [Zea mays]
  misc_feature (31)..(324): Homolog of NCBI NO: 7804960 NR Description: putative histone deacetylase HD2 [Oryza sativa]
  misc_feature (256)..(256): Xaa is any aa, unknown or other
  misc_feature (303)..(303): Xaa is any aa, unknown or other
  misc_feature (322)..(322): Xaa is any aa, unknown or other
LRRISRPVFPLPGGLNPSSHSIFVSAPPPSMEFWGLEVKPGSTVKCEPGHGFILHVSQAALGESKKSDSALMYVKVDDKKLAIGTLSIDKYPQIQFDLVFNKEFELSHTSKTTSVFFSGYKVEQPIEGDEMDLDSEDEEEELNIPVIKENGKGDGKEEQKNQEKAVAATASKSSLGLEKKSKDDSDDSDEDESDDSDEDDSDDSDEGEGLSPDEGDDDSSDEDDTSDDDEEETPTPKKPEAGKKRGAENALKTPLXDKKAKVATPPAQKTGGKKGATHVATPHPAKGKTPANNDKSTEKSPKXGGSVPCKSCNKTFNSEMAXQAQL

SEQ ID NO: 13585 - protein, 296 aa, Zea mays subsp. mays
  peptide (1)..(296): Ceres Seq. ID no. 13637388
  misc_feature (24)..(200): Pfam Name: Nucleoplasmin Pfam Description: Nucleoplasmin
  misc_feature (1)..(294): Homolog of NCBI NO: 7716948 NR Description: histone deacetylase 2 isoform b [Zea mays]
  misc_feature (1)..(294): Homolog of NCBI NO: 7489751 NR Description: histone deacetylase (EC 3.5.1.-) HD2-p39,
  misc_feature (1)..(294): Homolog of NCBI NO: 7716950 NR Description: histone deacetylase 2 isoform c [Zea mays]
  misc_feature (1)..(294): Homolog of NCBI NO: 7804960 NR Description: putative histone deacetylase HD2 [Oryza sativa]
  misc_feature (226)..(226): Xaa is any aa, unknown or other
  misc_feature (273)..(273): Xaa is any aa, unknown or other
  misc_feature (292)..(292): Xaa is any aa, unknown or other
MEFWGLEVKPGSTVKCEPGHGFILHVSQAALGESKKSDSALMYVKVDDKKLAIGTLSIDKYPQIQFDLVFNKEFELSHTSKTTSVFFSGYKVEQPIEGDEMDLDSEDEEEELNIPVIKENGKGDGKEEQKNQEKAVAATASKSSLGLEKKSKDDSDDSDEDESDDSDEDDSDDSDEGEGLSPDEGDDDSSDEDDTSDDDEEETPTPKKPEAGKKRGAENALKTPLXDKKAKVATPPAQKTGGKKGATHVATPHPAKGKTPANNDKSTEKSPKXGGSVPCKSCNKTFNSEMAXQAQL

SEQ ID NO: 13586 - protein, 255 aa, Zea mays subsp. mays
  peptide (1)..(255): Ceres Seq. ID no. 13637389
  misc_feature (1)..(159): Pfam Name: Nucleoplasmin Pfam Description: Nucleoplasmin
  misc_feature (1)..(253): Homolog of NCBI NO: 7716948 NR Description: histone deacetylase 2 isoform b [Zea mays]
  misc_feature (1)..(253): Homolog of NCBI NO: 7489751 NR Description: histone deacetylase (EC 3.5.1.-) HD2-p39,
  misc_feature (1)..(253): Homolog of NCBI NO: 7716950 NR Description: histone deacetylase 2 isoform c [Zea mays]
  misc_feature (1)..(253): Homolog of NCBI NO: 7804960 NR Description: putative histone deacetylase HD2 [Oryza sativa]
  misc_feature (185)..(185): Xaa is any aa, unknown or other
  misc_feature (232)..(232): Xaa is any aa, unknown or other
  misc_feature (251)..(251): Xaa is any aa, unknown or other
MYVKVDDKKLAIGTLSIDKYPQIQFDLVFNKEFELSHTSKTTSVFFSGYKVEQPIEGDEMDLDSEDEEEELNIPVIKENGKGDGKEEQKNQEKAVAATASKSSLGLEKKSKDDSDDSDEDESDDSDEDDSDDSDEGEGLSPDEGDDDSSDEDDTSDDDEEETPTPKKPEAGKKRGAENALKTPLXDKKAKVATPPAQKTGGKKGATHVATPHPAKGKTPANNDKSTEKSPKXGGSVPCKSCNKTFNSEMAXQAQL

SEQ ID NO: 13587 - DNA, 1681 bp, Zea mays subsp. mays
  misc_feature (1)..(1681): Ceres Seq. ID no. 12411203
  misc_feature: MA Experiment ID: 108527 Result: Up-regulated in Transcription
  misc_feature: MA Experiment 108527 PARAMETER Experiment Name: Zm_5mM_NO_P Parameter: Age (day) Value: 8
  misc_feature: MA Experiment 108527 PARAMETER Experiment Name: Zm_5mM_NO_P Parameter: Organism Value: Zea mays
  misc_feature: MA Experiment 108527 PARAMETER Experiment Name: Zm_5mM_NO_P Parameter: Plant Line Value: 35A19
  misc_feature: MA Experiment 108527 PARAMETER Experiment Name: Zm_5mM_NO_P Parameter: Timepoint (hr) Value: 6
  misc_feature: MA Experiment 108527 PARAMETER Experiment Name: Zm_5mM_NO_P Parameter: Tissue Value: Aerial
  misc_feature: MA Experiment 108527 PARAMETER Experiment Name: Zm_5mM_NO_P Parameter: Treatment Value: 5mM NO vs. No Treatment
  misc_feature: MA Experiment ID: 108543 Result: Up-regulated in Transcription
  misc_feature: MA Experiment ID: 108559 Result: Up-regulated in Transcription
  misc_feature: MA Experiment 108559 PARAMETER Experiment Name: Zm_5mM_NO_P Parameter: Age (day) Value: 8
  misc_feature: MA Experiment 108559 PARAMETER Experiment Name: Zm_5mM_NO_P Parameter: Organism Value: Zea mays
  misc_feature: MA Experiment 108559 PARAMETER Experiment Name: Zm_5mM_NO_P Parameter: Plant Line Value: 35A19
  misc_feature: MA Experiment 108559 PARAMETER Experiment Name: Zm_5mM_NO_P Parameter: Timepoint (hr) Value: 12
  misc_feature: MA Experiment 108559 PARAMETER Experiment Name: Zm_5mM_NO_P Parameter: Tissue Value: Aerial
  misc_feature: MA Experiment 108559 PARAMETER Experiment Name: Zm_5mM_NO_P Parameter: Treatment Value: 5mM NO vs. No Treatment
aaattccagtccgatttggacattgtcttcgtctccttcatcccctgcccacctgttctgctctgccgccgccgccgctgccgctcccgctgccgcaggaaccctagaccacgctgagcaacccccggcctacacggcgtagctttgcaggaaatggaatacggcgccgtcctcgccgccgcgccgctcgtcgcacggccgaactggctcctcctctcgccgccgccactggcgccgtctattcagattcagaatcgtctttattcgatctcgtcattcccactaaaggctggacctgtaagggcatgcagagctttagcaagcaactacacgcaaacatctgaaacagttgatttggactgggagaacctgggttttgggattgtgcaaactgattatatgtatattgctaagtgcgggacagacgggaatttttctgagggtgaaatggtgccttttggacctatagcgctgagtccatcttctggagtcctaaattatggacagggattgtttgagggcctaaaggcgtataagaaaactgatggatccatcctattatttcgcccagaggaaaatgctgagaggatgcggacaggtgctgagaggatgtgcatgcctgcaccctctgtcgagcagtttattgatgcagtaaaacaaaccgttcttgcaaataagagatggattcctcctactggtaaaggttctctttatattaggcccttacttatgggaagtggggctgttcttggtcttgcacctgctcctgagtatacattcattatatttgtctctcctgttggaaactactttaaggaaggtttagcaccaataaatttgatagttgaagacaagttccatcgtgctactcctggtggtactgggggtgtgaagaccataggaaattatgcttcggtgttgatggcacagaaaattgcaaaggaaaagggttattctgatgtcctctacttggacgctgttcacaagaagtaccttgaagaagtttcttcatgcaatgtttttgttgtcaaggacaatgttatttctaccccagcaataaaaggaacaatattacctggtatcacaaggaaaagtataattgacgttgctttgagtaaaggcttccaggttgaggagcggcttgtttcagtggatgaactgcttgatgctgatgaggtattctgcacaggaactgctgttgtggtgtctcctgttgggagcattacatatcaagggaaaagagtggaatacggccaccaaggtgttggcgttgtgtcccagcagctgtacacttcactgacgagtcttcagatgggtcaaaccgaggattggatgggctggactgtgcaacctgaattagttggccgtggttcgtggatcattcccaacagatgatgggttcgcaagatccaaatctggaggatcacaaccatgtgtacctcttcggttacagttttgtagtgtcttatgcgatggcgtcctgcctgtatatttcttagacggtatttaaaccataaaacagtattcgtctgtacgactgtacccttcagttctgtagcatctgccggagacgagtactagttttgttattttctttcttttacaaaccaagaacagttctatagttttattgtagacactggaccatcatatgatctcaatgggtagctttttccttttt

SEQ ID NO: 13588 - protein, 413 aa, Zea mays subsp. mays
  peptide (1)..(413): Ceres Seq. ID no. 12411204
  misc_feature (96)..(383): Pfam Name: Aminotransferase class IV Pfam Description: Aminotransferase class IV
  misc_feature (141)..(399): Homolog of NCBI NO: 37536656 NR Description: putative aminotransferase [Oryza sativa (japonica group)] >gi|13876531|gb|AAK43507.1| putative aminotransferase
  misc_feature (1)..(112): Homolog of NCBI NO: 37536656 NR Description: putative aminotransferase [Oryza sativa (japonica group)] >gi|13876531|gb|AAK43507.1| putative aminotransferase
  misc_feature (4)..(399): Homolog of NCBI NO: 34902362 NR Description: Putative aminotransferase [Oryza sativa (japonica group)] >gi|24418036|gb|AAN60486.1| Putative aminotransferase
  misc_feature (21)..(398): Homolog of NCBI NO: 18408919 NR Description: branched-chain-amino-acid transaminase -like protein id: At3g49680.1, supported by cDNA: 37100., supported by gi_17933291, supported by cDNA: gi_20453388 [Arabidopsis
  misc_feature (21)..(398): Homolog of NCBI NO: 21593211 NR Description: branched-chain-amino-acid transaminase-like
  misc_feature (50)..(399): Homolog of NCBI NO: 26391655 NR Description: Branched-chain amino acid aminotransferase 5,
  misc_feature (63)..(399): Homolog of NCBI NO: 6319167 NR Description: branched-chain amino acid aminotransferase
  misc_feature (21)..(398): Homolog of NCBI NO: 11280250 NR Description: branched-chain-amino-acid transaminase-like
  misc_feature (50)..(399): Homolog of NCBI NO: 15239157 NR Description: branched-chain amino acid aminotransferase;
  misc_feature (55)..(398): Homolog of NCBI NO: 6319165 NR Description: branched-chain amino acid aminotransferase
MEYGAVLAAAPLVARPNWLLLSPPPLAPSIQIQNRLYSISSFPLKAGPVRACRALASNYTQTSETVDLDWENLGFGIVQTDYMYIAKCGTDGNFSEGEMVPFGPIALSPSSGVLNYGQGLFEGLKAYKKTDGSILLFRPEENAERMRTGAERMCMPAPSVEQFIDAVKQTVLANKRWIPPTGKGSLYIRPLLMGSGAVLGLAPAPEYTFIIFVSPVGNYFKEGLAPINLIVEDKFHRATPGGTGGVKTIGNYASVLMAQKIAKEKGYSDVLYLDAVHKKYLEEVSSCNVFVVKDNVISTPAIKGTILPGITRKSIIDVALSKGFQVEERLVSVDELLDADEVFCTGTAVVVSPVGSITYQGKRVEYGHQGVGVVSQQLYTSLTSLQMGQTEDWMGWTVQPELVGRGSWIIPNR

SEQ ID NO: 13589 - protein, 331 aa, Zea mays subsp. mays
  peptide (1)..(331): Ceres Seq. ID no. 12411205
  misc_feature (14)..(301): Pfam Name: Aminotransferase class IV Pfam Description: Aminotransferase class IV
  misc_feature (59)..(317): Homolog of NCBI NO: 37536656 NR Description: putative aminotransferase [Oryza sativa (japonica group)] >gi|13876531|gb|AAK43507.1| putative aminotransferase
  misc_feature (1)..(30): Homolog of NCBI NO: 37536656 NR Description: putative aminotransferase [Oryza sativa (japonica group)] >gi|13876531|gb|AAK43507.1| putative aminotransferase
  misc_feature (1)..(317): Homolog of NCBI NO: 34902362 NR Description: Putative aminotransferase [Oryza sativa (japonica group)] >gi|24418036|gb|AAN60486.1| Putative aminotransferase
  misc_feature (1)..(316): Homolog of NCBI NO: 18408919 NR Description: branched-chain-amino-acid transaminase -like protein id: At3g49680.1, supported by cDNA: 37100., supported by gi_17933291, supported by cDNA: gi_20453388 [Arabidopsis
  misc_feature (1)..(316): Homolog of NCBI NO: 21593211 NR Description: branched-chain-amino-acid transaminase-like
  misc_feature (1)..(317): Homolog of NCBI NO: 26391655 NR Description: Branched-chain amino acid aminotransferase 5,
  misc_feature (1)..(317): Homolog of NCBI NO: 6319167 NR Description: branched-chain amino acid aminotransferase
  misc_feature (1)..(316): Homolog of NCBI NO: 11280250 NR Description: branched-chain-amino-acid transaminase-like
  misc_feature (1)..(317): Homolog of NCBI NO: 15239157 NR Description: branched-chain amino acid aminotransferase;
  misc_feature (1)..(316): Homolog of NCBI NO: 6319165 NR Description: branched-chain amino acid aminotransferase
MYIAKCGTDGNFSEGEMVPFGPIALSPSSGVLNYGQGLFEGLKAYKKTDGSILLFRPEENAERMRTGAERMCMPAPSVEQFIDAVKQTVLANKRWIPPTGKGSLYIRPLLMGSGAVLGLAPAPEYTFIIFVSPVGNYFKEGLAPINLIVEDKFHRATPGGTGGVKTIGNYASVLMAQKIAKEKGYSDVLYLDAVHKKYLEEVSSCNVFVVKDNVISTPAIKGTILPGITRKSIIDVALSKGFQVEERLVSVDELLDADEVFCTGTAVVVSPVGSITYQGKRVEYGHQGVGVVSQQLYTSLTSLQMGQTEDWMGWTVQPELVGRGSWIIPNR

SEQ ID NO: 13590 - protein, 315 aa, Zea mays subsp. mays
  peptide (1)..(315): Ceres Seq. ID no. 12411206
  misc_feature (1)..(285): Pfam Name: Aminotransferase class IV Pfam Description: Aminotransferase class IV
  misc_feature (43)..(301): Homolog of NCBI NO: 37536656 NR Description: putative aminotransferase [Oryza sativa (japonica group)] >gi|13876531|gb|AAK43507.1| putative aminotransferase
  misc_feature (1)..(14): Homolog of NCBI NO: 37536656 NR Description: putative aminotransferase [Oryza sativa (japonica group)] >gi|13876531|gb|AAK43507.1| putative aminotransferase
  misc_feature (1)..(301): Homolog of NCBI NO: 34902362 NR Description: Putative aminotransferase [Oryza sativa (japonica group)] >gi|24418036|gb|AAN60486.1| Putative aminotransferase
  misc_feature (1)..(300): Homolog of NCBI NO: 18408919 NR Description: branched-chain-amino-acid transaminase -like protein id: At3g49680.1, supported by cDNA: 37100., supported by gi_17933291, supported by cDNA: gi_20453388 [Arabidopsis
  misc_feature (1)..(300): Homolog of NCBI NO: 21593211 NR Description: branched-chain-amino-acid transaminase-like
  misc_feature (1)..(301): Homolog of NCBI NO: 26391655 NR Description: Branched-chain amino acid aminotransferase 5,
  misc_feature (1)..(301): Homolog of NCBI NO: 6319167 NR Description: branched-chain amino acid aminotransferase
  misc_feature (1)..(300): Homolog of NCBI NO: 11280250 NR Description: branched-chain-amino-acid transaminase-like
  misc_feature (1)..(301): Homolog of NCBI NO: 15239157 NR Description: branched-chain amino acid aminotransferase;
  misc_feature (1)..(300): Homolog of NCBI NO: 6319165 NR Description: branched-chain amino acid aminotransferase
MVPFGPIALSPSSGVLNYGQGLFEGLKAYKKTDGSILLFRPEENAERMRTGAERMCMPAPSVEQFIDAVKQTVLANKRWIPPTGKGSLYIRPLLMGSGAVLGLAPAPEYTFIIFVSPVGNYFKEGLAPINLIVEDKFHRATPGGTGGVKTIGNYASVLMAQKIAKEKGYSDVLYLDAVHKKYLEEVSSCNVFVVKDNVISTPAIKGTILPGITRKSIIDVALSKGFQVEERLVSVDELLDADEVFCTGTAVVVSPVGSITYQGKRVEYGHQGVGVVSQQLYTSLTSLQMGQTEDWMGWTVQPELVGRGSWIIPNR

SEQ ID NO: 13591 - DNA, 1397 bp, Zea mays subsp. mays
  misc_feature (1)..(1397): Ceres Seq. ID no. 12342474
  misc_feature: MA Experiment ID: 108527 Result: Down-regulated in Transcription
  misc_feature: MA Experiment 108527 PARAMETER Experiment Name: Zm_5mM_NO_P Parameter: Age (day) Value: 8
  misc_feature: MA Experiment 108527 PARAMETER Experiment Name: Zm_5mM_NO_P Parameter: Organism Value: Zea mays
  misc_feature: MA Experiment 108527 PARAMETER Experiment Name: Zm_5mM_NO_P Parameter: Plant Line Value: 35A19
  misc_feature: MA Experiment 108527 PARAMETER Experiment Name: Zm_5mM_NO_P Parameter: Timepoint (hr) Value: 6
  misc_feature: MA Experiment 108527 PARAMETER Experiment Name: Zm_5mM_NO_P Parameter: Tissue Value: Aerial
  misc_feature: MA Experiment 108527 PARAMETER Experiment Name: Zm_5mM_NO_P Parameter: Treatment Value: 5mM NO vs. No Treatment
  misc_feature: MA Experiment ID: 108528 Result: Up-regulated in Transcription
  misc_feature: MA Experiment 108528 PARAMETER Experiment Name: Zm_Imbibed_Seeds_P Parameter: Age (day) Value: 5 vs. 2
  misc_feature: MA Experiment 108528 PARAMETER Experiment Name: Zm_Imbibed_Seeds_P Parameter: Organism Value: Zea mays
  misc_feature: MA Experiment 108528 PARAMETER Experiment Name: Zm_Imbibed_Seeds_P Parameter: Plant Line Value: 35A19
  misc_feature: MA Experiment 108528 PARAMETER Experiment Name: Zm_Imbibed_Seeds_P Parameter: Tissue Value: Aerial vs. Embryo
  misc_feature: MA Experiment ID: 108530 Result: Up-regulated in Transcription
  misc_feature: MA Experiment 108530 PARAMETER Experiment Name: Zm_Imbibed_Seeds_P Parameter: Age (day) Value: 6 vs. 2
  misc_feature: MA Experiment 108530 PARAMETER Experiment Name: Zm_Imbibed_Seeds_P Parameter: Organism Value: Zea mays
  misc_feature: MA Experiment 108530 PARAMETER Experiment Name: Zm_Imbibed_Seeds_P Parameter: Plant Line Value: 35A19
  misc_feature: MA Experiment 108530 PARAMETER Experiment Name: Zm_Imbibed_Seeds_P Parameter: Tissue Value: Aerial vs. Embryo
  misc_feature: MA Experiment ID: 108535 Result: Down-regulated in Transcription
  misc_feature: MA Experiment 108535 PARAMETER Experiment Name: Zm_Meristem_P Parameter: Age (day) Value: 8
  misc_feature: MA Experiment 108535 PARAMETER Experiment Name: Zm_Meristem_P Parameter: Organism Value: Zea mays
  misc_feature: MA Experiment 108535 PARAMETER Experiment Name: Zm_Meristem_P Parameter: Plant Line Value: 35A19
  misc_feature: MA Experiment 108535 PARAMETER Experiment Name: Zm_Meristem_P Parameter: Tissue Value: Root Meristem vs. Above Root Meristem
  misc_feature: MA Experiment ID: 108547 Result: Up-regulated in Transcription
  misc_feature: MA Experiment 108547 PARAMETER Experiment Name: Zm_Imbibed_Seeds_P Parameter: Age (day) Value: 4 vs. 2
  misc_feature: MA Experiment 108547 PARAMETER Experiment Name: Zm_Imbibed_Seeds_P Parameter: Organism Value: Zea mays
  misc_feature: MA Experiment 108547 PARAMETER Experiment Name: Zm_Imbibed_Seeds_P Parameter: Plant Line Value: 35A19
  misc_feature: MA Experiment 108547 PARAMETER Experiment Name: Zm_Imbibed_Seeds_P Parameter: Tissue Value: Aerial vs. Embryo
  misc_feature: MA Experiment ID: 20000492 Result: Down-regulated in Transcription
  misc_feature: MA Experiment 20000492 PARAMETER Experiment Name: Zm_Hybrid_Seed_Dev_P Parameter: DAP Value: 12
  misc_feature: MA Experiment 20000492 PARAMETER Experiment Name: Zm_Hybrid_Seed_Dev_P Parameter: Organism Value: Zea mays
  misc_feature: MA Experiment 20000492 PARAMETER Experiment Name: Zm_Hybrid_Seed_Dev_P Parameter: Plant Line Value: 35A19
  misc_feature: MA Experiment 20000492 PARAMETER Experiment Name: Zm_Hybrid_Seed_Dev_P Parameter: Tissue Value: Fert Kernel vs. Unfert Floret
cttttccaaaaaaaaaagaagcccctcctatccatccctatccctacccctacgagtatccaagtccaaccagcaagaggggaggcgctgcacgcaggtcacgcggcgatggacatatgcgatgtttgagcaggcggtggcagatttctgctggcatgcgagggaagtagtgtcgtcagggatggggctctggggttggccgtgggggcgacgtgggccgtcgggcttcggctccgcgtccaccgccgaggaggtcaccgccggcgtcgacgcaagcaacatcactgccatcgtcacaggagcgacgaatggcattggaaaggagacagccagagttctagcactgagcgggagccaaggtaatcataccagctaggacactggagagtggcctcaagttgaaggagagcctcgcagatgaggtcccaagctccaaggtacacgttatggagatggacctgagctgtctcagctccgtccgcgacttcgcacggtccttcaattcatcccacaagcatctgaacctcctcataaacaatgcagggatcatggcctgcccttaccagctgtccaaggatggaattgagctgcaattcgcaacgaatcatgttggccatttcttgctgacaagtctcctgctagacaagatgaaatcaactgctgcagagacaggtgtgcagggaaggatcataaacgtatcatcggtcgcgcataaaagaagtgatggtacatgctttgagctgaacaagctaaacgataaggctaggtaccaaccgttcattgcatacgcgcattcgaagttagccaatgttctccacacaaatgagttatccaggcgttttcaggaagaaggatgcaatctgacagcgaattccctgcatcctggagtgatcgtcaccaatatcattcgctatgttgctggaaacagtgcgctgatttcggctctctcccctgtagcaaatcttgttctgaagagcgtgccccggggggctgcaactacttgttacttggcattgcaccctaatgtcaaaggtgtatctggtaaatacttcgctgattgcaatgaagcaacaccgactgctgtcgcgagagactcagagctggcgaagaggctatggtcgttcagcgaagaacttgtcaagatctatgctgatatgtcacagacgacacaggcaagcgaagaagaggaaaccacggttacgaaagacgttttccaagacaagtagcgtaatatatgttgctgcgttttctacgttttgtacctgtcctctgggcccgaatggccagtgactgtaatagcacctaagtgcccgagactggtaagacaaggggtattcagacaatcaagaaaccacggtgcggctgaggcctgaggcagtcctctccgtcgttcactc

SEQ ID NO: 13592 - protein, 259 aa, Zea mays subsp. mays
  peptide (1)..(259): Ceres Seq. ID no. 12342475
  misc_feature (1)..(231): Homolog of NCBI NO: 18413950 NR Description: putative protein; protein id: At5g02540.1, by cDNA: 26538., supported by cDNA: gi_20260301 [Arabidopsis
  misc_feature (1)..(231): Homolog of NCBI NO: 20260302 NR Description: putative protein [Arabidopsis thaliana]
  misc_feature (1)..(231): Homolog of NCBI NO: 21554820 NR Description: putativepod-specific dehydrogenase SAC25
  misc_feature (28)..(231): Homolog of NCBI NO: 11250521 NR Description: hypothetical protein T22P11.130 - Arabidopsis >gi|7413643|emb|CAB85991.1| putative protein [Arabidopsis
  misc_feature (1)..(29): Homolog of NCBI NO: 11250521 NR Description: hypothetical protein T22P11.130 - Arabidopsis >gi|7413643|emb|CAB85991.1| putative protein [Arabidopsis
  misc_feature (1)..(230): Homolog of NCBI NO: 30686197 NR Description: short-chain dehydrogenase/reductase family
  misc_feature (1)..(230): Homolog of NCBI NO: 23297050 NR Description: unknown protein [Arabidopsis thaliana]
  misc_feature (1)..(230): Homolog of NCBI NO: 18416145 NR Description: putative protein; protein id: At4g23430.1,
  misc_feature (1)..(232): Homolog of NCBI NO: 34895876 NR Description: P0009G03.18 [Oryza sativa (japonica
  misc_feature (1)..(231): Homolog of NCBI NO: 15224306 NR Description: putative oxidoreductase; protein id: At2g37540.1, by cDNA: gi_20466184 [Arabidopsis thaliana]
MEMDLSCLSSVRDFARSFNSSHKHLNLLINNAGIMACPYQLSKDGIELQFATNHVGHFLLTSLLLDKMKSTAAETGVQGRIINVSSVAHKRSDGTCFELNKLNDKARYQPFIAYAHSKLANVLHTNELSRRFQEEGCNLTANSLHPGVIVTNIIRYVAGNSALISALSPVANLVLKSVPRGAATTCYLALHPNVKGVSGKYFADCNEATPTAVARDSELAKRLWSFSEELVKIYADMSQTTQASEEEETTVTKDVFQDK

SEQ ID NO: 13593 - protein, 257 aa, Zea mays subsp. mays
  peptide (1)..(257): Ceres Seq. ID no. 12342476
  misc_feature (1)..(229): Homolog of NCBI NO: 18413950 NR Description: putative protein; protein id: At5g02540.1, by cDNA: 26538., supported by cDNA: gi_20260301 [Arabidopsis
  misc_feature (1)..(229): Homolog of NCBI NO: 20260302 NR Description: putative protein [Arabidopsis thaliana]
  misc_feature (1)..(229): Homolog of NCBI NO: 21554820 NR Description: putativepod-specific dehydrogenase SAC25
  misc_feature (26)..(229): Homolog of NCBI NO: 11250521 NR Description: hypothetical protein T22P11.130 - Arabidopsis >gi|7413643|emb|CAB85991.1| putative protein [Arabidopsis
  misc_feature (1)..(27): Homolog of NCBI NO: 11250521 NR Description: hypothetical protein T22P11.130 - Arabidopsis >gi|7413643|emb|CAB85991.1| putative protein [Arabidopsis
  misc_feature (1)..(228): Homolog of NCBI NO: 30686197 NR Description: short-chain dehydrogenase/reductase family
  misc_feature (1)..(228): Homolog of NCBI NO: 23297050 NR Description: unknown protein [Arabidopsis thaliana]
  misc_feature (1)..(228): Homolog of NCBI NO: 18416145 NR Description: putative protein; protein id: At4g23430.1,
  misc_feature (1)..(230): Homolog of NCBI NO: 34895876 NR Description: P0009G03.18 [Oryza sativa (japonica
  misc_feature (1)..(229): Homolog of NCBI NO: 15224306 NR Description: putative oxidoreductase; protein id: At2g37540.1, by cDNA: gi_20466184 [Arabidopsis thaliana]
MDLSCLSSVRDFARSFNSSHKHLNLLINNAGIMACPYQLSKDGIELQFATNHVGHFLLTSLLLDKMKSTAAETGVQGRIINVSSVAHKRSDGTCFELNKLNDKARYQPFIAYAHSKLANVLHTNELSRRFQEEGCNLTANSLHPGVIVTNIIRYVAGNSALISALSPVANLVLKSVPRGAATTCYLALHPNVKGVSGKYFADCNEATPTAVARDSELAKRLWSFSEELVKIYADMSQTTQASEEEETTVTKDVFQDK

SEQ ID NO: 13594 - protein, 225 aa, Zea mays subsp. mays
  peptide (1)..(225): Ceres Seq. ID no. 12342477
  misc_feature (1)..(197): Homolog of NCBI NO: 18413950 NR Description: putative protein; protein id: At5g02540.1, by cDNA: 26538., supported by cDNA: gi_20260301 [Arabidopsis
  misc_feature (1)..(197): Homolog of NCBI NO: 20260302 NR Description: putative protein [Arabidopsis thaliana]
  misc_feature (1)..(197): Homolog of NCBI NO: 21554820 NR Description: putativepod-specific dehydrogenase SAC25
  misc_feature (1)..(197): Homolog of NCBI NO: 11250521 NR Description: hypothetical protein T22P11.130 - Arabidopsis >gi|7413643|emb|CAB85991.1| putative protein [Arabidopsis
  misc_feature (1)..(196): Homolog of NCBI NO: 30686197 NR Description: short-chain dehydrogenase/reductase family
  misc_feature (1)..(196): Homolog of NCBI NO: 23297050 NR Description: unknown protein [Arabidopsis thaliana]
  misc_feature (1)..(196): Homolog of NCBI NO: 18416145 NR Description: putative protein; protein id: At4g23430.1,
  misc_feature (1)..(198): Homolog of NCBI NO: 34895876 NR Description: P0009G03.18 [Oryza sativa (japonica
  misc_feature (1)..(197): Homolog of NCBI NO: 15224306 NR Description: putative oxidoreductase; protein id: At2g37540.1, by cDNA: gi_20466184 [Arabidopsis thaliana]
  misc_feature (1)..(196): Homolog of NCBI NO: 15233359 NR Description: putative protein; protein id: At4g11410.1
MACPYQLSKDGIELQFATNHVGHFLLTSLLLDKMKSTAAETGVQGRIINVSSVAHKRSDGTCFELNKLNDKARYQPFIAYAHSKLANVLHTNELSRRFQEEGCNLTANSLHPGVIVTNIIRYVAGNSALISALSPVANLVLKSVPRGAATTCYLALHPNVKGVSGKYFADCNEATPTAVARDSELAKRLWSFSEELVKIYADMSQTTQASEEEETTVTKDVFQDK

SEQ ID NO: 13595 - DNA, 1663 bp, Zea mays subsp. mays
  misc_feature (1)..(1663): Ceres Seq. ID no. 13598841
  misc_feature: MA Experiment ID: 108528 Result: Down-regulated in Transcription
  misc_feature: MA Experiment 108528 PARAMETER Experiment Name: Zm_Imbibed_Seeds_P Parameter: Age (day) Value: 5 vs. 2
  misc_feature: MA Experiment 108528 PARAMETER Experiment Name: Zm_Imbibed_Seeds_P Parameter: Organism Value: Zea mays
  misc_feature: MA Experiment 108528 PARAMETER Experiment Name: Zm_Imbibed_Seeds_P Parameter: Plant Line Value: 35A19
  misc_feature: MA Experiment 108528 PARAMETER Experiment Name: Zm_Imbibed_Seeds_P Parameter: Tissue Value: Aerial vs. Embryo
  misc_feature: MA Experiment ID: 108530 Result: Down-regulated in Transcription
  misc_feature: MA Experiment 108530 PARAMETER Experiment Name: Zm_Imbibed_Seeds_P Parameter: Age (day) Value: 6 vs. 2
  misc_feature: MA Experiment 108530 PARAMETER Experiment Name: Zm_Imbibed_Seeds_P Parameter: Organism Value: Zea mays
  misc_feature: MA Experiment 108530 PARAMETER Experiment Name: Zm_Imbibed_Seeds_P Parameter: Plant Line Value: 35A19
  misc_feature: MA Experiment 108530 PARAMETER Experiment Name: Zm_Imbibed_Seeds_P Parameter: Tissue Value: Aerial vs. Embryo
  misc_feature: MA Experiment ID: 108543 Result: Up-regulated in Transcription
  misc_feature: MA Experiment ID: 108544 Result: Up-regulated in Transcription
  misc_feature: MA Experiment ID: 108545 Result: Down-regulated in Transcription
  misc_feature: MA Experiment 108545 PARAMETER Experiment Name: Zm_Imbibed_Seeds_P Parameter: Age (day) Value: 3 vs. 2
  misc_feature: MA Experiment 108545 PARAMETER Experiment Name: Zm_Imbibed_Seeds_P Parameter: Organism Value: Zea mays
  misc_feature: MA Experiment 108545 PARAMETER Experiment Name: Zm_Imbibed_Seeds_P Parameter: Plant Line Value: 35A19
  misc_feature: MA Experiment 108545 PARAMETER Experiment Name: Zm_Imbibed_Seeds_P Parameter: Tissue Value: Aerial vs. Embryo
  misc_feature: MA Experiment ID: 108547 Result: Down-regulated in Transcription
  misc_feature: MA Experiment 108547 PARAMETER Experiment Name: Zm_Imbibed_Seeds_P Parameter: Age (day) Value: 4 vs. 2
  misc_feature: MA Experiment 108547 PARAMETER Experiment Name: Zm_Imbibed_Seeds_P Parameter: Organism Value: Zea mays
  misc_feature: MA Experiment 108547 PARAMETER Experiment Name: Zm_Imbibed_Seeds_P Parameter: Plant Line Value: 35A19
  misc_feature: MA Experiment 108547 PARAMETER Experiment Name: Zm_Imbibed_Seeds_P Parameter: Tissue Value: Aerial vs. Embryo
  misc_feature: MA Experiment ID: 108559 Result: Down-regulated in Transcription
  misc_feature: MA Experiment 108559 PARAMETER Experiment Name: Zm_5mM_NO_P Parameter: Age (day) Value: 8
  misc_feature: MA Experiment 108559 PARAMETER Experiment Name: Zm_5mM_NO_P Parameter: Organism Value: Zea mays
  misc_feature: MA Experiment 108559 PARAMETER Experiment Name: Zm_5mM_NO_P Parameter: Plant Line Value: 35A19
  misc_feature: MA Experiment 108559 PARAMETER Experiment Name: Zm_5mM_NO_P Parameter: Timepoint (hr) Value: 12
  misc_feature: MA Experiment 108559 PARAMETER Experiment Name: Zm_5mM_NO_P Parameter: Tissue Value: Aerial
  misc_feature: MA Experiment 108559 PARAMETER Experiment Name: Zm_5mM_NO_P Parameter: Treatment Value: 5mM NO vs. No Treatment
  misc_feature: MA Experiment ID: 20000480 Result: Down-regulated in Transcription
  misc_feature: MA Experiment 20000480 PARAMETER Experiment Name: Zm_Drought_P Parameter: Age (day) Value: 11
  misc_feature: MA Experiment 20000480 PARAMETER Experiment Name: Zm_Drought_P Parameter: Organism Value: Zea mays
  misc_feature: MA Experiment 20000480 PARAMETER Experiment Name: Zm_Drought_P Parameter: Plant Line Value: 35A19
  misc_feature: MA Experiment 20000480 PARAMETER Experiment Name: Zm_Drought_P Parameter: Timepoint (hr) Value: 72
  misc_feature: MA Experiment 20000480 PARAMETER Experiment Name: Zm_Drought_P Parameter: Tissue Value: Aerial
  misc_feature: MA Experiment 20000480 PARAMETER Experiment Name: Zm_Drought_P Parameter: Treatment Value: Drought vs. No Drought
  misc_feature: MA Experiment ID: 20000492 Result: Down-regulated in Transcription
  misc_feature: MA Experiment 20000492 PARAMETER Experiment Name: Zm_Hybrid_Seed_Dev_P Parameter: DAP Value: 12
  misc_feature: MA Experiment 20000492 PARAMETER Experiment Name: Zm_Hybrid_Seed_Dev_P Parameter: Organism Value: Zea mays
  misc_feature: MA Experiment 20000492 PARAMETER Experiment Name: Zm_Hybrid_Seed_Dev_P Parameter: Plant Line Value: 35A19
  misc_feature: MA Experiment 20000492 PARAMETER Experiment Name: Zm_Hybrid_Seed_Dev_P Parameter: Tissue Value: Fert Kernel vs. Unfert Floret
  misc_feature: MA Experiment ID: 20000535 Result: Down-regulated in Transcription
  misc_feature: MA Experiment 20000535 PARAMETER Experiment Name: Zm_Hybrid_Seed_Dev_P Parameter: DAP Value: 30 vs. 12
  misc_feature: MA Experiment 20000535 PARAMETER Experiment Name: Zm_Hybrid_Seed_Dev_P Parameter: Organism Value: Zea mays
  misc_feature: MA Experiment 20000535 PARAMETER Experiment Name: Zm_Hybrid_Seed_Dev_P Parameter: Plant Line Value: 35A19
  misc_feature: MA Experiment 20000535 PARAMETER Experiment Name: Zm_Hybrid_Seed_Dev_P Parameter: Tissue Value: Embryo vs. Unfert Floret
  misc_feature: MA Experiment ID: 20001612 Result: Up-regulated in Transcription
  misc_feature: MA Experiment 20001612 PARAMETER Experiment Name: Zm_50ppm_KNO3_L-to-H_P Parameter: Age (day) Value: 19
  misc_feature: MA Experiment 20001612 PARAMETER Experiment Name: Zm_50ppm_KNO3_L-to-H_P Parameter: Organism Value: Zea mays
  misc_feature: MA Experiment 20001612 PARAMETER Experiment Name: Zm_50ppm_KNO3_L-to-H_P Parameter: Plant Line Value: 35A19
  misc_feature: MA Experiment 20001612 PARAMETER Experiment Name: Zm_50ppm_KNO3_L-to-H_P Parameter: Timepoint (hr) Value: 8
  misc_feature: MA Experiment 20001612 PARAMETER Experiment Name: Zm_50ppm_KNO3_L-to-H_P Parameter: Tissue Value: Roots
  misc_feature: MA Experiment 20001612 PARAMETER Experiment Name: Zm_50ppm_KNO3_L-to-H_P Parameter: Treatment Value: 50ppm KNO3 vs. 50ppm KCl
  misc_feature: MA Experiment ID: 20001614 Result: Up-regulated in Transcription
  misc_feature: MA Experiment 20001614 PARAMETER Experiment Name: Zm_50ppm_KNO3_L-to-H_P Parameter: Age (day) Value: 21
  misc_feature: MA Experiment 20001614 PARAMETER Experiment Name: Zm_50ppm_KNO3_L-to-H_P Parameter: Organism Value: Zea mays
  misc_feature: MA Experiment 20001614 PARAMETER Experiment Name: Zm_50ppm_KNO3_L-to-H_P Parameter: Plant Line Value: 35A19
  misc_feature: MA Experiment 20001614 PARAMETER Experiment Name: Zm_50ppm_KNO3_L-to-H_P Parameter: Timepoint (hr) Value: 48
  misc_feature: MA Experiment 20001614 PARAMETER Experiment Name: Zm_50ppm_KNO3_L-to-H_P Parameter: Tissue Value: Roots
  misc_feature: MA Experiment 20001614 PARAMETER Experiment Name: Zm_50ppm_KNO3_L-to-H_P Parameter: Treatment Value: 50ppm KNO3 vs. 50ppm KCl
ctccagagcttgggcagactctcctcagtaactatagttttttttgttccttgggaggatagaaaaaatatatccttggttttcttgaacagataacatttcaggtgtgcttctgaagggagatttcgttgaacaggatgaatgcattggcagcaaccagcaggaacttcaagcaggcagctaagctgctgggcctcgactccaagctggagaagagcttgctcattccattcagggagatcaaggttgaatgcacaatcccaaaagatgatggaactttggcatcctatgttggatttagggttcaacatgataatgctaggggacctatgaagggtggaatcagataccaccatgaggttgatcctgatgaagttaatgccttggcacaattgatgacttggaaaacagcagtagctaacataccatatggaggagccaaaggtggaattggatgtagccctggagacctgagcatctctgagcttgagaggcttacccgagtttttactcagaaaatccatgacttgattggcatccatactgacgttccagctccagatatgggcaccaactcacagacaatggcatggatacttgacgaatactcaaagttccatggttactcacctgctgttgtgacaggaaagcctgtggacctcggaggatcattgggaagagacgccgctactggaaggggagttctgtttgctactgaagctttgcttgcagagcatggcaaaggcattgcaggccagcgtttcgtcatacagggattcggtaacgttggttcctgggcagctcagctgataagtgaagccggtggcaaggtgattgctatcagtgacgtcacaggcgccgtcaaaaacgtcgatggcctcgacatcgtgcagctagtgaagcactcggcggagaacaaggggatcaagggcttcaaggggggagacgccatcgctccagactcgttgctcactgaagagtgcgacgtcctcatcccagcagcgcttgggggagtcataaacaaggataatgctaacgacataaaggcaaagtacatcatcgaggctgccaatcaccccacagatccagaggcagacgagatcctgtcaaagaaaggcgtcctcatcctccccgacatactggccaactctggtggcgtcacagtgagctacttcgagtgggtacaaaacatccaggggttcatgtgggacgaagagaaggtaaacgcggagctgcggacgtacatgacgcgcgccttcggggacgtgaagcagatgtgccggagccacagctgcgacctccgcatgggcgccttcacgcttggcgtcaaccgcgtcgcgcgcgccaccgtcctcaggggatgggaagcatgacctccctccgtgtcgtccgtgtgcccctccctgttgtatcctcttggtcttgggcccttgtttttctttggttaattattgtcgagatcaacggagatccgagaaaaacgggctcagttaataattccaagaagtgcgtcttcttggagataaaatagcggaaggagagttataataagtctgtaactgtaacccatagctgagatgctgtctgcaagcagcaatgccaatgccaatgccatctggttttcgtgctaaaaaaaaaaaaaaaaaagcttatcgataccgtc

SEQ ID NO: 13596 - protein, 411 aa, Zea mays subsp. mays
  peptide (1)..(411): Ceres Seq. ID no. 15222433
  misc_feature (176)..(408): Pfam Name: Glutamate/Leucine/Phenylalanine/Valine dehydrogenase Pfam Description: Glutamate/Leucine/Phenylalanine/Valine
  misc_feature (1)..(411): Homolog of NCBI NO: 7431775 NR Description: glutamate dehydrogenase (EC 1.4.1.2) - maize
  misc_feature (1)..(411): Homolog of NCBI NO: 12643763 NR Description: Glutamate dehydrogenase (GDH)
  misc_feature (1)..(411): Homolog of NCBI NO: 1931629 NR Description: glutamate dehydrogenase mutant [Zea mays]
  misc_feature (1)..(411): Homolog of NCBI NO: 28269441 NR Description: glutamate dehydrogenase [Oryza sativa (japonica
  misc_feature (1)..(411): Homolog of NCBI NO: 4150965 NR Description: glutamate dehydrogenase [Asparagus officinalis]
  misc_feature (1)..(411): Homolog of NCBI NO: 20873461 NR Description: glutamate dehydrogenase [Nicotiana tabacum]
  misc_feature (1)..(411): Homolog of NCBI NO: 12643806 NR Description: Glutamate dehydrogenase B (GDH B)
  misc_feature (1)..(411): Homolog of NCBI NO: 21314959 NR Description: NADH-glutamate dehydrogenase [Lycopersicon
  misc_feature (1)..(411): Homolog of NCBI NO: 7431768 NR Description: glutamate dehydrogenase (EC 1.4.1.-) B - tobacco >gi|4688955|emb|CAA69601.2| NADH glutamate dehydrogenase
  misc_feature (1)..(411): Homolog of NCBI NO: 15238762 NR Description: glutamate dehydrogenase (EC 1.4.1.-) 1 [Arabidopsis thaliana] >gi|12229807|sp|Q43314|DHE1_ARATH
MNALAATSRNFKQAAKLLGLDSKLEKSLLIPFREIKVECTIPKDDGTLASYVGFRVQHDNARGPMKGGIRYHHEVDPDEVNALAQLMTWKTAVANIPYGGAKGGIGCSPGDLSISELERLTRVFTQKIHDLIGIHTDVPAPDMGTNSQTMAWILDEYSKFHGYSPAVVTGKPVDLGGSLGRDAATGRGVLFATEALLAEHGKGIAGQRFVIQGFGNVGSWAAQLISEAGGKVIAISDVTGAVKNVDGLDIVQLVKHSAENKGIKGFKGGDAIAPDSLLTEECDVLIPAALGGVINKDNANDIKAKYIIEAANHPTDPEADEILSKKGVLILPDILANSGGVTVSYFEWVQNIQGFMWDEEKVNAELRTYMTRAFGDVKQMCRSHSCDLRMGAFTLGVNRVARATVLRGWEA

SEQ ID NO: 13597 - protein, 347 aa, Zea mays subsp. mays
  peptide (1)..(347): Ceres Seq. ID no. 15222434
  misc_feature (112)..(344): Pfam Name: Glutamate/Leucine/Phenylalanine/Valine dehydrogenase Pfam Description: Glutamate/Leucine/Phenylalanine/Valine
  misc_feature (1)..(347): Homolog of NCBI NO: 12643763 NR Description: Glutamate dehydrogenase (GDH)
  misc_feature (1)..(347): Homolog of NCBI NO: 1931629 NR Description: glutamate dehydrogenase mutant [Zea mays]
  misc_feature (1)..(347): Homolog of NCBI NO: 28269441 NR Description: glutamate dehydrogenase [Oryza sativa (japonica
  misc_feature (1)..(347): Homolog of NCBI NO: 4150965 NR Description: glutamate dehydrogenase [Asparagus officinalis]
  misc_feature (1)..(347): Homolog of NCBI NO: 20873461 NR Description: glutamate dehydrogenase [Nicotiana tabacum]
  misc_feature (1)..(347): Homolog of NCBI NO: 7431775 NR Description: glutamate dehydrogenase (EC 1.4.1.2) - maize
  misc_feature (1)..(347): Homolog of NCBI NO: 12643806 NR Description: Glutamate dehydrogenase B (GDH B)
  misc_feature (1)..(347): Homolog of NCBI NO: 21314959 NR Description: NADH-glutamate dehydrogenase [Lycopersicon
  misc_feature (1)..(347): Homolog of NCBI NO: 7431768 NR Description: glutamate dehydrogenase (EC 1.4.1.-) B - tobacco >gi|4688955|emb|CAA69601.2| NADH glutamate dehydrogenase
  misc_feature (1)..(347): Homolog of NCBI NO: 15238762 NR Description: glutamate dehydrogenase (EC 1.4.1.-) 1 [Arabidopsis thaliana] >gi|12229807|sp|Q43314|DHE1_ARATH
MKGGIRYHHEVDPDEVNALAQLMTWKTAVANIPYGGAKGGIGCSPGDLSISELERLTRVFTQKIHDLIGIHTDVPAPDMGTNSQTMAWILDEYSKFHGYSPAVVTGKPVDLGGSLGRDAATGRGVLFATEALLAEHGKGIAGQRFVIQGFGNVGSWAAQLISEAGGKVIAISDVTGAVKNVDGLDIVQLVKHSAENKGIKGFKGGDAIAPDSLLTEECDVLIPAALGGVINKDNANDIKAKYIIEAANHPTDPEADEILSKKGVLILPDILANSGGVTVSYFEWVQNIQGFMWDEEKVNAELRTYMTRAFGDVKQMCRSHSCDLRMGAFTLGVNRVARATVLRGWEA

SEQ ID NO: 13598 - protein, 325 aa, Zea mays subsp. mays
  peptide (1)..(325): Ceres Seq. ID no. 15222435
  misc_feature (90)..(322): Pfam Name: Glutamate/Leucine/Phenylalanine/Valine dehydrogenase Pfam Description: Glutamate/Leucine/Phenylalanine/Valine
  misc_feature (1)..(325): Homolog of NCBI NO: 7431775 NR Description: glutamate dehydrogenase (EC 1.4.1.2) - maize
  misc_feature (1)..(325): Homolog of NCBI NO: 12643763 NR Description: Glutamate dehydrogenase (GDH)
  misc_feature (1)..(325): Homolog of NCBI NO: 1931629 NR Description: glutamate dehydrogenase mutant [Zea mays]
  misc_feature (1)..(325): Homolog of NCBI NO: 28269441 NR Description: glutamate dehydrogenase [Oryza sativa (japonica
  misc_feature (1)..(325): Homolog of NCBI NO: 4150965 NR Description: glutamate dehydrogenase [Asparagus officinalis]
  misc_feature (1)..(325): Homolog of NCBI NO: 20873461 NR Description: glutamate dehydrogenase [Nicotiana tabacum]
  misc_feature (1)..(325): Homolog of NCBI NO: 12643806 NR Description: Glutamate dehydrogenase B (GDH B)
  misc_feature (1)..(325): Homolog of NCBI NO: 21314959 NR Description: NADH-glutamate dehydrogenase [Lycopersicon
  misc_feature (1)..(325): Homolog of NCBI NO: 7431768 NR Description: glutamate dehydrogenase (EC 1.4.1.-) B - tobacco >gi|4688955|emb|CAA69601.2| NADH glutamate dehydrogenase
  misc_feature (1)..(325): Homolog of NCBI NO: 15238762 NR Description: glutamate dehydrogenase (EC 1.4.1.-) 1 [Arabidopsis thaliana] >gi|12229807|sp|Q43314|DHE1_ARATH
MTWKTAVANIPYGGAKGGIGCSPGDLSISELERLTRVFTQKIHDLIGIHTDVPAPDMGTNSQTMAWILDEYSKFHGYSPAVVTGKPVDLGGSLGRDAATGRGVLFATEALLAEHGKGIAGQRFVIQGFGNVGSWAAQLISEAGGKVIAISDVTGAVKNVDGLDIVQLVKHSAENKGIKGFKGGDAIAPDSLLTEECDVLIPAALGGVINKDNANDIKAKYIIEAANHPTDPEADEILSKKGVLILPDILANSGGVTVSYFEWVQNIQGFMWDEEKVNAELRTYMTRAFGDVKQMCRSHSCDLRMGAFTLGVNRVARATVLRGWEA

SEQ ID NO: 13599 - DNA, 620 bp, Zea mays subsp. mays; identical to SEQ ID NO: 6372
  misc_feature (1)..(620): Ceres Seq. ID no. 12367118
  misc_feature: MA Experiment ID: 108556 Result: Up-regulated in Transcription
  misc_feature: MA Experiment 108556 PARAMETER Experiment Name: Zm_Drought_P Parameter: Age (day) Value: 9
  misc_feature: MA Experiment 108556 PARAMETER Experiment Name: Zm_Drought_P Parameter: Organism Value: Zea mays
  misc_feature: MA Experiment 108556 PARAMETER Experiment Name: Zm_Drought_P Parameter: Plant Line Value: 35A19
  misc_feature: MA Experiment 108556 PARAMETER Experiment Name: Zm_Drought_P Parameter: Timepoint (hr) Value: 24
  misc_feature: MA Experiment 108556 PARAMETER Experiment Name: Zm_Drought_P Parameter: Tissue Value: Aerial
  misc_feature: MA Experiment 108556 PARAMETER Experiment Name: Zm_Drought_P Parameter: Treatment Value: Drought vs. No Drought
  misc_feature: MA Experiment ID: 20000108 Result: Up-regulated in Transcription
  misc_feature: MA Experiment 20000108 PARAMETER Experiment Name: Zm_Root-Tips_P Parameter: Age (day) Value: 12
  misc_feature: MA Experiment 20000108 PARAMETER Experiment Name: Zm_Root-Tips_P Parameter: Organism Value: Zea mays
  misc_feature: MA Experiment 20000108 PARAMETER Experiment Name: Zm_Root-Tips_P Parameter: Tissue Value: Root tips vs. Root mid region    35
  misc_feature: MA Experiment 20000108 PARAMETER Experiment Name: Zm_Root-Tips_P Parameter: Tissue Value: Root tips vs. Root mid region   Sequence Listing-Misc Features (4)
  misc_feature: MA Experiment ID: 20000480 Result: Up-regulated in Transcription
  misc_feature: MA Experiment 20000480 PARAMETER Experiment Name: Zm_Drought_P Parameter: Age (day) Value: 11
  misc_feature: MA Experiment 20000480 PARAMETER Experiment Name: Zm_Drought_P Parameter: Organism Value: Zea mays
  misc_feature: MA Experiment 20000480 PARAMETER Experiment Name: Zm_Drought_P Parameter: Plant Line Value: 35A19
  misc_feature: MA Experiment 20000480 PARAMETER Experiment Name: Zm_Drought_P Parameter: Timepoint (hr) Value: 72
  misc_feature: MA Experiment 20000480 PARAMETER Experiment Name: Zm_Drought_P Parameter: Tissue Value: Aerial
  misc_feature: MA Experiment 20000480 PARAMETER Experiment Name: Zm_Drought_P Parameter: Treatment Value: Drought vs. No Drought
  misc_feature: MA Experiment ID: 20000535 Result: Up-regulated in Transcription
  misc_feature: MA Experiment 20000535 PARAMETER Experiment Name: Zm_Hybrid_Seed_Dev_P Parameter: DAP Value: 30 vs. 12
  misc_feature: MA Experiment 20000535 PARAMETER Experiment Name: Zm_Hybrid_Seed_Dev_P Parameter: Organism Value: Zea mays
  misc_feature: MA Experiment 20000535 PARAMETER Experiment Name: Zm_Hybrid_Seed_Dev_P Parameter: Plant Line Value: 35A19
  misc_feature: MA Experiment 20000535 PARAMETER Experiment Name: Zm_Hybrid_Seed_Dev_P Parameter: Tissue Value: Embryo vs. Unfert Floret

SEQ ID NO: 13600 - protein, 206 aa, Zea mays subsp. mays; identical to SEQ ID NO: 6373
  peptide (1)..(206): Ceres Seq. ID no. 12367119
  misc_feature (101)..(203): Pfam Name: Translocation protein Sec62 Pfam Description: Translocation protein Sec62
  misc_feature (101)..(203): Pfam Name: Translocation protein Sec62 Pfam Description: Translocation protein Sec62
  misc_feature (48)..(203): Homolog of NCBI NO: 18402801 NR Description: expressed protein; protein id: At3g20920.1, by cDNA: 41717., supported by cDNA: gi_15810582, supported by gi_21280984 [Arabidopsis thaliana] >gi|9293998|dbj|BAB01901.1|
  misc_feature (48)..(203): Homolog of NCBI NO: 21593719 NR Description: unknown [Arabidopsis thaliana]
  misc_feature (48)..(203): Homolog of NCBI NO: 18402801 NR Description: expressed protein; protein id: At3g20920.1, by cDNA: 41717., supported by cDNA: gi_15810582, supported by gi_21280984 [Arabidopsis thaliana] >gi|9293998|dbj|BAB01901.1|
  misc_feature (48)..(203): Homolog of NCBI NO: 21593719 NR Description: unknown [Arabidopsis thaliana]

SEQ ID NO: 13601 - protein, 172 aa, Zea mays subsp. mays; identical to SEQ ID NO: 6374
  peptide (1)..(172): Ceres Seq. ID no. 12367120
  misc_feature (67)..(169): Pfam Name: Translocation protein Sec62 Pfam Description: Translocation protein Sec62
  misc_feature (67)..(169): Pfam Name: Translocation protein Sec62 Pfam Description: Translocation protein Sec62
  misc_feature (14)..(169): Homolog of NCBI NO: 18402801 NR Description: expressed protein; protein id: At3g20920.1, by cDNA: 41717., supported by cDNA: gi_15810582, supported by gi_21280984 [Arabidopsis thaliana] >gi|9293998|dbj|BAB01901.1|
  misc_feature (14)..(169): Homolog of NCBI NO: 21593719 NR Description: unknown [Arabidopsis thaliana]
  misc_feature (14)..(169): Homolog of NCBI NO: 18402801 NR Description: expressed protein; protein id: At3g20920.1, by cDNA: 41717., supported by cDNA: gi_15810582, supported by gi_21280984 [Arabidopsis thaliana] >gi|9293998|dbj|BAB01901.1|
  misc_feature (14)..(169): Homolog of NCBI NO: 21593719 NR Description: unknown [Arabidopsis thaliana]

SEQ ID NO: 13602 - protein, 108 aa, Zea mays subsp. mays; identical to SEQ ID NO: 6375
  peptide (1)..(108): Ceres Seq. ID no. 12367121
  misc_feature (3)..(105): Pfam Name: Translocation protein Sec62 Pfam Description: Translocation protein Sec62
  misc_feature (3)..(105): Pfam Name: Translocation protein Sec62 Pfam Description: Translocation protein Sec62
  misc_feature (1)..(105): Homolog of NCBI NO: 18402801 NR Description: expressed protein; protein id: At3g20920.1, by cDNA: 41717., supported by cDNA: gi_15810582, supported by gi_21280984 [Arabidopsis thaliana] >gi|9293998|dbj|BAB01901.1|
  misc_feature (1)..(105): Homolog of NCBI NO: 21593719 NR Description: unknown [Arabidopsis thaliana]
  misc_feature (1)..(105): Homolog of NCBI NO: 18402801 NR Description: expressed protein; protein id: At3g20920.1, by cDNA: 41717., supported by cDNA: gi_15810582, supported by gi_21280984 [Arabidopsis thaliana] >gi|9293998|dbj|BAB01901.1|
  misc_feature (1)..(105): Homolog of NCBI NO: 21593719 NR Description: unknown [Arabidopsis thaliana]

SEQ ID NO: 13603 - DNA, 1413 bp, Zea mays subsp. mays
  misc_feature (1)..(1413): Ceres Seq. ID no. 12353553
  misc_feature: MA Experiment ID: 108527 Result: Down-regulated in Transcription
  misc_feature: MA Experiment 108527 PARAMETER Experiment Name: Zm_5mM_NO_P Parameter: Age (day) Value: 8
  misc_feature: MA Experiment 108527 PARAMETER Experiment Name: Zm_5mM_NO_P Parameter: Organism Value: Zea mays
  misc_feature: MA Experiment 108527 PARAMETER Experiment Name: Zm_5mM_NO_P Parameter: Plant Line Value: 35A19
  misc_feature: MA Experiment 108527 PARAMETER Experiment Name: Zm_5mM_NO_P Parameter: Timepoint (hr) Value: 6
  misc_feature: MA Experiment 108527 PARAMETER Experiment Name: Zm_5mM_NO_P Parameter: Tissue Value: Aerial
  misc_feature: MA Experiment 108527 PARAMETER Experiment Name: Zm_5mM_NO_P Parameter: Treatment Value: 5mM NO vs. No Treatment
  misc_feature: MA Experiment ID: 108535 Result: Down-regulated in Transcription
  misc_feature: MA Experiment 108535 PARAMETER Experiment Name: Zm_Meristem_P Parameter: Age (day) Value: 8
  misc_feature: MA Experiment 108535 PARAMETER Experiment Name: Zm_Meristem_P Parameter: Organism Value: Zea mays
  misc_feature: MA Experiment 108535 PARAMETER Experiment Name: Zm_Meristem_P Parameter: Plant Line Value: 35A19
  misc_feature: MA Experiment 108535 PARAMETER Experiment Name: Zm_Meristem_P Parameter: Tissue Value: Root Meristem vs. Above Root Meristem
  misc_feature: MA Experiment ID: 108543 Result: Up-regulated in Transcription
  misc_feature: MA Experiment ID: 108687 Result: Down-regulated in Transcription
  misc_feature: MA Experiment 108687 PARAMETER Experiment Name: Zm_Embryos-Flowers__P Parameter: Tissue Value: Embryo vs. Aerial+
  misc_feature: MA Experiment ID: 108689 Result: Up-regulated in Transcription
  misc_feature: MA Experiment 108689 PARAMETER Experiment Name: Zm_Drought_Roots_P Parameter: Age (day) Value: 9
  misc_feature: MA Experiment 108689 PARAMETER Experiment Name: Zm_Drought_Roots_P Parameter: Organism Value: Zea mays
  misc_feature: MA Experiment 108689 PARAMETER Experiment Name: Zm_Drought_Roots_P Parameter: Plant Line Value: 35A19
  misc_feature: MA Experiment 108689 PARAMETER Experiment Name: Zm_Drought_Roots_P Parameter: Timepoint (hr) Value: 24
  misc_feature: MA Experiment 108689 PARAMETER Experiment Name: Zm_Drought_Roots_P Parameter: Tissue Value: Roots
  misc_feature: MA Experiment 108689 PARAMETER Experiment Name: Zm_Drought_Roots_P Parameter: Treatment Value: Drought vs. No Drought
  misc_feature: MA Experiment ID: 20000480 Result: Down-regulated in Transcription
  misc_feature: MA Experiment 20000480 PARAMETER Experiment Name: Zm_Drought_P Parameter: Age (day) Value: 11
  misc_feature: MA Experiment 20000480 PARAMETER Experiment Name: Zm_Drought_P Parameter: Organism Value: Zea mays
  misc_feature: MA Experiment 20000480 PARAMETER Experiment Name: Zm_Drought_P Parameter: Plant Line Value: 35A19
  misc_feature: MA Experiment 20000480 PARAMETER Experiment Name: Zm_Drought_P Parameter: Timepoint (hr) Value: 72
  misc_feature: MA Experiment 20000480 PARAMETER Experiment Name: Zm_Drought_P Parameter: Tissue Value: Aerial
  misc_feature: MA Experiment 20000480 PARAMETER Experiment Name: Zm_Drought_P Parameter: Treatment Value: Drought vs. No Drought
  misc_feature: MA Experiment ID: 20000535 Result: Down-regulated in Transcription
  misc_feature: MA Experiment 20000535 PARAMETER Experiment Name: Zm_Hybrid_Seed_Dev_P Parameter: DAP Value: 30 vs. 12
  misc_feature: MA Experiment 20000535 PARAMETER Experiment Name: Zm_Hybrid_Seed_Dev_P Parameter: Organism Value: Zea mays
  misc_feature: MA Experiment 20000535 PARAMETER Experiment Name: Zm_Hybrid_Seed_Dev_P Parameter: Plant Line Value: 35A19
  misc_feature: MA Experiment 20000535 PARAMETER Experiment Name: Zm_Hybrid_Seed_Dev_P Parameter: Tissue Value: Embryo vs. Unfert Floret
caccttttctttttcaagaggaagtttttaccatgctacagtttgttggacagatctacaattgggttttggcatgcaggtgagagcctgcacacgcctttcctgagcccatacctcaaggcgctgggcgcggatttcagcaacggcgtgaacttcgccatcggcggctcgacggcgacgccggggggctctccattctcgctggacgtgcagctccatcagtggctctacttcagggccaggtccatggagatgatcaacctaggacagaggcctcccatcgatcgcgaaggattccgaaaggccatctacaccatcgacatcgggcagaacgacgtgtctgcttacatgcacctgccctacgaccaagtgcttgccaagatccctggatttgttgctcagatcaagtacaccatcgagacgctgtactcgcacggggcccgcaagttctggatccacggcacgggcgcgctgggctgcctgccgcagaagctggccatcccgcgggacgccgacgacggcgaccagctggacgcccacggctgcctcaagacctacaacaacgccgccaagcgcttcaacgcgctgctcggcgacgcctgcgcccagctccggcgccggatggtggacgcggcgctcgtcttcgtcgacatgtacgccgtcaagtacgacctggtggccaaccacacgacgcacgggatcgagaaacctctcatggcgtgctgcggctacggcgggccgccgtacaactacaaccacttcaaggcgtgcatgtcggcggagatgcagctgtgcgacgtgggcacgcgcttcatcagctgggacggcgtgcacttcaccgaggccgccaacgccatcgtcgccgccaaggtgctcaccggcgactactccacgcccagggtcaccatcgccaaactcgtcaactccacgctgcccaacgacgactagctggctggccgatcgatcgatcgtcgtcgtcattctgataaacatactgcaggcaggcttctcatcgatccatatccaattgtccgtagaaatctacgactagctcattgtagatccgtaatgtgggctaagagatgcatgacgatcgactagctgcccaactcgtcaagagctggttcaccactctcgtcaggatcgagctagaatggacgagcaattccatggcaccgagtgacacaatttatatcctcattgactagtactagtagtcgtactagcaaaaagaaaacagggttgggccaactgagtgattctgtggggttaggcctttgaggcttttacatgcaattcgtacatgtgtgtgtgtgacatttacagtttttttttaaaaaaaattaggaaatccgatcaatgggtggagggaatgcgacaacatcaaaaagtttacgtaaaatccattacctt

SEQ ID NO: 13604 - protein, 315 aa, Zea mays subsp. mays
  peptide (1)..(315): Ceres Seq. ID no. 12353554
  misc_feature (28)..(291): Pfam Name: GDSL-like Lipase/Acylhydrolase Pfam Description: GDSL-like Lipase/Acylhydrolase
  misc_feature (28)..(314): Homolog of NCBI NO: 34894838 NR Description: putative lipase homolog [Oryza sativa (japonica group)] >gi|13365800|dbj|BAB39238.1| putative lipase homolog
  misc_feature (25)..(301): Homolog of NCBI NO: 34894844 NR Description: putative lipase homolog [Oryza sativa (japonica group)] >gi|13365803|dbj|BAB39241.1| putative lipase homolog
  misc_feature (25)..(301): Homolog of NCBI NO: 34894866 NR Description: putative lipase homolog [Oryza sativa (japonica group)] >gi|14164537|dbj|BAB55786.1| putative lipase homolog
  misc_feature (28)..(299): Homolog of NCBI NO: 15217506 NR Description: putative lipase; protein id: At1g09390.1
  misc_feature (28)..(299): Homolog of NCBI NO: 15223585 NR Description: nodule-specific protein, putative; protein id: [Arabidopsis thaliana] >gi|25404142|pir||D96608 hypothetical
  misc_feature (28)..(280): Homolog of NCBI NO: 25336281 NR Description: lipase-like protein Lip-4 [imported] - thaliana (fragment) >gi|3220021|gb|AAC23651.1| lipase homolog
  misc_feature (28)..(299): Homolog of NCBI NO: 18405064 NR Description: early nodule-specific protein, putative; protein At1g54790.1, supported by cDNA: 122943. [Arabidopsis thaliana]
  misc_feature (28)..(299): Homolog of NCBI NO: 21537184 NR Description: early nodule-specific protein, putative
  misc_feature (28)..(299): Homolog of NCBI NO: 25405771 NR Description: hypothetical protein T22H22.20 [imported] - thaliana >gi|3776573|gb|AAC64890.1| Similar to nodulins and homolog F14J9.5 gi|3482914 from Arabidopsis thaliana BAC
  misc_feature (172)..(300): Homolog of NCBI NO: 15228721 NR Description: putative protein; protein id: At3g62280.1
HLFFFKRKFLPCYSLLDRSTIGFWHAGESLHTPFLSPYLKALGADFSNGVNFAIGGSTATPGGSPFSLDVQLHQWLYFRARSMEMINLGQRPPIDREGFRKAIYTIDIGQNDVSAYMHLPYDQVLAKIPGFVAQIKYTIETLYSHGARKFWIHGTGALGCLPQKLAIPRDADDGDQLDAHGCLKTYNNAAKRFNALLGDACAQLRRRMVDAALVFVDMYAVKYDLVANHTTHGIEKPLMACCGYGGPPYNYNHFKACMSAEMQLCDVGTRFISWDGVHFTEAANAIVAAKVLTGDYSTPRVTIAKLVNSTLPNDD

SEQ ID NO: 13605 - protein, 233 aa, Zea mays subsp. mays
  peptide (1)..(233): Ceres Seq. ID no. 12353555
  misc_feature (1)..(209): Pfam Name: GDSL-like Lipase/Acylhydrolase Pfam Description: GDSL-like Lipase/Acylhydrolase
  misc_feature (1)..(232): Homolog of NCBI NO: 34894838 NR Description: putative lipase homolog [Oryza sativa (japonica group)] >gi|13365800|dbj|BAB39238.1| putative lipase homolog
  misc_feature (1)..(219): Homolog of NCBI NO: 34894844 NR Description: putative lipase homolog [Oryza sativa (japonica group)] >gi|13365803|dbj|BAB39241.1| putative lipase homolog
  misc_feature (1)..(219): Homolog of NCBI NO: 34894866 NR Description: putative lipase homolog [Oryza sativa (japonica group)] >gi|14164537|dbj|BAB55786.1| putative lipase homolog
  misc_feature (1)..(217): Homolog of NCBI NO: 15217506 NR Description: putative lipase; protein id: At1g09390.1
  misc_feature (1)..(217): Homolog of NCBI NO: 15223585 NR Description: nodule-specific protein, putative; protein id: [Arabidopsis thaliana] >gi|25404142|pir||D96608 hypothetical
  misc_feature (1)..(198): Homolog of NCBI NO: 25336281 NR Description: lipase-like protein Lip-4 [imported] - thaliana (fragment) >gi|3220021|gb|AAC23651.1| lipase homolog
  misc_feature (1)..(217): Homolog of NCBI NO: 18405064 NR Description: early nodule-specific protein, putative; protein At1g54790.1, supported by cDNA: 122943. [Arabidopsis thaliana]
  misc_feature (1)..(217): Homolog of NCBI NO: 25405771 NR Description: hypothetical protein T22H22.20 [imported] - thaliana >gi|3776573|gb|AAC64890.1| Similar to nodulins and homolog F14J9.5 gi|3482914 from Arabidopsis thaliana BAC
  misc_feature (1)..(217): Homolog of NCBI NO: 21537184 NR Description: early nodule-specific protein, putative
  misc_feature (90)..(218): Homolog of NCBI NO: 15228721 NR Description: putative protein; protein id: At3g62280.1
MEMINLGQRPPIDREGFRKAIYTIDIGQNDVSAYMHLPYDQVLAKIPGFVAQIKYTIETLYSHGARKFWIHGTGALGCLPQKLAIPRDADDGDQLDAHGCLKTYNNAAKRFNALLGDACAQLRRRMVDAALVFVDMYAVKYDLVANHTTHGIEKPLMACCGYGGPPYNYNHFKACMSAEMQLCDVGTRFISWDGVHFTEAANAIVAAKVLTGDYSTPRVTIAKLVNSTLPNDD

SEQ ID NO: 13606 - protein, 231 aa, Zea mays subsp. mays
  peptide (1)..(231): Ceres Seq. ID no. 12353556
  misc_feature (1)..(207): Pfam Name: GDSL-like Lipase/Acylhydrolase Pfam Description: GDSL-like Lipase/Acylhydrolase
  misc_feature (1)..(230): Homolog of NCBI NO: 34894838 NR Description: putative lipase homolog [Oryza sativa (japonica group)] >gi|13365800|dbj|BAB39238.1| putative lipase homolog
  misc_feature (1)..(217): Homolog of NCBI NO: 34894844 NR Description: putative lipase homolog [Oryza sativa (japonica group)] >gi|13365803|dbj|BAB39241.1| putative lipase homolog
  misc_feature (1)..(217): Homolog of NCBI NO: 34894866 NR Description: putative lipase homolog [Oryza sativa (japonica group)] >gi|14164537|dbj|BAB55786.1| putative lipase homolog
  misc_feature (1)..(215): Homolog of NCBI NO: 15217506 NR Description: putative lipase; protein id: At1g09390.1
  misc_feature (1)..(215): Homolog of NCBI NO: 15223585 NR Description: nodule-specific protein, putative; protein id: [Arabidopsis thaliana] >gi|25404142|pir||D96608 hypothetical
  misc_feature (1)..(196): Homolog of NCBI NO: 25336281 NR Description: lipase-like protein Lip-4 [imported] - thaliana (fragment) >gi|3220021|gb|AAC23651.1| lipase homolog
  misc_feature (1)..(215): Homolog of NCBI NO: 18405064 NR Description: early nodule-specific protein, putative; protein At1g54790.1, supported by cDNA: 122943. [Arabidopsis thaliana]
  misc_feature (1)..(215): Homolog of NCBI NO: 21537184 NR Description: early nodule-specific protein, putative
  misc_feature (1)..(215): Homolog of NCBI NO: 25405771 NR Description: hypothetical protein T22H22.20 [imported] - thaliana >gi|3776573|gb|AAC64890.1| Similar to nodulins and homolog F14J9.5 gi|3482914 from Arabidopsis thaliana BAC
  misc_feature (88)..(216): Homolog of NCBI NO: 15228721 NR Description: putative protein; protein id: At3g62280.1
MINLGQRPPIDREGFRKAIYTIDIGQNDVSAYMHLPYDQVLAKIPGFVAQIKYTIETLYSHGARKFWIHGTGALGCLPQKLAIPRDADDGDQLDAHGCLKTYNNAAKRFNALLGDACAQLRRRMVDAALVFVDMYAVKYDLVANHTTHGIEKPLMACCGYGGPPYNYNHFKACMSAEMQLCDVGTRFISWDGVHFTEAANAIVAAKVLTGDYSTPRVTIAKLVNSTLPNDD

SEQ ID NO: 13607 - DNA, 1472 bp, Zea mays subsp. mays
  misc_feature (1)..(1472): Ceres Seq. ID no. 12374378
  misc_feature: MA Experiment ID: 108504 Result: Down-regulated in Transcription
  misc_feature: MA Experiment 108504 PARAMETER Experiment Name: Zm_Drought_P Parameter: Age (day) Value: 8
  misc_feature: MA Experiment 108504 PARAMETER Experiment Name: Zm_Drought_P Parameter: Organism Value: Zea mays
  misc_feature: MA Experiment 108504 PARAMETER Experiment Name: Zm_Drought_P Parameter: Plant Line Value: 35A19
  misc_feature: MA Experiment 108504 PARAMETER Experiment Name: Zm_Drought_P Parameter: Timepoint (hr) Value: 12
  misc_feature: MA Experiment 108504 PARAMETER Experiment Name: Zm_Drought_P Parameter: Tissue Value: Aerial
  misc_feature: MA Experiment 108504 PARAMETER Experiment Name: Zm_Drought_P Parameter: Treatment Value: Drought vs. No Drought
  misc_feature: MA Experiment ID: 108523 Result: Down-regulated in Transcription
  misc_feature: MA Experiment 108523 PARAMETER Experiment Name: Zm_42deg_Heat_P Parameter: Age (day) Value: 8
  misc_feature: MA Experiment 108523 PARAMETER Experiment Name: Zm_42deg_Heat_P Parameter: Organism Value: Zea mays
  misc_feature: MA Experiment 108523 PARAMETER Experiment Name: Zm_42deg_Heat_P Parameter: Plant Line Value: 35A19
  misc_feature: MA Experiment 108523 PARAMETER Experiment Name: Zm_42deg_Heat_P Parameter: Temperature (deg C) Value: 42 vs. 22
  misc_feature: MA Experiment 108523 PARAMETER Experiment Name: Zm_42deg_Heat_P Parameter: Timepoint (hr) Value: 6
  misc_feature: MA Experiment 108523 PARAMETER Experiment Name: Zm_42deg_Heat_P Parameter: Tissue Value: Aerial
  misc_feature: MA Experiment ID: 108528 Result: Up-regulated in Transcription
  misc_feature: MA Experiment 108528 PARAMETER Experiment Name: Zm_Imbibed_Seeds_P Parameter: Age (day) Value: 5 vs. 2
  misc_feature: MA Experiment 108528 PARAMETER Experiment Name: Zm_Imbibed_Seeds_P Parameter: Organism Value: Zea mays
  misc_feature: MA Experiment 108528 PARAMETER Experiment Name: Zm_Imbibed_Seeds_P Parameter: Plant Line Value: 35A19
  misc_feature: MA Experiment 108528 PARAMETER Experiment Name: Zm_Imbibed_Seeds_P Parameter: Tissue Value: Aerial vs. Embryo
  misc_feature: MA Experiment ID: 108529 Result: Down-regulated in Transcription
  misc_feature: MA Experiment 108529 PARAMETER Experiment Name: Zm_Imbibed_Seeds_P Parameter: Age (day) Value: 5 vs. 2
  misc_feature: MA Experiment 108529 PARAMETER Experiment Name: Zm_Imbibed_Seeds_P Parameter: Organism Value: Zea mays
  misc_feature: MA Experiment 108529 PARAMETER Experiment Name: Zm_Imbibed_Seeds_P Parameter: Plant Line Value: 35A19
  misc_feature: MA Experiment 108529 PARAMETER Experiment Name: Zm_Imbibed_Seeds_P Parameter: Tissue Value: Roots vs. Embryo
  misc_feature: MA Experiment ID: 108535 Result: Up-regulated in Transcription
  misc_feature: MA Experiment 108535 PARAMETER Experiment Name: Zm_Meristem_P Parameter: Age (day) Value: 8
  misc_feature: MA Experiment 108535 PARAMETER Experiment Name: Zm_Meristem_P Parameter: Organism Value: Zea mays
  misc_feature: MA Experiment 108535 PARAMETER Experiment Name: Zm_Meristem_P Parameter: Plant Line Value: 35A19
  misc_feature: MA Experiment 108535 PARAMETER Experiment Name: Zm_Meristem_P Parameter: Tissue Value: Root Meristem vs. Above Root Meristem
  misc_feature: MA Experiment ID: 108536 Result: Down-regulated in Transcription
  misc_feature: MA Experiment 108536 PARAMETER Experiment Name: Zm_Meristem_P Parameter: Age (day) Value: 8
  misc_feature: MA Experiment 108536 PARAMETER Experiment Name: Zm_Meristem_P Parameter: Organism Value: Zea mays
  misc_feature: MA Experiment 108536 PARAMETER Experiment Name: Zm_Meristem_P Parameter: Plant Line Value: 35A19
  misc_feature: MA Experiment 108536 PARAMETER Experiment Name: Zm_Meristem_P Parameter: Tissue Value: Shoot Meristem vs. Above Shoot Meristem
  misc_feature: MA Experiment ID: 108543 Result: Up-regulated in Transcription
  misc_feature: MA Experiment ID: 108544 Result: Up-regulated in Transcription
  misc_feature: MA Experiment ID: 108545 Result: Up-regulated in Transcription
  misc_feature: MA Experiment 108545 PARAMETER Experiment Name: Zm_Imbibed_Seeds_P Parameter: Age (day) Value: 3 vs. 2
  misc_feature: MA Experiment 108545 PARAMETER Experiment Name: Zm_Imbibed_Seeds_P Parameter: Organism Value: Zea mays
  misc_feature: MA Experiment 108545 PARAMETER Experiment Name: Zm_Imbibed_Seeds_P Parameter: Plant Line Value: 35A19
  misc_feature: MA Experiment 108545 PARAMETER Experiment Name: Zm_Imbibed_Seeds_P Parameter: Tissue Value: Aerial vs. Embryo
  misc_feature: MA Experiment ID: 108546 Result: Down-regulated in Transcription
  misc_feature: MA Experiment 108546 PARAMETER Experiment Name: Zm_Imbibed_Seeds_P Parameter: Age (day) Value: 3 vs. 2
  misc_feature: MA Experiment 108546 PARAMETER Experiment Name: Zm_Imbibed_Seeds_P Parameter: Organism Value: Zea mays
  misc_feature: MA Experiment 108546 PARAMETER Experiment Name: Zm_Imbibed_Seeds_P Parameter: Plant Line Value: 35A19
  misc_feature: MA Experiment 108546 PARAMETER Experiment Name: Zm_Imbibed_Seeds_P Parameter: Tissue Value: Roots vs. Embryo
  misc_feature: MA Experiment ID: 108547 Result: Up-regulated in Transcription
  misc_feature: MA Experiment 108547 PARAMETER Experiment Name: Zm_Imbibed_Seeds_P Parameter: Age (day) Value: 4 vs. 2
  misc_feature: MA Experiment 108547 PARAMETER Experiment Name: Zm_Imbibed_Seeds_P Parameter: Organism Value: Zea mays
  misc_feature: MA Experiment 108547 PARAMETER Experiment Name: Zm_Imbibed_Seeds_P Parameter: Plant Line Value: 35A19
  misc_feature: MA Experiment 108547 PARAMETER Experiment Name: Zm_Imbibed_Seeds_P Parameter: Tissue Value: Aerial vs. Embryo
  misc_feature: MA Experiment ID: 108556 Result: Down-regulated in Transcription
  misc_feature: MA Experiment 108556 PARAMETER Experiment Name: Zm_Drought_P Parameter: Age (day) Value: 9
  misc_feature: MA Experiment 108556 PARAMETER Experiment Name: Zm_Drought_P Parameter: Organism Value: Zea mays
  misc_feature: MA Experiment 108556 PARAMETER Experiment Name: Zm_Drought_P Parameter: Plant Line Value: 35A19
  misc_feature: MA Experiment 108556 PARAMETER Experiment Name: Zm_Drought_P Parameter: Timepoint (hr) Value: 24
  misc_feature: MA Experiment 108556 PARAMETER Experiment Name: Zm_Drought_P Parameter: Tissue Value: Aerial
  misc_feature: MA Experiment 108556 PARAMETER Experiment Name: Zm_Drought_P Parameter: Treatment Value: Drought vs. No Drought
  misc_feature: MA Experiment ID: 108597 Result: Down-regulated in Transcription
  misc_feature: MA Experiment 108597 PARAMETER Experiment Name: Zm_100uM_ABA_P Parameter: Age (day) Value: 9
  misc_feature: MA Experiment 108597 PARAMETER Experiment Name: Zm_100uM_ABA_P Parameter: Organism Value: Zea mays
  misc_feature: MA Experiment 108597 PARAMETER Experiment Name: Zm_100uM_ABA_P Parameter: Plant Line Value: 35A19
  misc_feature: MA Experiment 108597 PARAMETER Experiment Name: Zm_100uM_ABA_P Parameter: Timepoint (hr) Value: 24
  misc_feature: MA Experiment 108597 PARAMETER Experiment Name: Zm_100uM_ABA_P Parameter: Tissue Value: Aerial
  misc_feature: MA Experiment 108597 PARAMETER Experiment Name: Zm_100uM_ABA_P Parameter: Treatment Value: 100uM ABA vs. No Treatment
  misc_feature: MA Experiment ID: 108688 Result: Down-regulated in Transcription
  misc_feature: MA Experiment 108688 PARAMETER Experiment Name: Zm_Embryos-Flowers__P Parameter: Tissue Value: Immature Flowers vs. Aerial+
  misc_feature: MA Experiment ID: 108689 Result: Down-regulated in Transcription
  misc_feature: MA Experiment 108689 PARAMETER Experiment Name: Zm_Drought_Roots_P Parameter: Age (day) Value: 9
  misc_feature: MA Experiment 108689 PARAMETER Experiment Name: Zm_Drought_Roots_P Parameter: Organism Value: Zea mays
  misc_feature: MA Experiment 108689 PARAMETER Experiment Name: Zm_Drought_Roots_P Parameter: Plant Line Value: 35A19
  misc_feature: MA Experiment 108689 PARAMETER Experiment Name: Zm_Drought_Roots_P Parameter: Timepoint (hr) Value: 24
  misc_feature: MA Experiment 108689 PARAMETER Experiment Name: Zm_Drought_Roots_P Parameter: Tissue Value: Roots
  misc_feature: MA Experiment 108689 PARAMETER Experiment Name: Zm_Drought_Roots_P Parameter: Treatment Value: Drought vs. No Drought
  misc_feature: MA Experiment ID: 20000477 Result: Down-regulated in Transcription
  misc_feature: MA Experiment 20000477 PARAMETER Experiment Name: Zm_5mM_SA_P Parameter: Age (day) Value: 10
  misc_feature: MA Experiment 20000477 PARAMETER Experiment Name: Zm_5mM_SA_P Parameter: Organism Value: Zea mays
  misc_feature: MA Experiment 20000477 PARAMETER Experiment Name: Zm_5mM_SA_P Parameter: Plant Line Value: 35A19
  misc_feature: MA Experiment 20000477 PARAMETER Experiment Name: Zm_5mM_SA_P Parameter: Timepoint (hr) Value: 48
  misc_feature: MA Experiment 20000477 PARAMETER Experiment Name: Zm_5mM_SA_P Parameter: Tissue Value: Aerial
  misc_feature: MA Experiment 20000477 PARAMETER Experiment Name: Zm_5mM_SA_P Parameter: Treatment Value: 5mM SA vs. No Treatment
  misc_feature: MA Experiment ID: 20000478 Result: Down-regulated in Transcription
  misc_feature: MA Experiment 20000478 PARAMETER Experiment Name: Zm_5mM_SA_P Parameter: Age (day) Value: 11
  misc_feature: MA Experiment 20000478 PARAMETER Experiment Name: Zm_5mM_SA_P Parameter: Organism Value: Zea mays
  misc_feature: MA Experiment 20000478 PARAMETER Experiment Name: Zm_5mM_SA_P Parameter: Plant Line Value: 35A19
  misc_feature: MA Experiment 20000478 PARAMETER Experiment Name: Zm_5mM_SA_P Parameter: Timepoint (hr) Value: 72
  misc_feature: MA Experiment 20000478 PARAMETER Experiment Name: Zm_5mM_SA_P Parameter: Tissue Value: Aerial
  misc_feature: MA Experiment 20000478 PARAMETER Experiment Name: Zm_5mM_SA_P Parameter: Treatment Value: 5mM SA vs. No Treatment
  misc_feature: MA Experiment ID: 20000479 Result: Down-regulated in Transcription
  misc_feature: MA Experiment 20000479 PARAMETER Experiment Name: Zm_Drought_P Parameter: Age (day) Value: 10
  misc_feature: MA Experiment 20000479 PARAMETER Experiment Name: Zm_Drought_P Parameter: Organism Value: Zea mays
  misc_feature: MA Experiment 20000479 PARAMETER Experiment Name: Zm_Drought_P Parameter: Plant Line Value: 35A19
  misc_feature: MA Experiment 20000479 PARAMETER Experiment Name: Zm_Drought_P Parameter: Timepoint (hr) Value: 48
  misc_feature: MA Experiment 20000479 PARAMETER Experiment Name: Zm_Drought_P Parameter: Tissue Value: Aerial
  misc_feature: MA Experiment 20000479 PARAMETER Experiment Name: Zm_Drought_P Parameter: Treatment Value: Drought vs. No Drought
  misc_feature: MA Experiment ID: 20000480 Result: Down-regulated in Transcription
  misc_feature: MA Experiment 20000480 PARAMETER Experiment Name: Zm_Drought_P Parameter: Age (day) Value: 11
  misc_feature: MA Experiment 20000480 PARAMETER Experiment Name: Zm_Drought_P Parameter: Organism Value: Zea mays
  misc_feature: MA Experiment 20000480 PARAMETER Experiment Name: Zm_Drought_P Parameter: Plant Line Value: 35A19
  misc_feature: MA Experiment 20000480 PARAMETER Experiment Name: Zm_Drought_P Parameter: Timepoint (hr) Value: 72
  misc_feature: MA Experiment 20000480 PARAMETER Experiment Name: Zm_Drought_P Parameter: Tissue Value: Aerial
  misc_feature: MA Experiment 20000480 PARAMETER Experiment Name: Zm_Drought_P Parameter: Treatment Value: Drought vs. No Drought
  misc_feature: MA Experiment ID: 20000487 Result: Down-regulated in Transcription
  misc_feature: MA Experiment 20000487 PARAMETER Experiment Name: Zm_50mM_NH4NO3_L_to_H_P Parameter: Organism Value: Zea mays
  misc_feature: MA Experiment 20000487 PARAMETER Experiment Name: Zm_50mM_NH4NO3_L_to_H_P Parameter: Timepoint (hr) Value: 4
  misc_feature: MA Experiment 20000487 PARAMETER Experiment Name: Zm_50mM_NH4NO3_L_to_H_P Parameter: Tissue Value: Leaves
  misc_feature: MA Experiment 20000487 PARAMETER Experiment Name: Zm_50mM_NH4NO3_L_to_H_P Parameter: Treatment Value: 50mM NH4NO3 vs. 100mM Mannitol
  misc_feature: MA Experiment ID: 20000492 Result: Up-regulated in Transcription
  misc_feature: MA Experiment 20000492 PARAMETER Experiment Name: Zm_Hybrid_Seed_Dev_P Parameter: DAP Value: 12
  misc_feature: MA Experiment 20000492 PARAMETER Experiment Name: Zm_Hybrid_Seed_Dev_P Parameter: Organism Value: Zea mays
  misc_feature: MA Experiment 20000492 PARAMETER Experiment Name: Zm_Hybrid_Seed_Dev_P Parameter: Plant Line Value: 35A19
  misc_feature: MA Experiment 20000492 PARAMETER Experiment Name: Zm_Hybrid_Seed_Dev_P Parameter: Tissue Value: Fert Kernel vs. Unfert Floret
  misc_feature: MA Experiment ID: 20000535 Result: Down-regulated in Transcription
  misc_feature: MA Experiment 20000535 PARAMETER Experiment Name: Zm_Hybrid_Seed_Dev_P Parameter: DAP Value: 30 vs. 12
  misc_feature: MA Experiment 20000535 PARAMETER Experiment Name: Zm_Hybrid_Seed_Dev_P Parameter: Organism Value: Zea mays
  misc_feature: MA Experiment 20000535 PARAMETER Experiment Name: Zm_Hybrid_Seed_Dev_P Parameter: Plant Line Value: 35A19
  misc_feature: MA Experiment 20000535 PARAMETER Experiment Name: Zm_Hybrid_Seed_Dev_P Parameter: Tissue Value: Embryo vs. Unfert Floret
  misc_feature: MA Experiment ID: 20000626 Result: Down-regulated in Transcription
  misc_feature: MA Experiment 20000626 PARAMETER Experiment Name: Zm_Herbicide-Treatments_P Parameter: Timepoint (hr) Value: 12
  misc_feature: MA Experiment 20000626 PARAMETER Experiment Name: Zm_Herbicide-Treatments_P Parameter: Tissue Value: Aerial
  misc_feature: MA Experiment 20000626 PARAMETER Experiment Name: Zm_Herbicide-Treatments_P Parameter: Treatment Value: Roundup vs. No Treatment
  misc_feature: MA Experiment ID: 20000628 Result: Down-regulated in Transcription
  misc_feature: MA Experiment 20000628 PARAMETER Experiment Name: Zm_Herbicide-Treatments_P Parameter: Timepoint (hr) Value: 12
  misc_feature: MA Experiment 20000628 PARAMETER Experiment Name: Zm_Herbicide-Treatments_P Parameter: Tissue Value: Aerial
  misc_feature: MA Experiment 20000628 PARAMETER Experiment Name: Zm_Herbicide-Treatments_P Parameter: Treatment Value: Glean vs. No Treatment
  misc_feature: MA Experiment ID: 20000629 Result: Down-regulated in Transcription
  misc_feature: MA Experiment 20000629 PARAMETER Experiment Name: Zm_Herbicide-Treatments_P Parameter: Timepoint (hr) Value: 12
  misc_feature: MA Experiment 20000629 PARAMETER Experiment Name: Zm_Herbicide-Treatments_P Parameter: Tissue Value: Aerial
  misc_feature: MA Experiment 20000629 PARAMETER Experiment Name: Zm_Herbicide-Treatments_P Parameter: Treatment Value: Trimec vs. No Treatment
  misc_feature: MA Experiment ID: 20000632 Result: Down-regulated in Transcription
  misc_feature: MA Experiment 20000632 PARAMETER Experiment Name: Zm_Herbicide-Treatments_P Parameter: Timepoint (hr) Value: 4
  misc_feature: MA Experiment 20000632 PARAMETER Experiment Name: Zm_Herbicide-Treatments_P Parameter: Tissue Value: Aerial
  misc_feature: MA Experiment 20000632 PARAMETER Experiment Name: Zm_Herbicide-Treatments_P Parameter: Treatment Value: Glean vs. No Treatment
gcacgagaccattacctagaacatcctaatcgaaaagtacttggcaatcctctctagctagctcagcatccgaggacgggacttgcattgcactatggatgctgctcttatgcctctgctcgtcgtctccctcgtcttctgcctgctggcggcttccccggcggcgtccgcggcgcgggccttcttcgtcttcggcgactccctcgtcgacaatggcaacaacaactacctgctgaccacggcgcgcgccgacgcgcccccctacggcatcgacttccccacgcaccaagccacgggccgcttctccaacgggctcaacatccccgacatcatcagcgagcacctcggggccgaacctgcgctgccgtacctgagccccgagctccgaggggagaagctgctcgtcggcgccaacttcgcgtcggccggcgtcgggatcctcaacgacacaggaatacaatttgtgaacattatcaggatcggcgaccagctgcagtacttccgggagtaccagcggaagctgcgagccctcgtcggcgagccgcaggcgacgcagctcgtgaaccaggccctcgtgctcatcacgctcggcggcaacgacttcgtgaacaactactacctggtgcccatgtccgtgcggtcgcgccagtacgcgctcccggactatgtccgcttcatcgtctccgagtacaggaagatcctctcgaggctgtacgagctgggcgcgcggcgcgtgatcgtgacggggacggggccgctggggtgcgtcccggccgagctggcgctgcacagccagaacggcgagtgcgcggcggagctgacgcgcgccgtgaacctcttcaacccgcagatggtggacatggtgcgcggcctcaaccgcgccatcggcaccgacntcttngtcgccgccaaccacctaccgcatgaacttcgagctacctcgcaaacccgcangacttcggggttcacgaacgtgcangtggcgtgctgcggccagggcccgtacaacggggatcgggctgtgcacggcggcgtcgaacgtgtgcgacaaccgcgacgtgttcgcgttctgggacgcgttccaccccacggagagggcaaaccgcatcatcgtcgcccagttcatgcacggcgacacggactacatgcaccccatgaacctcagcaccatcctcgccatggaccaggagggcctctagactatagcttgatcagccggacacgattatacgtacatgcgtgatgtgtctcacgtgcctagcacgttagtcatgttttggatgatggcagcccaatttgccaataatattcgtgcctcgatccaagtttcactaatgtgtcactcacgccttaaaaagaattagtgactggctatggttaatcgatccgtgttatatgtgctccgcgagcattcgtttgttggtggtgttggttcgttgtcaagcgaaatggccatttgcagccgtggcgtc

SEQ ID NO: 13608 - protein, 382 aa, Zea mays subsp. mays
  peptide (1)..(382): Ceres Seq. ID no. 12374379
  misc_feature (30)..(306): Pfam Name: GDSL-like Lipase/Acylhydrolase Pfam Description: GDSL-like Lipase/Acylhydrolase
  misc_feature (1)..(306): Homolog of NCBI NO: 15229265 NR Description: putative GDSL-motif lipase/acylhydrolase; protein
  misc_feature (13)..(306): Homolog of NCBI NO: 15242808 NR Description: putative protein; protein id: At5g33370.1,
  misc_feature (10)..(306): Homolog of NCBI NO: 28071322 NR Description: P0705A05.30 [Oryza sativa (japonica
  misc_feature (8)..(306): Homolog of NCBI NO: 15235421 NR Description: Proline-rich APG - like protein; protein id:
  misc_feature (11)..(306): Homolog of NCBI NO: 15238814 NR Description: putative protein; protein id: At5g18430.1
  misc_feature (1)..(306): Homolog of NCBI NO: 37535146 NR Description: putative early nodulin gene (Enod) related
  misc_feature (8)..(306): Homolog of NCBI NO: 22758315 NR Description: putative early nodulin gene (Enod) related
  misc_feature (14)..(189): Homolog of NCBI NO: 37789825 NR Description: putative GDSL-motif lipase [Vitis vinifera]
  misc_feature (29)..(306): Homolog of NCBI NO: 15227849 NR Description: putative GDSL-motif lipase/hydrolase; protein id:
  misc_feature (6)..(306): Homolog of NCBI NO: 34909504 NR Description: putative GDSL-motif lipase/hydrolase-like protein
  misc_feature (268)..(268): Xaa is any aa, unknown or other
  misc_feature (269)..(269): Xaa is any aa, unknown or other
  misc_feature (287)..(287): Xaa is any aa, unknown or other
  misc_feature (295)..(295): Xaa is any aa, unknown or other
MDAALMPLLVVSLVFCLLAASPAASAARAFFVFGDSLVDNGNNNYLLTTARADAPPYGIDFPTHQATGRFSNGLNIPDIISEHLGAEPALPYLSPELRGEKLLVGANFASAGVGILNDTGIQFVNIIRIGDQLQYFREYQRKLRALVGEPQATQLVNQALVLITLGGNDFVNNYYLVPMSVRSRQYALPDYVRFIVSEYRKILSRLYELGARRVIVTGTGPLGCVPAELALHSQNGECAAELTRAVNLFNPQMVDMVRGLNRAIGTDXXVAANHLPHELRATSQTRXTSGFTNVXVACCGQGPYNGDRAVHGGVERVRQPRRVRVLGRVPPHGEGKPHHRRPVHARRHGLHAPHEPQHHPRHGPGGPLDYSLISRTRLYVHA

SEQ ID NO: 13609 - protein, 377 aa, Zea mays subsp. mays
  peptide (1)..(377): Ceres Seq. ID no. 12374380
  misc_feature (25)..(301): Pfam Name: GDSL-like Lipase/Acylhydrolase Pfam Description: GDSL-like Lipase/Acylhydrolase
  misc_feature (1)..(301): Homolog of NCBI NO: 15229265 NR Description: putative GDSL-motif lipase/acylhydrolase; protein
  misc_feature (8)..(301): Homolog of NCBI NO: 15242808 NR Description: putative protein; protein id: At5g33370.1,
  misc_feature (5)..(301): Homolog of NCBI NO: 28071322 NR Description: P0705A05.30 [Oryza sativa (japonica
  misc_feature (3)..(301): Homolog of NCBI NO: 15235421 NR Description: Proline-rich APG - like protein; protein id:
  misc_feature (6)..(301): Homolog of NCBI NO: 15238814 NR Description: putative protein; protein id: At5g18430.1
  misc_feature (1)..(301): Homolog of NCBI NO: 37535146 NR Description: putative early nodulin gene (Enod) related
  misc_feature (3)..(301): Homolog of NCBI NO: 22758315 NR Description: putative early nodulin gene (Enod) related
  misc_feature (9)..(184): Homolog of NCBI NO: 37789825 NR Description: putative GDSL-motif lipase [Vitis vinifera]
  misc_feature (24)..(301): Homolog of NCBI NO: 15227849 NR Description: putative GDSL-motif lipase/hydrolase; protein id:
  misc_feature (1)..(301): Homolog of NCBI NO: 34909504 NR Description: putative GDSL-motif lipase/hydrolase-like protein
  misc_feature (263)..(263): Xaa is any aa, unknown or other
  misc_feature (264)..(264): Xaa is any aa, unknown or other
  misc_feature (282)..(282): Xaa is any aa, unknown or other
  misc_feature (290)..(290): Xaa is any aa, unknown or other
MPLLVVSLVFCLLAASPAASAARAFFVFGDSLVDNGNNNYLLTTARADAPPYGIDFPTHQATGRFSNGLNIPDIISEHLGAEPALPYLSPELRGEKLLVGANFASAGVGILNDTGIQFVNIIRIGDQLQYFREYQRKLRALVGEPQATQLVNQALVLITLGGNDFVNNYYLVPMSVRSRQYALPDYVRFIVSEYRKILSRLYELGARRVIVTGTGPLGCVPAELALHSQNGECAAELTRAVNLFNPQMVDMVRGLNRAIGTDXXVAANHLPHELRATSQTRXTSGFTNVXVACCGQGPYNGDRAVHGGVERVRQPRRVRVLGRVPPHGEGKPHHRRPVHARRHGLHAPHEPQHHPRHGPGGPLDYSLISRTRLYVHA

SEQ ID NO: 13610 - protein, 204 aa, Zea mays subsp. mays
  peptide (1)..(204): Ceres Seq. ID no. 12374381
  misc_feature (1)..(128): Pfam Name: GDSL-like Lipase/Acylhydrolase Pfam Description: GDSL-like Lipase/Acylhydrolase
  misc_feature (1)..(128): Homolog of NCBI NO: 15229265 NR Description: putative GDSL-motif lipase/acylhydrolase; protein
  misc_feature (1)..(128): Homolog of NCBI NO: 15242808 NR Description: putative protein; protein id: At5g33370.1,
  misc_feature (1)..(128): Homolog of NCBI NO: 28071322 NR Description: P0705A05.30 [Oryza sativa (japonica
  misc_feature (1)..(128): Homolog of NCBI NO: 15235421 NR Description: Proline-rich APG - like protein; protein id:
  misc_feature (1)..(128): Homolog of NCBI NO: 15238814 NR Description: putative protein; protein id: At5g18430.1
  misc_feature (1)..(128): Homolog of NCBI NO: 37535146 NR Description: putative early nodulin gene (Enod) related
  misc_feature (1)..(128): Homolog of NCBI NO: 22758315 NR Description: putative early nodulin gene (Enod) related
  misc_feature (1)..(11): Homolog of NCBI NO: 37789825 NR Description: putative GDSL-motif lipase [Vitis vinifera]
  misc_feature (1)..(128): Homolog of NCBI NO: 15227849 NR Description: putative GDSL-motif lipase/hydrolase; protein id:
  misc_feature (1)..(128): Homolog of NCBI NO: 34909504 NR Description: putative GDSL-motif lipase/hydrolase-like protein
  misc_feature (90)..(90): Xaa is any aa, unknown or other
  misc_feature (91)..(91): Xaa is any aa, unknown or other
  misc_feature (109)..(109): Xaa is any aa, unknown or other
  misc_feature (117)..(117): Xaa is any aa, unknown or other
MSVRSRQYALPDYVRFIVSEYRKILSRLYELGARRVIVTGTGPLGCVPAELALHSQNGECAAELTRAVNLFNPQMVDMVRGLNRAIGTDXXVAANHLPHELRATSQTRXTSGFTNVXVACCGQGPYNGDRAVHGGVERVRQPRRVRVLGRVPPHGEGKPHHRRPVHARRHGLHAPHEPQHHPRHGPGGPLDYSLISRTRLYVHA

SEQ ID NO: 13611 - DNA, 1446 bp, Zea mays subsp. mays; identical to SEQ ID NO: 10675
  misc_feature (1)..(1446): Ceres Seq. ID no. 13569613
  misc_feature: MA Experiment ID: 108504 Result: Up-regulated in Transcription
  misc_feature: MA Experiment 108504 PARAMETER Experiment Name: Zm_Drought_P Parameter: Age (day) Value: 8
  misc_feature: MA Experiment 108504 PARAMETER Experiment Name: Zm_Drought_P Parameter: Organism Value: Zea mays
  misc_feature: MA Experiment 108504 PARAMETER Experiment Name: Zm_Drought_P Parameter: Plant Line Value: 35A19
  misc_feature: MA Experiment 108504 PARAMETER Experiment Name: Zm_Drought_P Parameter: Timepoint (hr) Value: 12
  misc_feature: MA Experiment 108504 PARAMETER Experiment Name: Zm_Drought_P Parameter: Tissue Value: Aerial
  misc_feature: MA Experiment 108504 PARAMETER Experiment Name: Zm_Drought_P Parameter: Treatment Value: Drought vs. No Drought
  misc_feature: MA Experiment ID: 108527 Result: Down-regulated in Transcription
  misc_feature: MA Experiment 108527 PARAMETER Experiment Name: Zm_5mM_NO_P Parameter: Age (day) Value: 8
  misc_feature: MA Experiment 108527 PARAMETER Experiment Name: Zm_5mM_NO_P Parameter: Organism Value: Zea mays
  misc_feature: MA Experiment 108527 PARAMETER Experiment Name: Zm_5mM_NO_P Parameter: Plant Line Value: 35A19
  misc_feature: MA Experiment 108527 PARAMETER Experiment Name: Zm_5mM_NO_P Parameter: Timepoint (hr) Value: 6
  misc_feature: MA Experiment 108527 PARAMETER Experiment Name: Zm_5mM_NO_P Parameter: Tissue Value: Aerial
  misc_feature: MA Experiment 108527 PARAMETER Experiment Name: Zm_5mM_NO_P Parameter: Treatment Value: 5mM NO vs. No Treatment
  misc_feature: MA Experiment ID: 108529 Result: Up-regulated in Transcription
  misc_feature: MA Experiment 108529 PARAMETER Experiment Name: Zm_Imbibed_Seeds_P Parameter: Age (day) Value: 5 vs. 2
  misc_feature: MA Experiment 108529 PARAMETER Experiment Name: Zm_Imbibed_Seeds_P Parameter: Organism Value: Zea mays
  misc_feature: MA Experiment 108529 PARAMETER Experiment Name: Zm_Imbibed_Seeds_P Parameter: Plant Line Value: 35A19
  misc_feature: MA Experiment 108529 PARAMETER Experiment Name: Zm_Imbibed_Seeds_P Parameter: Tissue Value: Roots vs. Embryo
  misc_feature: MA Experiment ID: 108535 Result: Down-regulated in Transcription
  misc_feature: MA Experiment 108535 PARAMETER Experiment Name: Zm_Meristem_P Parameter: Age (day) Value: 8
  misc_feature: MA Experiment 108535 PARAMETER Experiment Name: Zm_Meristem_P Parameter: Organism Value: Zea mays
  misc_feature: MA Experiment 108535 PARAMETER Experiment Name: Zm_Meristem_P Parameter: Plant Line Value: 35A19
  misc_feature: MA Experiment 108535 PARAMETER Experiment Name: Zm_Meristem_P Parameter: Tissue Value: Root Meristem vs. Above Root Meristem
  misc_feature: MA Experiment ID: 108543 Result: Up-regulated in Transcription
  misc_feature: MA Experiment ID: 108597 Result: Up-regulated in Transcription
  misc_feature: MA Experiment 108597 PARAMETER Experiment Name: Zm_100uM_ABA_P Parameter: Age (day) Value: 9
  misc_feature: MA Experiment 108597 PARAMETER Experiment Name: Zm_100uM_ABA_P Parameter: Organism Value: Zea mays
  misc_feature: MA Experiment 108597 PARAMETER Experiment Name: Zm_100uM_ABA_P Parameter: Plant Line Value: 35A19
  misc_feature: MA Experiment 108597 PARAMETER Experiment Name: Zm_100uM_ABA_P Parameter: Timepoint (hr) Value: 24
  misc_feature: MA Experiment 108597 PARAMETER Experiment Name: Zm_100uM_ABA_P Parameter: Tissue Value: Aerial
  misc_feature: MA Experiment 108597 PARAMETER Experiment Name: Zm_100uM_ABA_P Parameter: Treatment Value: 100uM ABA vs. No Treatment
  misc_feature: MA Experiment ID: 108687 Result: Down-regulated in Transcription
  misc_feature: MA Experiment 108687 PARAMETER Experiment Name: Zm_Embryos-Flowers__P Parameter: Tissue Value: Embryo vs. Aerial+
  misc_feature: MA Experiment ID: 20000492 Result: Down-regulated in Transcription
  misc_feature: MA Experiment 20000492 PARAMETER Experiment Name: Zm_Hybrid_Seed_Dev_P Parameter: DAP Value: 12
  misc_feature: MA Experiment 20000492 PARAMETER Experiment Name: Zm_Hybrid_Seed_Dev_P Parameter: Organism Value: Zea mays
  misc_feature: MA Experiment 20000492 PARAMETER Experiment Name: Zm_Hybrid_Seed_Dev_P Parameter: Plant Line Value: 35A19
  misc_feature: MA Experiment 20000492 PARAMETER Experiment Name: Zm_Hybrid_Seed_Dev_P Parameter: Tissue Value: Fert Kernel vs. Unfert Floret
  misc_feature: MA Experiment ID: 20000534 Result: Down-regulated in Transcription
  misc_feature: MA Experiment 20000534 PARAMETER Experiment Name: Zm_Hybrid_Pollen_P Parameter: Age (day) Value: 8
  misc_feature: MA Experiment 20000534 PARAMETER Experiment Name: Zm_Hybrid_Pollen_P Parameter: Organism Value: Zea mays
  misc_feature: MA Experiment 20000534 PARAMETER Experiment Name: Zm_Hybrid_Pollen_P Parameter: Plant Line Value: 35A19
  misc_feature: MA Experiment 20000534 PARAMETER Experiment Name: Zm_Hybrid_Pollen_P Parameter: Tissue Value: Pollen vs. Aerial
  misc_feature: MA Experiment ID: 20000535 Result: Down-regulated in Transcription
  misc_feature: MA Experiment 20000535 PARAMETER Experiment Name: Zm_Hybrid_Seed_Dev_P Parameter: DAP Value: 30 vs. 12
  misc_feature: MA Experiment 20000535 PARAMETER Experiment Name: Zm_Hybrid_Seed_Dev_P Parameter: Organism Value: Zea mays
  misc_feature: MA Experiment 20000535 PARAMETER Experiment Name: Zm_Hybrid_Seed_Dev_P Parameter: Plant Line Value: 35A19
  misc_feature: MA Experiment 20000535 PARAMETER Experiment Name: Zm_Hybrid_Seed_Dev_P Parameter: Tissue Value: Embryo vs. Unfert Floret

SEQ ID NO: 13612 - protein, 439 aa, Zea mays subsp. mays; identical to SEQ ID NO: 10676
  peptide (1)..(439): Ceres Seq. ID no. 13569614
  misc_feature (80)..(216): Pfam Name: GDSL-like Lipase/Acylhydrolase Pfam Description: GDSL-like Lipase/Acylhydrolase
  misc_feature (80)..(216): Pfam Name: GDSL-like Lipase/Acylhydrolase Pfam Description: GDSL-like Lipase/Acylhydrolase
  misc_feature (204)..(439): Homolog of NCBI NO: 34911804 NR Description: lipase-like protein [Oryza sativa (japonica
  misc_feature (60)..(216): Homolog of NCBI NO: 34911804 NR Description: lipase-like protein [Oryza sativa (japonica
  misc_feature (46)..(439): Homolog of NCBI NO: 34911800 NR Description: lipase-like protein [Oryza sativa (japonica
  misc_feature (60)..(413): Homolog of NCBI NO: 10764858 NR Description: F1K23.17 [Arabidopsis thaliana]
  misc_feature (60)..(413): Homolog of NCBI NO: 15218731 NR Description: lipase, putative [Arabidopsis thaliana] At1g28600/F1K23_6 [Arabidopsis thaliana]
  misc_feature (60)..(216): Homolog of NCBI NO: 34911804 NR Description: lipase-like protein [Oryza sativa (japonica
  misc_feature (60)..(413): Homolog of NCBI NO: 10764858 NR Description: F1K23.17 [Arabidopsis thaliana]
  misc_feature (53)..(413): Homolog of NCBI NO: 12322540 NR Description: unknown protein [Arabidopsis thaliana]
  misc_feature (62)..(413): Homolog of NCBI NO: 15225872 NR Description: lipase, putative [Arabidopsis thaliana]
  misc_feature (65)..(413): Homolog of NCBI NO: 15218728 NR Description: lipase, putative [Arabidopsis thaliana]
  misc_feature (65)..(413): Homolog of NCBI NO: 10764858 NR Description: F1K23.17 [Arabidopsis thaliana]
  misc_feature (60)..(413): Homolog of NCBI NO: 21593234 NR Description: lipase, putative [Arabidopsis thaliana]
  misc_feature (60)..(413): Homolog of NCBI NO: 15218731 NR Description: lipase, putative [Arabidopsis thaliana] At1g28600/F1K23_6 [Arabidopsis thaliana]
  misc_feature (46)..(439): Homolog of NCBI NO: 34911800 NR Description: lipase-like protein [Oryza sativa (japonica
  misc_feature (204)..(439): Homolog of NCBI NO: 34911804 NR Description: lipase-like protein [Oryza sativa (japonica
  misc_feature (60)..(413): Homolog of NCBI NO: 21593234 NR Description: lipase, putative [Arabidopsis thaliana]
  misc_feature (65)..(413): Homolog of NCBI NO: 10764858 NR Description: F1K23.17 [Arabidopsis thaliana]
  misc_feature (65)..(413): Homolog of NCBI NO: 15218728 NR Description: lipase, putative [Arabidopsis thaliana]
  misc_feature (62)..(413): Homolog of NCBI NO: 15225872 NR Description: lipase, putative [Arabidopsis thaliana]
  misc_feature (53)..(413): Homolog of NCBI NO: 12322540 NR Description: unknown protein [Arabidopsis thaliana]

SEQ ID NO: 13613 - protein, 399 aa, Zea mays subsp. mays; identical to SEQ ID NO: 10677
  peptide (1)..(399): Ceres Seq. ID no. 13569615
  misc_feature (40)..(176): Pfam Name: GDSL-like Lipase/Acylhydrolase Pfam Description: GDSL-like Lipase/Acylhydrolase
  misc_feature (40)..(176): Pfam Name: GDSL-like Lipase/Acylhydrolase Pfam Description: GDSL-like Lipase/Acylhydrolase
  misc_feature (164)..(399): Homolog of NCBI NO: 34911804 NR Description: lipase-like protein [Oryza sativa (japonica
  misc_feature (20)..(176): Homolog of NCBI NO: 34911804 NR Description: lipase-like protein [Oryza sativa (japonica
  misc_feature (6)..(399): Homolog of NCBI NO: 34911800 NR Description: lipase-like protein [Oryza sativa (japonica
  misc_feature (20)..(373): Homolog of NCBI NO: 10764858 NR Description: F1K23.17 [Arabidopsis thaliana]
  misc_feature (20)..(373): Homolog of NCBI NO: 15218731 NR Description: lipase, putative [Arabidopsis thaliana] At1g28600/F1K23_6 [Arabidopsis thaliana]
  misc_feature (20)..(176): Homolog of NCBI NO: 34911804 NR Description: lipase-like protein [Oryza sativa (japonica
  misc_feature (20)..(373): Homolog of NCBI NO: 10764858 NR Description: F1K23.17 [Arabidopsis thaliana]
  misc_feature (13)..(373): Homolog of NCBI NO: 12322540 NR Description: unknown protein [Arabidopsis thaliana]
  misc_feature (22)..(373): Homolog of NCBI NO: 15225872 NR Description: lipase, putative [Arabidopsis thaliana]
  misc_feature (25)..(373): Homolog of NCBI NO: 15218728 NR Description: lipase, putative [Arabidopsis thaliana]
  misc_feature (25)..(373): Homolog of NCBI NO: 10764858 NR Description: F1K23.17 [Arabidopsis thaliana]
  misc_feature (20)..(373): Homolog of NCBI NO: 21593234 NR Description: lipase, putative [Arabidopsis thaliana]
  misc_feature (20)..(373): Homolog of NCBI NO: 15218731 NR Description: lipase, putative [Arabidopsis thaliana] At1g28600/F1K23_6 [Arabidopsis thaliana]
  misc_feature (6)..(399): Homolog of NCBI NO: 34911800 NR Description: lipase-like protein [Oryza sativa (japonica
  misc_feature (164)..(399): Homolog of NCBI NO: 34911804 NR Description: lipase-like protein [Oryza sativa (japonica
  misc_feature (20)..(373): Homolog of NCBI NO: 21593234 NR Description: lipase, putative [Arabidopsis thaliana]
  misc_feature (25)..(373): Homolog of NCBI NO: 10764858 NR Description: F1K23.17 [Arabidopsis thaliana]
  misc_feature (25)..(373): Homolog of NCBI NO: 15218728 NR Description: lipase, putative [Arabidopsis thaliana]
  misc_feature (22)..(373): Homolog of NCBI NO: 15225872 NR Description: lipase, putative [Arabidopsis thaliana]
  misc_feature (13)..(373): Homolog of NCBI NO: 12322540 NR Description: unknown protein [Arabidopsis thaliana]

SEQ ID NO: 13614 - protein, 262 aa, Zea mays subsp. mays; identical to SEQ ID NO: 10678
  peptide (1)..(262): Ceres Seq. ID no. 13569616
  misc_feature (27)..(227): Pfam Name: GDSL-like Lipase/Acylhydrolase Pfam Description: GDSL-like Lipase/Acylhydrolase
  misc_feature (27)..(227): Pfam Name: GDSL-like Lipase/Acylhydrolase Pfam Description: GDSL-like Lipase/Acylhydrolase
  misc_feature (1)..(262): Homolog of NCBI NO: 34911800 NR Description: lipase-like protein [Oryza sativa (japonica
  misc_feature (1)..(236): Homolog of NCBI NO: 10764858 NR Description: F1K23.17 [Arabidopsis thaliana]
  misc_feature (1)..(236): Homolog of NCBI NO: 15218731 NR Description: lipase, putative [Arabidopsis thaliana] At1g28600/F1K23_6 [Arabidopsis thaliana]
  misc_feature (1)..(236): Homolog of NCBI NO: 21593234 NR Description: lipase, putative [Arabidopsis thaliana]
  misc_feature (27)..(262): Homolog of NCBI NO: 34911804 NR Description: lipase-like protein [Oryza sativa (japonica
  misc_feature (1)..(39): Homolog of NCBI NO: 34911804 NR Description: lipase-like protein [Oryza sativa (japonica
  misc_feature (1)..(236): Homolog of NCBI NO: 10764858 NR Description: F1K23.17 [Arabidopsis thaliana]
  misc_feature (1)..(236): Homolog of NCBI NO: 12322540 NR Description: unknown protein [Arabidopsis thaliana]
  misc_feature (1)..(236): Homolog of NCBI NO: 15225872 NR Description: lipase, putative [Arabidopsis thaliana]
  misc_feature (1)..(236): Homolog of NCBI NO: 15218728 NR Description: lipase, putative [Arabidopsis thaliana]
  misc_feature (1)..(236): Homolog of NCBI NO: 10764858 NR Description: F1K23.17 [Arabidopsis thaliana]
  misc_feature (1)..(236): Homolog of NCBI NO: 21593234 NR Description: lipase, putative [Arabidopsis thaliana]
  misc_feature (1)..(236): Homolog of NCBI NO: 15218731 NR Description: lipase, putative [Arabidopsis thaliana] At1g28600/F1K23_6 [Arabidopsis thaliana]
  misc_feature (1)..(262): Homolog of NCBI NO: 34911800 NR Description: lipase-like protein [Oryza sativa (japonica
  misc_feature (27)..(262): Homolog of NCBI NO: 34911804 NR Description: lipase-like protein [Oryza sativa (japonica
  misc_feature (1)..(39): Homolog of NCBI NO: 34911804 NR Description: lipase-like protein [Oryza sativa (japonica
  misc_feature (1)..(236): Homolog of NCBI NO: 10764858 NR Description: F1K23.17 [Arabidopsis thaliana]
  misc_feature (1)..(236): Homolog of NCBI NO: 15218728 NR Description: lipase, putative [Arabidopsis thaliana]
  misc_feature (1)..(236): Homolog of NCBI NO: 15225872 NR Description: lipase, putative [Arabidopsis thaliana]
  misc_feature (1)..(236): Homolog of NCBI NO: 12322540 NR Description: unknown protein [Arabidopsis thaliana]

SEQ ID NO: 13615 - DNA, 1622 bp, Zea mays subsp. mays
  misc_feature (1)..(1622): Ceres Seq. ID no. 12342501
  misc_feature: MA Experiment ID: 108536 Result: Down-regulated in Transcription
  misc_feature: MA Experiment 108536 PARAMETER Experiment Name: Zm_Meristem_P Parameter: Age (day) Value: 8
  misc_feature: MA Experiment 108536 PARAMETER Experiment Name: Zm_Meristem_P Parameter: Organism Value: Zea mays
  misc_feature: MA Experiment 108536 PARAMETER Experiment Name: Zm_Meristem_P Parameter: Plant Line Value: 35A19
  misc_feature: MA Experiment 108536 PARAMETER Experiment Name: Zm_Meristem_P Parameter: Tissue Value: Shoot Meristem vs. Above Shoot Meristem
acatctgactgaggagggccgagggtttttagaggaaggaacccgtccgcgaccgatggcgatggcgttgtcgccggggacggtgcctttgggagtgctgctgcggcgggaggtcaccaaggagcggatggagcggccggacgtgctgtgcggcgaggccaacctcagccgcaagggcgaggacttcacgctgctccgcgccgacgcaggccagcgcatccccggcgacccgtccacctccttctccgtcttcgcgatttttgatgggcacaacggatcaggagctgccatatacgcaagggagaatctgttgaaaaacgtcttgcgtgccattcctacatgtttctgcagggaggagtggcttgccgtgctcccacgtgcgcttgttgcagcgttcgtcaagactgataaagattttcaggcagtggatgaaacttctggcacaactgtgacatttgtgataatagacgagtgggttgtgactgtagcatctgtcggtgattcacgttgcatactagaatctgccgatggctcaatctactttttatcagctgatcatcgctttgactccaacccagatgaggtcaagcgcgtgacagcatgtgggagcaaagttgggaaaatggatattgtcggtggaccagaggttggtcctctaagatgttggccaggtggtttgtgtctatctagatccataggggatcttgatgttggtgaatgcatcattgctgttcctcatgttaagcaagtgaagctttctaatgctggaggcagaattatcattgcaagcgatggtgtgtgggatgatttgacttgtgaaatggctcttgattgttcccgtgggttctcatcagatgtagctgccaatcgaattgttaatgaagcaacccggcctcgtggaatcagggatgatactacttgcatcgtaatcgacattctaccaccagaaaatatagtcccgagtcctcgtaagagaccccgcaggattacattcaataatgtgtttcgcaaaagacatctagacgtcccccccgaaacaaatagatcagaatatgctgaaccggatgtggtggaagaaatatttgaagatggctctccgatgctttctaaaaggctaactaccggatatacacttgagaaaacttttgcaccctccagttgtgcagtttgtctggtacggttgaaatctggacagggaatttcagtgcatgataacccattgcaatatgagaaactacaaggttggcagggtcctttcctgtgcccgagctgtcatgaaaagaaagaagcaatggaagggaaacgccggccaaaaggatcttcatcaaacgtctttggtcacatgtgctaggcctgcctaccactaaagattcttttattgattgttagctggaaataatagtcagcccataacaattcattggctagaattgaccgtttcagttgagtaagacggaatattcttgacaaacagcctggagatttattcatcagtttgagtagagcataggaaaacccatcttattttttcgaaggactacggctgtgtccgcatctaggcatttcactgtacagactcttgcttgtatagagatcttctaaatgatcattagtcttcctgt

SEQ ID NO: 13616 - protein, 449 aa, Zea mays subsp. mays
  peptide (1)..(449): Ceres Seq. ID no. 12342502
  misc_feature (51)..(305): Pfam Name: Protein phosphatase 2C Pfam Description: Protein phosphatase 2C
  misc_feature (27)..(435): Homolog of NCBI NO: 18401703 NR Description: expressed protein; protein id: At1g47380.1
  misc_feature (27)..(435): Homolog of NCBI NO: 15292869 NR Description: unknown protein [Arabidopsis thaliana]
  misc_feature (26)..(446): Homolog of NCBI NO: 38344839 NR Description: OSJNBa0064H22.20 [Oryza sativa (japonica
  misc_feature (28)..(445): Homolog of NCBI NO: 14029015 NR Description: Unknown protein [Oryza sativa]
  misc_feature (28)..(439): Homolog of NCBI NO: 15221404 NR Description: putative protein phosphatase; protein id: supported by cDNA: gi_15292894, supported by cDNA: gi_20259036
  misc_feature (28)..(440): Homolog of NCBI NO: 15217454 NR Description: putative protein phosphatase 2C; protein id: supported by cDNA: gi_16930414 [Arabidopsis thaliana]
  misc_feature (25)..(435): Homolog of NCBI NO: 34394411 NR Description: protein phosphatase 2C-like [Oryza sativa
  misc_feature (42)..(439): Homolog of NCBI NO: 34914644 NR Description: OSJNBa0054L14.21 [Oryza sativa (japonica
  misc_feature (28)..(370): Homolog of NCBI NO: 16930415 NR Description: At1g09160/T12M4_13 [Arabidopsis thaliana]
  misc_feature (25)..(371): Homolog of NCBI NO: 34898168 NR Description: protein phosphatase 2C-like [Oryza sativa
HLTEEGRGFLEEGTRPRPMAMALSPGTVPLGVLLRREVTKERMERPDVLCGEANLSRKGEDFTLLRADAGQRIPGDPSTSFSVFAIFDGHNGSGAAIYARENLLKNVLRAIPTCFCREEWLAVLPRALVAAFVKTDKDFQAVDETSGTTVTFVIIDEWVVTVASVGDSRCILESADGSIYFLSADHRFDSNPDEVKRVTACGSKVGKMDIVGGPEVGPLRCWPGGLCLSRSIGDLDVGECIIAVPHVKQVKLSNAGGRIIIASDGVWDDLTCEMALDCSRGFSSDVAANRIVNEATRPRGIRDDTTCIVIDILPPENIVPSPRKRPRRITFNNVFRKRHLDVPPETNRSEYAEPDVVEEIFEDGSPMLSKRLTTGYTLEKTFAPSSCAVCLVRLKSGQGISVHDNPLQYEKLQGWQGPFLCPSCHEKKEAMEGKRRPKGSSSNVFGHMC

SEQ ID NO: 13617 - protein, 431 aa, Zea mays subsp. mays
  peptide (1)..(431): Ceres Seq. ID no. 12342503
  misc_feature (33)..(287): Pfam Name: Protein phosphatase 2C Pfam Description: Protein phosphatase 2C
  misc_feature (9)..(417): Homolog of NCBI NO: 18401703 NR Description: expressed protein; protein id: At1g47380.1
  misc_feature (9)..(417): Homolog of NCBI NO: 15292869 NR Description: unknown protein [Arabidopsis thaliana]
  misc_feature (8)..(428): Homolog of NCBI NO: 38344839 NR Description: OSJNBa0064H22.20 [Oryza sativa (japonica
  misc_feature (10)..(427): Homolog of NCBI NO: 14029015 NR Description: Unknown protein [Oryza sativa]
  misc_feature (10)..(421): Homolog of NCBI NO: 15221404 NR Description: putative protein phosphatase; protein id: supported by cDNA: gi_15292894, supported by cDNA: gi_20259036
  misc_feature (10)..(422): Homolog of NCBI NO: 15217454 NR Description: putative protein phosphatase 2C; protein id: supported by cDNA: gi_16930414 [Arabidopsis thaliana]
  misc_feature (7)..(417): Homolog of NCBI NO: 34394411 NR Description: protein phosphatase 2C-like [Oryza sativa
  misc_feature (24)..(421): Homolog of NCBI NO: 34914644 NR Description: OSJNBa0054L14.21 [Oryza sativa (japonica
  misc_feature (10)..(352): Homolog of NCBI NO: 16930415 NR Description: At1g09160/T12M4_13 [Arabidopsis thaliana]
  misc_feature (7)..(353): Homolog of NCBI NO: 34898168 NR Description: protein phosphatase 2C-like [Oryza sativa
MAMALSPGTVPLGVLLRREVTKERMERPDVLCGEANLSRKGEDFTLLRADAGQRIPGDPSTSFSVFAIFDGHNGSGAAIYARENLLKNVLRAIPTCFCREEWLAVLPRALVAAFVKTDKDFQAVDETSGTTVTFVIIDEWVVTVASVGDSRCILESADGSIYFLSADHRFDSNPDEVKRVTACGSKVGKMDIVGGPEVGPLRCWPGGLCLSRSIGDLDVGECIIAVPHVKQVKLSNAGGRIIIASDGVWDDLTCEMALDCSRGFSSDVAANRIVNEATRPRGIRDDTTCIVIDILPPENIVPSPRKRPRRITFNNVFRKRHLDVPPETNRSEYAEPDVVEEIFEDGSPMLSKRLTTGYTLEKTFAPSSCAVCLVRLKSGQGISVHDNPLQYEKLQGWQGPFLCPSCHEKKEAMEGKRRPKGSSSNVFGHMC

SEQ ID NO: 13618 - protein, 429 aa, Zea mays subsp. mays
  peptide (1)..(429): Ceres Seq. ID no. 12342504
  misc_feature (31)..(285): Pfam Name: Protein phosphatase 2C Pfam Description: Protein phosphatase 2C
  misc_feature (7)..(415): Homolog of NCBI NO: 18401703 NR Description: expressed protein; protein id: At1g47380.1
  misc_feature (7)..(415): Homolog of NCBI NO: 15292869 NR Description: unknown protein [Arabidopsis thaliana]
  misc_feature (6)..(426): Homolog of NCBI NO: 38344839 NR Description: OSJNBa0064H22.20 [Oryza sativa (japonica
  misc_feature (8)..(425): Homolog of NCBI NO: 14029015 NR Description: Unknown protein [Oryza sativa]
  misc_feature (8)..(419): Homolog of NCBI NO: 15221404 NR Description: putative protein phosphatase; protein id: supported by cDNA: gi_15292894, supported by cDNA: gi_20259036
  misc_feature (8)..(420): Homolog of NCBI NO: 15217454 NR Description: putative protein phosphatase 2C; protein id: supported by cDNA: gi_16930414 [Arabidopsis thaliana]
  misc_feature (5)..(415): Homolog of NCBI NO: 34394411 NR Description: protein phosphatase 2C-like [Oryza sativa
  misc_feature (22)..(419): Homolog of NCBI NO: 34914644 NR Description: OSJNBa0054L14.21 [Oryza sativa (japonica
  misc_feature (8)..(350): Homolog of NCBI NO: 16930415 NR Description: At1g09160/T12M4_13 [Arabidopsis thaliana]
  misc_feature (5)..(351): Homolog of NCBI NO: 34898168 NR Description: protein phosphatase 2C-like [Oryza sativa
MALSPGTVPLGVLLRREVTKERMERPDVLCGEANLSRKGEDFTLLRADAGQRIPGDPSTSFSVFAIFDGHNGSGAAIYARENLLKNVLRAIPTCFCREEWLAVLPRALVAAFVKTDKDFQAVDETSGTTVTFVIIDEWVVTVASVGDSRCILESADGSIYFLSADHRFDSNPDEVKRVTACGSKVGKMDIVGGPEVGPLRCWPGGLCLSRSIGDLDVGECIIAVPHVKQVKLSNAGGRIIIASDGVWDDLTCEMALDCSRGFSSDVAANRIVNEATRPRGIRDDTTCIVIDILPPENIVPSPRKRPRRITFNNVFRKRHLDVPPETNRSEYAEPDVVEEIFEDGSPMLSKRLTTGYTLEKTFAPSSCAVCLVRLKSGQGISVHDNPLQYEKLQGWQGPFLCPSCHEKKEAMEGKRRPKGSSSNVFGHMC

SEQ ID NO: 13619 - DNA, 1100 bp, Zea mays subsp. mays; identical to SEQ ID NO: 4191
  misc_feature (1)..(1100): Ceres Seq. ID no. 13571176
  misc_feature: MA Experiment ID: 108535 Result: Up-regulated in Transcription
  misc_feature: MA Experiment 108535 PARAMETER Experiment Name: Zm_Meristem_P Parameter: Age (day) Value: 8
  misc_feature: MA Experiment 108535 PARAMETER Experiment Name: Zm_Meristem_P Parameter: Organism Value: Zea mays
  misc_feature: MA Experiment 108535 PARAMETER Experiment Name: Zm_Meristem_P Parameter: Plant Line Value: 35A19
  misc_feature: MA Experiment 108535 PARAMETER Experiment Name: Zm_Meristem_P Parameter: Tissue Value: Root Meristem vs. Above Root Meristem
  misc_feature: MA Experiment ID: 20000488 Result: Up-regulated in Transcription
  misc_feature: MA Experiment 20000488 PARAMETER Experiment Name: Zm_50mM_NH4NO3_L_to_H_P Parameter: Organism Value: Zea mays
  misc_feature: MA Experiment 20000488 PARAMETER Experiment Name: Zm_50mM_NH4NO3_L_to_H_P Parameter: Timepoint (hr) Value: 8
  misc_feature: MA Experiment 20000488 PARAMETER Experiment Name: Zm_50mM_NH4NO3_L_to_H_P Parameter: Tissue Value: Leaves
  misc_feature: MA Experiment 20000488 PARAMETER Experiment Name: Zm_50mM_NH4NO3_L_to_H_P Parameter: Treatment Value: 50mM NH4NO3 vs. 100mM Mannitol
  misc_feature: MA Experiment ID: 20000492 Result: Up-regulated in Transcription
  misc_feature: MA Experiment 20000492 PARAMETER Experiment Name: Zm_Hybrid_Seed_Dev_P Parameter: DAP Value: 12
  misc_feature: MA Experiment 20000492 PARAMETER Experiment Name: Zm_Hybrid_Seed_Dev_P Parameter: Organism Value: Zea mays
  misc_feature: MA Experiment 20000492 PARAMETER Experiment Name: Zm_Hybrid_Seed_Dev_P Parameter: Plant Line Value: 35A19
  misc_feature: MA Experiment 20000492 PARAMETER Experiment Name: Zm_Hybrid_Seed_Dev_P Parameter: Tissue Value: Fert Kernel vs. Unfert Floret
  misc_feature: MA Experiment ID: 20000626 Result: Up-regulated in Transcription
  misc_feature: MA Experiment 20000626 PARAMETER Experiment Name: Zm_Herbicide-Treatments_P Parameter: Timepoint (hr) Value: 12
  misc_feature: MA Experiment 20000626 PARAMETER Experiment Name: Zm_Herbicide-Treatments_P Parameter: Tissue Value: Aerial
  misc_feature: MA Experiment 20000626 PARAMETER Experiment Name: Zm_Herbicide-Treatments_P Parameter: Treatment Value: Roundup vs. No Treatment
  misc_feature: MA Experiment ID: 20001606 Result: Up-regulated in Transcription
  misc_feature: MA Experiment 20001606 PARAMETER Experiment Name: Zm_50ppm_KNO3_L-to-H_P Parameter: Age (day) Value: 19
  misc_feature: MA Experiment 20001606 PARAMETER Experiment Name: Zm_50ppm_KNO3_L-to-H_P Parameter: Organism Value: Zea mays
  misc_feature: MA Experiment 20001606 PARAMETER Experiment Name: Zm_50ppm_KNO3_L-to-H_P Parameter: Plant Line Value: 35A19
  misc_feature: MA Experiment 20001606 PARAMETER Experiment Name: Zm_50ppm_KNO3_L-to-H_P Parameter: Timepoint (hr) Value: 8
  misc_feature: MA Experiment 20001606 PARAMETER Experiment Name: Zm_50ppm_KNO3_L-to-H_P Parameter: Tissue Value: Shoots
  misc_feature: MA Experiment 20001606 PARAMETER Experiment Name: Zm_50ppm_KNO3_L-to-H_P Parameter: Treatment Value: 50ppm KNO3 vs. 50ppm KCl

SEQ ID NO: 13620 - protein, 182 aa, Zea mays subsp. mays; identical to SEQ ID NO: 4192
  peptide (1)..(182): Ceres Seq. ID no. 13571177
  misc_feature (1)..(106): Pfam Name: Ribosomal protein S4/S9 N-terminal domain Pfam Description: Ribosomal protein S4/S9 N-terminal domain
  misc_feature (1)..(181): Homolog of NCBI NO: 38346067 NR Description: OSJNBa0084K01.7 [Oryza sativa (japonica
  misc_feature (1)..(181): Homolog of NCBI NO: 18417773 NR Description: ribosomal protein S4/S9 related [Arabidopsis
  misc_feature (1)..(181): Homolog of NCBI NO: 21554411 NR Description: ribosomal protein-like [Arabidopsis thaliana]
  misc_feature (1)..(181): Homolog of NCBI NO: 11358773 NR Description: ribosomal protein-like - Arabidopsis thaliana
  misc_feature (1)..(179): Homolog of NCBI NO: 19527196 NR Description: RIKEN cDNA 1190002L16 [Mus musculus]
  misc_feature (1)..(179): Homolog of NCBI NO: 34864645 NR Description: similar to RIKEN cDNA 1190002L16 [Rattus
  misc_feature (1)..(179): Homolog of NCBI NO: 6321942 NR Description: part of small (ribosomal) subunit (SSU) (contains U3 snoRNA); Interacts With Mpp10; Imp3p is a specific
  misc_feature (1)..(179): Homolog of NCBI NO: 8922794 NR Description: chromosome 15 open reading frame 12; ribosomal protein S4 [Homo sapiens] >gi|7023341|dbj|BAA91929.1| protein product [Homo sapiens] >gi|12053321|emb|CAB66847.1|
  misc_feature (1)..(181): Homolog of NCBI NO: 19115815 NR Description: putative component of U3 snoRNP, required for rRNA processing [Schizosaccharomyces pombe]
  misc_feature (1)..(181): Homolog of NCBI NO: 23479022 NR Description: S4 domain, putative [Plasmodium yoelii yoelii]
  misc_feature (91)..(91): Xaa is any aa, unknown or other
  misc_feature (104)..(104): Xaa is any aa, unknown or other
  misc_feature (182)..(182): Xaa is any aa, unknown or other

SEQ ID NO: 13621 - protein, 131 aa, Zea mays subsp. mays; identical to SEQ ID NO: 4193
  peptide (1)..(131): Ceres Seq. ID no. 13571178
  misc_feature (1)..(55): Pfam Name: Ribosomal protein S4/S9 N-terminal domain Pfam Description: Ribosomal protein S4/S9 N-terminal domain
  misc_feature (1)..(130): Homolog of NCBI NO: 38346067 NR Description: OSJNBa0084K01.7 [Oryza sativa (japonica
  misc_feature (1)..(130): Homolog of NCBI NO: 18417773 NR Description: ribosomal protein S4/S9 related [Arabidopsis
  misc_feature (1)..(130): Homolog of NCBI NO: 21554411 NR Description: ribosomal protein-like [Arabidopsis thaliana]
  misc_feature (1)..(130): Homolog of NCBI NO: 11358773 NR Description: ribosomal protein-like - Arabidopsis thaliana
  misc_feature (1)..(128): Homolog of NCBI NO: 19527196 NR Description: RIKEN cDNA 1190002L16 [Mus musculus]
  misc_feature (1)..(128): Homolog of NCBI NO: 34864645 NR Description: similar to RIKEN cDNA 1190002L16 [Rattus
  misc_feature (1)..(128): Homolog of NCBI NO: 6321942 NR Description: part of small (ribosomal) subunit (SSU) (contains U3 snoRNA); Interacts With Mpp10; Imp3p is a specific
  misc_feature (1)..(128): Homolog of NCBI NO: 8922794 NR Description: chromosome 15 open reading frame 12; ribosomal protein S4 [Homo sapiens] >gi|7023341|dbj|BAA91929.1| protein product [Homo sapiens] >gi|12053321|emb|CAB66847.1|
  misc_feature (1)..(130): Homolog of NCBI NO: 19115815 NR Description: putative component of U3 snoRNP, required for rRNA processing [Schizosaccharomyces pombe]
  misc_feature (1)..(130): Homolog of NCBI NO: 23479022 NR Description: S4 domain, putative [Plasmodium yoelii yoelii]
  misc_feature (40)..(40): Xaa is any aa, unknown or other
  misc_feature (53)..(53): Xaa is any aa, unknown or other
  misc_feature (131)..(131): Xaa is any aa, unknown or other

SEQ ID NO: 13622 - protein, 120 aa, Zea mays subsp. mays; identical to SEQ ID NO: 4194
  peptide (1)..(120): Ceres Seq. ID no. 13571179
  misc_feature (45)..(92): Pfam Name: S4 domain Pfam Description: S4 domain
  misc_feature (1)..(119): Homolog of NCBI NO: 38346067 NR Description: OSJNBa0084K01.7 [Oryza sativa (japonica
  misc_feature (1)..(119): Homolog of NCBI NO: 18417773 NR Description: ribosomal protein S4/S9 related [Arabidopsis
  misc_feature (1)..(119): Homolog of NCBI NO: 21554411 NR Description: ribosomal protein-like [Arabidopsis thaliana]
  misc_feature (1)..(119): Homolog of NCBI NO: 11358773 NR Description: ribosomal protein-like - Arabidopsis thaliana
  misc_feature (1)..(117): Homolog of NCBI NO: 19527196 NR Description: RIKEN cDNA 1190002L16 [Mus musculus]
  misc_feature (1)..(117): Homolog of NCBI NO: 34864645 NR Description: similar to RIKEN cDNA 1190002L16 [Rattus
  misc_feature (1)..(117): Homolog of NCBI NO: 6321942 NR Description: part of small (ribosomal) subunit (SSU) (contains U3 snoRNA); Interacts With Mpp10; Imp3p is a specific
  misc_feature (1)..(117): Homolog of NCBI NO: 8922794 NR Description: chromosome 15 open reading frame 12; ribosomal protein S4 [Homo sapiens] >gi|7023341|dbj|BAA91929.1| protein product [Homo sapiens] >gi|12053321|emb|CAB66847.1|
  misc_feature (1)..(119): Homolog of NCBI NO: 19115815 NR Description: putative component of U3 snoRNP, required for rRNA processing [Schizosaccharomyces pombe]
  misc_feature (1)..(119): Homolog of NCBI NO: 23479022 NR Description: S4 domain, putative [Plasmodium yoelii yoelii]
  misc_feature (29)..(29): Xaa is any aa, unknown or other
  misc_feature (42)..(42): Xaa is any aa, unknown or other
  misc_feature (120)..(120): Xaa is any aa, unknown or other

SEQ ID NO: 13623 - DNA, 1544 bp, Zea mays subsp. mays
  misc_feature (1)..(1544): Ceres Seq. ID no. 12373997
  misc_feature: MA Experiment ID: 108535 Result: Up-regulated in Transcription
  misc_feature: MA Experiment 108535 PARAMETER Experiment Name: Zm_Meristem_P Parameter: Age (day) Value: 8
  misc_feature: MA Experiment 108535 PARAMETER Experiment Name: Zm_Meristem_P Parameter: Organism Value: Zea mays
  misc_feature: MA Experiment 108535 PARAMETER Experiment Name: Zm_Meristem_P Parameter: Plant Line Value: 35A19
  misc_feature: MA Experiment 108535 PARAMETER Experiment Name: Zm_Meristem_P Parameter: Tissue Value: Root Meristem vs. Above Root Meristem
  misc_feature: MA Experiment ID: 108543 Result: Up-regulated in Transcription
  misc_feature: MA Experiment ID: 108556 Result: Down-regulated in Transcription
  misc_feature: MA Experiment 108556 PARAMETER Experiment Name: Zm_Drought_P Parameter: Age (day) Value: 9
  misc_feature: MA Experiment 108556 PARAMETER Experiment Name: Zm_Drought_P Parameter: Organism Value: Zea mays
  misc_feature: MA Experiment 108556 PARAMETER Experiment Name: Zm_Drought_P Parameter: Plant Line Value: 35A19
  misc_feature: MA Experiment 108556 PARAMETER Experiment Name: Zm_Drought_P Parameter: Timepoint (hr) Value: 24
  misc_feature: MA Experiment 108556 PARAMETER Experiment Name: Zm_Drought_P Parameter: Tissue Value: Aerial
  misc_feature: MA Experiment 108556 PARAMETER Experiment Name: Zm_Drought_P Parameter: Treatment Value: Drought vs. No Drought
  misc_feature: MA Experiment ID: 108689 Result: Down-regulated in Transcription
  misc_feature: MA Experiment 108689 PARAMETER Experiment Name: Zm_Drought_Roots_P Parameter: Age (day) Value: 9
  misc_feature: MA Experiment 108689 PARAMETER Experiment Name: Zm_Drought_Roots_P Parameter: Organism Value: Zea mays
  misc_feature: MA Experiment 108689 PARAMETER Experiment Name: Zm_Drought_Roots_P Parameter: Plant Line Value: 35A19
  misc_feature: MA Experiment 108689 PARAMETER Experiment Name: Zm_Drought_Roots_P Parameter: Timepoint (hr) Value: 24
  misc_feature: MA Experiment 108689 PARAMETER Experiment Name: Zm_Drought_Roots_P Parameter: Tissue Value: Roots
  misc_feature: MA Experiment 108689 PARAMETER Experiment Name: Zm_Drought_Roots_P Parameter: Treatment Value: Drought vs. No Drought
  misc_feature: MA Experiment ID: 20000477 Result: Down-regulated in Transcription
  misc_feature: MA Experiment 20000477 PARAMETER Experiment Name: Zm_5mM_SA_P Parameter: Age (day) Value: 10
  misc_feature: MA Experiment 20000477 PARAMETER Experiment Name: Zm_5mM_SA_P Parameter: Organism Value: Zea mays
  misc_feature: MA Experiment 20000477 PARAMETER Experiment Name: Zm_5mM_SA_P Parameter: Plant Line Value: 35A19
  misc_feature: MA Experiment 20000477 PARAMETER Experiment Name: Zm_5mM_SA_P Parameter: Timepoint (hr) Value: 48
  misc_feature: MA Experiment 20000477 PARAMETER Experiment Name: Zm_5mM_SA_P Parameter: Tissue Value: Aerial
  misc_feature: MA Experiment 20000477 PARAMETER Experiment Name: Zm_5mM_SA_P Parameter: Treatment Value: 5mM SA vs. No Treatment
  misc_feature: MA Experiment ID: 20000478 Result: Down-regulated in Transcription
  misc_feature: MA Experiment 20000478 PARAMETER Experiment Name: Zm_5mM_SA_P Parameter: Age (day) Value: 11
  misc_feature: MA Experiment 20000478 PARAMETER Experiment Name: Zm_5mM_SA_P Parameter: Organism Value: Zea mays
  misc_feature: MA Experiment 20000478 PARAMETER Experiment Name: Zm_5mM_SA_P Parameter: Plant Line Value: 35A19
  misc_feature: MA Experiment 20000478 PARAMETER Experiment Name: Zm_5mM_SA_P Parameter: Timepoint (hr) Value: 72
  misc_feature: MA Experiment 20000478 PARAMETER Experiment Name: Zm_5mM_SA_P Parameter: Tissue Value: Aerial
  misc_feature: MA Experiment 20000478 PARAMETER Experiment Name: Zm_5mM_SA_P Parameter: Treatment Value: 5mM SA vs. No Treatment
  misc_feature: MA Experiment ID: 20000480 Result: Down-regulated in Transcription
  misc_feature: MA Experiment 20000480 PARAMETER Experiment Name: Zm_Drought_P Parameter: Age (day) Value: 11
  misc_feature: MA Experiment 20000480 PARAMETER Experiment Name: Zm_Drought_P Parameter: Organism Value: Zea mays
  misc_feature: MA Experiment 20000480 PARAMETER Experiment Name: Zm_Drought_P Parameter: Plant Line Value: 35A19
  misc_feature: MA Experiment 20000480 PARAMETER Experiment Name: Zm_Drought_P Parameter: Timepoint (hr) Value: 72
  misc_feature: MA Experiment 20000480 PARAMETER Experiment Name: Zm_Drought_P Parameter: Tissue Value: Aerial
  misc_feature: MA Experiment 20000480 PARAMETER Experiment Name: Zm_Drought_P Parameter: Treatment Value: Drought vs. No Drought
tctatgatgcagtgtagtgataagttgggcctgagtctcgagttgggttcttttgcagctggagtaatgatatcaacaacagaccttgcacaacatactcttgaacaagtaactttttacatgtaccttgcatgttttttctgtcccctttccaggaaaaggggggaattactatctactaccccctctttcaaaccacaggccactttagctttgttctaagtcaaacatctttgactttggccaaatattaaaaatacatcaacaaatgcacaaggcacgtttcatggataatttaatgaaatcaatttgatgttggagcattttctgtaaaccttgtgaaagttagagaagtttgacttatgagattgctgaattgatctataatttggaacggagaaagtctttagtttgatctttattttatgcttgagcaaactcatagctagactcttgtagttagtaattcattatattgttctcttatttcaggcttgttctttctgcagatcgaacccatccgcaactttttcgctgctcttttccttgccagcattgggatgctaattaatgtccatttcttgtggaaccatgtggatatactccttgcagcagtaattttggtgatcaccgtaaagacctttattgttgctattgttgtaaaagggtttgggtatagcaacaaaacatctcttcttgtcggcatgtcacttgcacaaataggagagtttgcttttgttctcttaagccgtgcttcaagtattcatctaatcgagggcaagctatacctgcttcttcttggaaccactgcacttagtttggtgacaacccctctgctattcaaaatgatccctgcaatggtccacctcggggttcttttgagatggttttctgtcgataccaatcaggtggaggtacacgatcataccagttgagttcattgatggattgctttactctagaatgtttgccaatcaattcatcggttcttccttttcagctgggcctgaaaaatgatgtcctccgcatcgatagcggcaagcgcataaatctgatagtccaaggctcacatgactcatgacacatttgacacactgcaagctactttttgtatggcttaagtttacaagctctgtaaagtgttttcacctgtactgaagagtttctagcagatatacgagggtggaggcaagagaactcaactcagatcttgctcctagtgcaagatcaatcctcccccgtcatgacggctgcaagggcaaagtcgggttttgccgttcttgagagcagtgtgtcttggatgattggtgcagtgagtggctgtcgaccccaaatgagggtctcgtgtaacatatgaatgtatggtgattaattaattggattagcatgataggatgtaggcctgatcctcagtaaaggttatgcccttgtgttctttcaccaaagttgtgtatcctcactacacgaaagtgtgtacgacatccatcagatcacgaattttgttgtgtagccatatatgtcagtttcttaacatgtccaagttc

SEQ ID NO: 13624 - protein, 124 aa, Zea mays subsp. mays
  peptide (1)..(124): Ceres Seq. ID no. 12373998
  misc_feature (1)..(115): Homolog of NCBI NO: 30680729 NR Description: K+ efflux antiporter, putative (KEA4)
  misc_feature (1)..(115): Homolog of NCBI NO: 25411916 NR Description: probable potassium/proton antiporter [imported] - thaliana >gi|4191789|gb|AAD10158.1| putative potassium/proton
  misc_feature (1)..(114): Homolog of NCBI NO: 15239787 NR Description: potassium/proton antiporter family; protein id: [Arabidopsis thaliana] >gi|11358658|pir||T48539 probable
  misc_feature (1)..(110): Homolog of NCBI NO: 18423310 NR Description: potassium/proton antiporter family; protein id: supported by cDNA: 118693., supported by cDNA: gi_17979126 thaliana] >gi|17979127|gb|AAL49821.1| putative potassium/proton
  misc_feature (1)..(119): Homolog of NCBI NO: 10177870 NR Description: potassium/proton antiporter-like protein
  misc_feature (1)..(113): Homolog of NCBI NO: 22298081 NR Description: ORF_ID:tll0538~putative potassium/proton
  misc_feature (1)..(80): Homolog of NCBI NO: 34902264 NR Description: Putative potassium/proton antiporter-like protein
  misc_feature (1)..(121): Homolog of NCBI NO: 23123962 NR Description: hypothetical protein [Nostoc punctiforme]
  misc_feature (1)..(109): Homolog of NCBI NO: 17229538 NR Description: putative potassium/proton antiporter [Nostoc sp.
  misc_feature (1)..(116): Homolog of NCBI NO: 17231026 NR Description: probable potassium efflux transporter [Nostoc sp.
MLINVHFLWNHVDILLAAVILVITVKTFIVAIVVKGFGYSNKTSLLVGMSLAQIGEFAFVLLSRASSIHLIEGKLYLLLLGTTALSLVTTPLLFKMIPAMVHLGVLLRWFSVDTNQVEVHDHTS

SEQ ID NO: 13625 - protein, 76 aa, Zea mays subsp. mays
  peptide (1)..(76): Ceres Seq. ID no. 12373999
  misc_feature (1)..(67): Homolog of NCBI NO: 30680729 NR Description: K+ efflux antiporter, putative (KEA4)
  misc_feature (1)..(67): Homolog of NCBI NO: 25411916 NR Description: probable potassium/proton antiporter [imported] - thaliana >gi|4191789|gb|AAD10158.1| putative potassium/proton
  misc_feature (1)..(66): Homolog of NCBI NO: 15239787 NR Description: potassium/proton antiporter family; protein id: [Arabidopsis thaliana] >gi|11358658|pir||T48539 probable
  misc_feature (1)..(62): Homolog of NCBI NO: 18423310 NR Description: potassium/proton antiporter family; protein id: supported by cDNA: 118693., supported by cDNA: gi_17979126 thaliana] >gi|17979127|gb|AAL49821.1| putative potassium/proton
  misc_feature (1)..(71): Homolog of NCBI NO: 10177870 NR Description: potassium/proton antiporter-like protein
  misc_feature (1)..(65): Homolog of NCBI NO: 22298081 NR Description: ORF_ID:tll0538~putative potassium/proton
  misc_feature (1)..(32): Homolog of NCBI NO: 34902264 NR Description: Putative potassium/proton antiporter-like protein
  misc_feature (1)..(73): Homolog of NCBI NO: 23123962 NR Description: hypothetical protein [Nostoc punctiforme]
  misc_feature (1)..(61): Homolog of NCBI NO: 17229538 NR Description: putative potassium/proton antiporter [Nostoc sp.
  misc_feature (1)..(68): Homolog of NCBI NO: 17231026 NR Description: probable potassium efflux transporter [Nostoc sp.
MSLAQIGEFAFVLLSRASSIHLIEGKLYLLLLGTTALSLVTTPLLFKMIPAMVHLGVLLRWFSVDTNQVEVHDHTS

SEQ ID NO: 13626 - protein, 73 aa, Zea mays subsp. mays
  peptide (1)..(73): Ceres Seq. ID no. 12374000
  misc_feature (5)..(37): Homolog of NCBI NO: 30680729 NR Description: K+ efflux antiporter, putative (KEA4)
  misc_feature (5)..(36): Homolog of NCBI NO: 25411916 NR Description: probable potassium/proton antiporter [imported] - thaliana >gi|4191789|gb|AAD10158.1| putative potassium/proton
  misc_feature (4)..(37): Homolog of NCBI NO: 15239787 NR Description: potassium/proton antiporter family; protein id: [Arabidopsis thaliana] >gi|11358658|pir||T48539 probable
  misc_feature (5)..(37): Homolog of NCBI NO: 18423310 NR Description: potassium/proton antiporter family; protein id: supported by cDNA: 118693., supported by cDNA: gi_17979126 thaliana] >gi|17979127|gb|AAL49821.1| putative potassium/proton
  misc_feature (5)..(37): Homolog of NCBI NO: 10177870 NR Description: potassium/proton antiporter-like protein
  misc_feature (9)..(37): Homolog of NCBI NO: 22298081 NR Description: ORF_ID:tll0538~putative potassium/proton
  misc_feature (5)..(37): Homolog of NCBI NO: 34902264 NR Description: Putative potassium/proton antiporter-like protein
  misc_feature (6)..(37): Homolog of NCBI NO: 23123962 NR Description: hypothetical protein [Nostoc punctiforme]
  misc_feature (6)..(37): Homolog of NCBI NO: 17229538 NR Description: putative potassium/proton antiporter [Nostoc sp.
  misc_feature (8)..(47): Homolog of NCBI NO: 17231026 NR Description: probable potassium efflux transporter [Nostoc sp.
SMMQCSDKLGLSLELGSFAAGVMISTTDLAQHTLEQVTFYMYLACFFCPLSRKRGELLSTTPSFKPQATLALF

SEQ ID NO: 13627 - DNA, 1052 bp, Zea mays subsp. mays; identical to SEQ ID NO: 2738
  misc_feature (1)..(1052): Ceres Seq. ID no. 12340741
  misc_feature: MA Experiment ID: 108530 Result: Down-regulated in Transcription
  misc_feature: MA Experiment 108530 PARAMETER Experiment Name: Zm_Imbibed_Seeds_P Parameter: Age (day) Value: 6 vs. 2
  misc_feature: MA Experiment 108530 PARAMETER Experiment Name: Zm_Imbibed_Seeds_P Parameter: Organism Value: Zea mays
  misc_feature: MA Experiment 108530 PARAMETER Experiment Name: Zm_Imbibed_Seeds_P Parameter: Plant Line Value: 35A19
  misc_feature: MA Experiment 108530 PARAMETER Experiment Name: Zm_Imbibed_Seeds_P Parameter: Tissue Value: Aerial vs. Embryo
  misc_feature: MA Experiment ID: 20000492 Result: Up-regulated in Transcription
  misc_feature: MA Experiment 20000492 PARAMETER Experiment Name: Zm_Hybrid_Seed_Dev_P Parameter: DAP Value: 12
  misc_feature: MA Experiment 20000492 PARAMETER Experiment Name: Zm_Hybrid_Seed_Dev_P Parameter: Organism Value: Zea mays
  misc_feature: MA Experiment 20000492 PARAMETER Experiment Name: Zm_Hybrid_Seed_Dev_P Parameter: Plant Line Value: 35A19
  misc_feature: MA Experiment 20000492 PARAMETER Experiment Name: Zm_Hybrid_Seed_Dev_P Parameter: Tissue Value: Fert Kernel vs. Unfert Floret

SEQ ID NO: 13628 - protein, 172 aa, Zea mays subsp. mays; identical to SEQ ID NO: 2739
  peptide (1)..(172): Ceres Seq. ID no. 12340742
  misc_feature (1)..(172): Homolog of NCBI NO: 118104 NR Description: Peptidyl-prolyl cis-trans isomerase (PPIase)
  misc_feature (1)..(172): Homolog of NCBI NO: 1084455 NR Description: peptidylprolyl isomerase (EC 5.2.1.8) Cyp2 - rice
  misc_feature (1)..(172): Homolog of NCBI NO: 600769 NR Description: cyclophilin 2
  misc_feature (1)..(171): Homolog of NCBI NO: 13925731 NR Description: cyclophilin A-1 [Triticum aestivum]
  misc_feature (1)..(171): Homolog of NCBI NO: 13925734 NR Description: cyclophilin A-2 [Triticum aestivum]
  misc_feature (1)..(172): Homolog of NCBI NO: 18376589 NR Description: putative cyclosporin A-binding protein [Picea
  misc_feature (2)..(172): Homolog of NCBI NO: 18076088 NR Description: cyclophilin [Ricinus communis]
  misc_feature (1)..(171): Homolog of NCBI NO: 11270316 NR Description: peptidylprolyl isomerase (EC 5.2.1.8) - Digitalis lanata >gi|1563719|emb|CAA69622.1| cyclophylin
  misc_feature (1)..(171): Homolog of NCBI NO: 23394388 NR Description: peptidylprolyl isomerase [Phytophthora infestans]
  misc_feature (1)..(172): Homolog of NCBI NO: 3334157 NR Description: Peptidyl-prolyl cis-trans isomerase (PPIase)

SEQ ID NO: 13629 - protein, 163 aa, Zea mays subsp. mays; identical to SEQ ID NO: 2740
  peptide (1)..(163): Ceres Seq. ID no. 12340743
  misc_feature (1)..(163): Homolog of NCBI NO: 118104 NR Description: Peptidyl-prolyl cis-trans isomerase (PPIase)
  misc_feature (1)..(163): Homolog of NCBI NO: 1084455 NR Description: peptidylprolyl isomerase (EC 5.2.1.8) Cyp2 - rice
  misc_feature (1)..(163): Homolog of NCBI NO: 600769 NR Description: cyclophilin 2
  misc_feature (1)..(162): Homolog of NCBI NO: 13925731 NR Description: cyclophilin A-1 [Triticum aestivum]
  misc_feature (1)..(162): Homolog of NCBI NO: 13925734 NR Description: cyclophilin A-2 [Triticum aestivum]
  misc_feature (1)..(163): Homolog of NCBI NO: 18376589 NR Description: putative cyclosporin A-binding protein [Picea
  misc_feature (1)..(163): Homolog of NCBI NO: 18076088 NR Description: cyclophilin [Ricinus communis]
  misc_feature (1)..(162): Homolog of NCBI NO: 11270316 NR Description: peptidylprolyl isomerase (EC 5.2.1.8) - Digitalis lanata >gi|1563719|emb|CAA69622.1| cyclophylin
  misc_feature (1)..(162): Homolog of NCBI NO: 23394388 NR Description: peptidylprolyl isomerase [Phytophthora infestans]
  misc_feature (1)..(163): Homolog of NCBI NO: 3334157 NR Description: Peptidyl-prolyl cis-trans isomerase (PPIase)

SEQ ID NO: 13630 - protein, 151 aa, Zea mays subsp. mays; identical to SEQ ID NO: 2741
  peptide (1)..(151): Ceres Seq. ID no. 12340744
  misc_feature (1)..(150): Homolog of NCBI NO: 11270316 NR Description: peptidylprolyl isomerase (EC 5.2.1.8) - Digitalis lanata >gi|1563719|emb|CAA69622.1| cyclophylin
  misc_feature (1)..(150): Homolog of NCBI NO: 23394388 NR Description: peptidylprolyl isomerase [Phytophthora infestans]
  misc_feature (1)..(151): Homolog of NCBI NO: 3334157 NR Description: Peptidyl-prolyl cis-trans isomerase (PPIase)
  misc_feature (1)..(151): Homolog of NCBI NO: 118104 NR Description: Peptidyl-prolyl cis-trans isomerase (PPIase)
  misc_feature (1)..(151): Homolog of NCBI NO: 1084455 NR Description: peptidylprolyl isomerase (EC 5.2.1.8) Cyp2 - rice
  misc_feature (1)..(151): Homolog of NCBI NO: 600769 NR Description: cyclophilin 2
  misc_feature (1)..(150): Homolog of NCBI NO: 13925731 NR Description: cyclophilin A-1 [Triticum aestivum]
  misc_feature (1)..(150): Homolog of NCBI NO: 13925734 NR Description: cyclophilin A-2 [Triticum aestivum]
  misc_feature (1)..(151): Homolog of NCBI NO: 18376589 NR Description: putative cyclosporin A-binding protein [Picea
  misc_feature (1)..(151): Homolog of NCBI NO: 18076088 NR Description: cyclophilin [Ricinus communis]

SEQ ID NO: 13631 - DNA, 1395 bp, Zea mays subsp. mays
  misc_feature (1)..(1395): Ceres Seq. ID no. 12342650
  misc_feature: MA Experiment ID: 108687 Result: Down-regulated in Transcription
  misc_feature: MA Experiment 108687 PARAMETER Experiment Name: Zm_Embryos-Flowers__P Parameter: Tissue Value: Embryo vs. Aerial+
  misc_feature: MA Experiment ID: 108689 Result: Up-regulated in Transcription
  misc_feature: MA Experiment 108689 PARAMETER Experiment Name: Zm_Drought_Roots_P Parameter: Age (day) Value: 9
  misc_feature: MA Experiment 108689 PARAMETER Experiment Name: Zm_Drought_Roots_P Parameter: Organism Value: Zea mays
  misc_feature: MA Experiment 108689 PARAMETER Experiment Name: Zm_Drought_Roots_P Parameter: Plant Line Value: 35A19
  misc_feature: MA Experiment 108689 PARAMETER Experiment Name: Zm_Drought_Roots_P Parameter: Timepoint (hr) Value: 24
  misc_feature: MA Experiment 108689 PARAMETER Experiment Name: Zm_Drought_Roots_P Parameter: Tissue Value: Roots
  misc_feature: MA Experiment 108689 PARAMETER Experiment Name: Zm_Drought_Roots_P Parameter: Treatment Value: Drought vs. No Drought
  misc_feature: MA Experiment ID: 20000534 Result: Down-regulated in Transcription
  misc_feature: MA Experiment 20000534 PARAMETER Experiment Name: Zm_Hybrid_Pollen_P Parameter: Age (day) Value: 8
  misc_feature: MA Experiment 20000534 PARAMETER Experiment Name: Zm_Hybrid_Pollen_P Parameter: Organism Value: Zea mays
  misc_feature: MA Experiment 20000534 PARAMETER Experiment Name: Zm_Hybrid_Pollen_P Parameter: Plant Line Value: 35A19
  misc_feature: MA Experiment 20000534 PARAMETER Experiment Name: Zm_Hybrid_Pollen_P Parameter: Tissue Value: Pollen vs. Aerial
  misc_feature: MA Experiment ID: 20000535 Result: Down-regulated in Transcription
  misc_feature: MA Experiment 20000535 PARAMETER Experiment Name: Zm_Hybrid_Seed_Dev_P Parameter: DAP Value: 30 vs. 12
  misc_feature: MA Experiment 20000535 PARAMETER Experiment Name: Zm_Hybrid_Seed_Dev_P Parameter: Organism Value: Zea mays
  misc_feature: MA Experiment 20000535 PARAMETER Experiment Name: Zm_Hybrid_Seed_Dev_P Parameter: Plant Line Value: 35A19
  misc_feature: MA Experiment 20000535 PARAMETER Experiment Name: Zm_Hybrid_Seed_Dev_P Parameter: Tissue Value: Embryo vs. Unfert Floret
gctagggttacgcgtccacggcgacgacctctgcgcagagcgtgctgcgattggccggccttcctgggatcctccccgcgcccgacacccggaaacgcgcgcgcgcgcgagggagagacagagtgaggaaacgagggaaggagacgacgcgctcgcctattggccgccggctccgctccttcgcgcccagtgcgacggccacggcctgagcggcgctgccagcaaggcggctagtatgagcagcatggagtcgcggccgggccgaacgaacctggtggagcccatagggcacggcgccgcgctgccgtccggcggccaggcagtgcagccgtggtggacgagctccggggctgtgctcggtgcagtctcgccagccgtcgtggcggtggcgcccgggagcgggacggggattagcctgtcgagcagcccggcaggtggtagtggtggtggcggcgcggctaaaggagccgcgagtgacgagagcagcgaggattcacggagatctggggaaccaaaagatggaagcgctagtcaagaaaagaaccatgccacatcgcagatacccgctctggcgccagagtatttggcaccatactcgcagctggaactgaaccaatcaattgcttctgcagcatatcagtacccagatccttactatgcaggcatggttgctccctatggaagtcatgctgtggctcattttcagctacctggactaactcaatctcgaatgccattacctcttgaagtatccgaggagcctgtttatgtaaatgccaagcagtaccatggtatcttaagacgacggcagtcccgtgctaaggctgaacttgagaaaaaggtggtcaaagccagaaagccataccttcacgagtctcgtcatcagcacgcgatgaggagggcaagaggaaacgggggacgcttcctgaacacaaagaaaagtgacagtggtgctcccaatggaggcgaaaacgccgagcatctccatgtccctcccgacttactacagctacgacagaacgaggcttgaagtagcggtatggctctggcatccttgaacagcagttcctgtccacgggcgtaggcattcgagaccggattcatatagctctccacagcatacgcgcagccatctctgcggtaacgcacgttctcctgaacgagctttgtagcgagataggtatgcaagtgcaatctgggcgcaggaatccatcatcaagtgcccaatgcccatggggtaggtacgctgtttcaggcaattcattcttggctttcacgttccacccttgtgtaactggtgtgttgtaaatgtgtggaaaactaagcttgtgctctgtatcgggccgttcagcggaactgcaaaacgcctgtataattaagatcgaactttggatt

SEQ ID NO: 13632 - protein, 342 aa, Zea mays subsp. mays
  peptide (1)..(342): Ceres Seq. ID no. 12342651
  misc_feature (252)..(308): Pfam Name: CCAAT-binding transcription factor (CBF-B/NF-YA) Pfam Description: CCAAT-binding transcription factor
  misc_feature (82)..(341): Homolog of NCBI NO: 27552556 NR Description: putative CCAAT-binding transcription factor
  misc_feature (140)..(329): Homolog of NCBI NO: 7489565 NR Description: probable transcription factor - rice
  misc_feature (138)..(333): Homolog of NCBI NO: 38640734 NR Description: transcription factor WAPB [Triticum aestivum]
  misc_feature (82)..(326): Homolog of NCBI NO: 30684143 NR Description: CCAAT box binding factor/ transcription factor [Arabidopsis thaliana] >gi|2398521|emb|CAA74048.1| transcription
  misc_feature (82)..(326): Homolog of NCBI NO: 18416875 NR Description: CCAAT box binding factor/ transcription factor protein id: At5g12840.1 [Arabidopsis thaliana]
  misc_feature (141)..(342): Homolog of NCBI NO: 28209479 NR Description: putative CCAAT-binding transcription factor
  misc_feature (142)..(325): Homolog of NCBI NO: 34395137 NR Description: putative transcription factor [Oryza sativa
  misc_feature (90)..(342): Homolog of NCBI NO: 9293997 NR Description: CCAAT-binding transcription factor B subunit
  misc_feature (90)..(342): Homolog of NCBI NO: 18402799 NR Description: CCAAT-binding factor B chain, putative; protein At3g20910.1, supported by cDNA: 37744., supported by cDNA: [Arabidopsis thaliana] >gi|15724232|gb|AAL06509.1|AF412056_1
  misc_feature (160)..(315): Homolog of NCBI NO: 25511727 NR Description: F26G16.12 protein - Arabidopsis thaliana Contains similarity to gb|Y13720 Hap2a transcription factor from
LGLRVHGDDLCAERAAIGRPSWDPPRARHPETRARARERQSEETREGDDALAYWPPAPLLRAQCDGHGLSGAASKAASMSSMESRPGRTNLVEPIGHGAALPSGGQAVQPWWTSSGAVLGAVSPAVVAVAPGSGTGISLSSSPAGGSGGGGAAKGAASDESSEDSRRSGEPKDGSASQEKNHATSQIPALAPEYLAPYSQLELNQSIASAAYQYPDPYYAGMVAPYGSHAVAHFQLPGLTQSRMPLPLEVSEEPVYVNAKQYHGILRRRQSRAKAELEKKVVKARKPYLHESRHQHAMRRARGNGGRFLNTKKSDSGAPNGGENAEHLHVPPDLLQLRQNEA

SEQ ID NO: 13633 - protein, 264 aa, Zea mays subsp. mays; identical to SEQ ID NO: 5106
  peptide (1)..(264): Ceres Seq. ID no. 12342652
  misc_feature (174)..(230): Pfam Name: CCAAT-binding transcription factor (CBF-B/NF-YA) Pfam Description: CCAAT-binding transcription factor
  misc_feature (4)..(263): Homolog of NCBI NO: 27552556 NR Description: putative CCAAT-binding transcription factor
  misc_feature (62)..(251): Homolog of NCBI NO: 7489565 NR Description: probable transcription factor - rice
  misc_feature (60)..(255): Homolog of NCBI NO: 38640734 NR Description: transcription factor WAPB [Triticum aestivum]
  misc_feature (4)..(248): Homolog of NCBI NO: 30684143 NR Description: CCAAT box binding factor/ transcription factor [Arabidopsis thaliana] >gi|2398521|emb|CAA74048.1| transcription
  misc_feature (4)..(248): Homolog of NCBI NO: 18416875 NR Description: CCAAT box binding factor/ transcription factor protein id: At5g12840.1 [Arabidopsis thaliana]
  misc_feature (63)..(264): Homolog of NCBI NO: 28209479 NR Description: putative CCAAT-binding transcription factor
  misc_feature (64)..(247): Homolog of NCBI NO: 34395137 NR Description: putative transcription factor [Oryza sativa
  misc_feature (12)..(264): Homolog of NCBI NO: 9293997 NR Description: CCAAT-binding transcription factor B subunit
  misc_feature (12)..(264): Homolog of NCBI NO: 18402799 NR Description: CCAAT-binding factor B chain, putative; protein At3g20910.1, supported by cDNA: 37744., supported by cDNA: [Arabidopsis thaliana] >gi|15724232|gb|AAL06509.1|AF412056_1
  misc_feature (82)..(237): Homolog of NCBI NO: 25511727 NR Description: F26G16.12 protein - Arabidopsis thaliana Contains similarity to gb|Y13720 Hap2a transcription factor from

SEQ ID NO: 13634 - protein, 261 aa, Zea mays subsp. mays; identical to SEQ ID NO: 5107
  peptide (1)..(261): Ceres Seq. ID no. 12342653
  misc_feature (171)..(227): Pfam Name: CCAAT-binding transcription factor (CBF-B/NF-YA) Pfam Description: CCAAT-binding transcription factor
  misc_feature (1)..(260): Homolog of NCBI NO: 27552556 NR Description: putative CCAAT-binding transcription factor
  misc_feature (59)..(248): Homolog of NCBI NO: 7489565 NR Description: probable transcription factor - rice
  misc_feature (57)..(252): Homolog of NCBI NO: 38640734 NR Description: transcription factor WAPB [Triticum aestivum]
  misc_feature (1)..(245): Homolog of NCBI NO: 30684143 NR Description: CCAAT box binding factor/ transcription factor [Arabidopsis thaliana] >gi|2398521|emb|CAA74048.1| transcription
  misc_feature (1)..(245): Homolog of NCBI NO: 18416875 NR Description: CCAAT box binding factor/ transcription factor protein id: At5g12840.1 [Arabidopsis thaliana]
  misc_feature (60)..(261): Homolog of NCBI NO: 28209479 NR Description: putative CCAAT-binding transcription factor
  misc_feature (61)..(244): Homolog of NCBI NO: 34395137 NR Description: putative transcription factor [Oryza sativa
  misc_feature (9)..(261): Homolog of NCBI NO: 9293997 NR Description: CCAAT-binding transcription factor B subunit
  misc_feature (9)..(261): Homolog of NCBI NO: 18402799 NR Description: CCAAT-binding factor B chain, putative; protein At3g20910.1, supported by cDNA: 37744., supported by cDNA: [Arabidopsis thaliana] >gi|15724232|gb|AAL06509.1|AF412056_1
  misc_feature (79)..(234): Homolog of NCBI NO: 25511727 NR Description: F26G16.12 protein - Arabidopsis thaliana Contains similarity to gb|Y13720 Hap2a transcription factor from

SEQ ID NO: 13635 - DNA, 1054 bp, Zea mays subsp. mays
  misc_feature (1)..(1054): Ceres Seq. ID no. 12349863
  misc_feature: MA Experiment ID: 108535 Result: Up-regulated in Transcription
  misc_feature: MA Experiment 108535 PARAMETER Experiment Name: Zm_Meristem_P Parameter: Age (day) Value: 8
  misc_feature: MA Experiment 108535 PARAMETER Experiment Name: Zm_Meristem_P Parameter: Organism Value: Zea mays
  misc_feature: MA Experiment 108535 PARAMETER Experiment Name: Zm_Meristem_P Parameter: Plant Line Value: 35A19
  misc_feature: MA Experiment 108535 PARAMETER Experiment Name: Zm_Meristem_P Parameter: Tissue Value: Root Meristem vs. Above Root Meristem
  misc_feature: MA Experiment ID: 108544 Result: Down-regulated in Transcription
  misc_feature: MA Experiment ID: 108597 Result: Down-regulated in Transcription
  misc_feature: MA Experiment 108597 PARAMETER Experiment Name: Zm_100uM_ABA_P Parameter: Age (day) Value: 9
  misc_feature: MA Experiment 108597 PARAMETER Experiment Name: Zm_100uM_ABA_P Parameter: Organism Value: Zea mays
  misc_feature: MA Experiment 108597 PARAMETER Experiment Name: Zm_100uM_ABA_P Parameter: Plant Line Value: 35A19
  misc_feature: MA Experiment 108597 PARAMETER Experiment Name: Zm_100uM_ABA_P Parameter: Timepoint (hr) Value: 24
  misc_feature: MA Experiment 108597 PARAMETER Experiment Name: Zm_100uM_ABA_P Parameter: Tissue Value: Aerial
  misc_feature: MA Experiment 108597 PARAMETER Experiment Name: Zm_100uM_ABA_P Parameter: Treatment Value: 100uM ABA vs. No Treatment
  misc_feature: MA Experiment ID: 20000477 Result: Down-regulated in Transcription
  misc_feature: MA Experiment 20000477 PARAMETER Experiment Name: Zm_5mM_SA_P Parameter: Age (day) Value: 10
  misc_feature: MA Experiment 20000477 PARAMETER Experiment Name: Zm_5mM_SA_P Parameter: Organism Value: Zea mays
  misc_feature: MA Experiment 20000477 PARAMETER Experiment Name: Zm_5mM_SA_P Parameter: Plant Line Value: 35A19
  misc_feature: MA Experiment 20000477 PARAMETER Experiment Name: Zm_5mM_SA_P Parameter: Timepoint (hr) Value: 48
  misc_feature: MA Experiment 20000477 PARAMETER Experiment Name: Zm_5mM_SA_P Parameter: Tissue Value: Aerial
  misc_feature: MA Experiment 20000477 PARAMETER Experiment Name: Zm_5mM_SA_P Parameter: Treatment Value: 5mM SA vs. No Treatment
  misc_feature: MA Experiment ID: 20000478 Result: Down-regulated in Transcription
  misc_feature: MA Experiment 20000478 PARAMETER Experiment Name: Zm_5mM_SA_P Parameter: Age (day) Value: 11
  misc_feature: MA Experiment 20000478 PARAMETER Experiment Name: Zm_5mM_SA_P Parameter: Organism Value: Zea mays
  misc_feature: MA Experiment 20000478 PARAMETER Experiment Name: Zm_5mM_SA_P Parameter: Plant Line Value: 35A19
  misc_feature: MA Experiment 20000478 PARAMETER Experiment Name: Zm_5mM_SA_P Parameter: Timepoint (hr) Value: 72
  misc_feature: MA Experiment 20000478 PARAMETER Experiment Name: Zm_5mM_SA_P Parameter: Tissue Value: Aerial
  misc_feature: MA Experiment 20000478 PARAMETER Experiment Name: Zm_5mM_SA_P Parameter: Treatment Value: 5mM SA vs. No Treatment
  misc_feature: MA Experiment ID: 20000479 Result: Down-regulated in Transcription
  misc_feature: MA Experiment 20000479 PARAMETER Experiment Name: Zm_Drought_P Parameter: Age (day) Value: 10
  misc_feature: MA Experiment 20000479 PARAMETER Experiment Name: Zm_Drought_P Parameter: Organism Value: Zea mays
  misc_feature: MA Experiment 20000479 PARAMETER Experiment Name: Zm_Drought_P Parameter: Plant Line Value: 35A19
  misc_feature: MA Experiment 20000479 PARAMETER Experiment Name: Zm_Drought_P Parameter: Timepoint (hr) Value: 48
  misc_feature: MA Experiment 20000479 PARAMETER Experiment Name: Zm_Drought_P Parameter: Tissue Value: Aerial
  misc_feature: MA Experiment 20000479 PARAMETER Experiment Name: Zm_Drought_P Parameter: Treatment Value: Drought vs. No Drought
  misc_feature: MA Experiment ID: 20000480 Result: Down-regulated in Transcription
  misc_feature: MA Experiment 20000480 PARAMETER Experiment Name: Zm_Drought_P Parameter: Age (day) Value: 11
  misc_feature: MA Experiment 20000480 PARAMETER Experiment Name: Zm_Drought_P Parameter: Organism Value: Zea mays
  misc_feature: MA Experiment 20000480 PARAMETER Experiment Name: Zm_Drought_P Parameter: Plant Line Value: 35A19
  misc_feature: MA Experiment 20000480 PARAMETER Experiment Name: Zm_Drought_P Parameter: Timepoint (hr) Value: 72
  misc_feature: MA Experiment 20000480 PARAMETER Experiment Name: Zm_Drought_P Parameter: Tissue Value: Aerial
  misc_feature: MA Experiment 20000480 PARAMETER Experiment Name: Zm_Drought_P Parameter: Treatment Value: Drought vs. No Drought
  misc_feature: MA Experiment ID: 20000534 Result: Down-regulated in Transcription
  misc_feature: MA Experiment 20000534 PARAMETER Experiment Name: Zm_Hybrid_Pollen_P Parameter: Age (day) Value: 8
  misc_feature: MA Experiment 20000534 PARAMETER Experiment Name: Zm_Hybrid_Pollen_P Parameter: Organism Value: Zea mays
  misc_feature: MA Experiment 20000534 PARAMETER Experiment Name: Zm_Hybrid_Pollen_P Parameter: Plant Line Value: 35A19
  misc_feature: MA Experiment 20000534 PARAMETER Experiment Name: Zm_Hybrid_Pollen_P Parameter: Tissue Value: Pollen vs. Aerial
  misc_feature: MA Experiment ID: 20000535 Result: Down-regulated in Transcription
  misc_feature: MA Experiment 20000535 PARAMETER Experiment Name: Zm_Hybrid_Seed_Dev_P Parameter: DAP Value: 30 vs. 12
  misc_feature: MA Experiment 20000535 PARAMETER Experiment Name: Zm_Hybrid_Seed_Dev_P Parameter: Organism Value: Zea mays
  misc_feature: MA Experiment 20000535 PARAMETER Experiment Name: Zm_Hybrid_Seed_Dev_P Parameter: Plant Line Value: 35A19
  misc_feature: MA Experiment 20000535 PARAMETER Experiment Name: Zm_Hybrid_Seed_Dev_P Parameter: Tissue Value: Embryo vs. Unfert Floret
  misc_feature: MA Experiment ID: 20000626 Result: Down-regulated in Transcription
  misc_feature: MA Experiment 20000626 PARAMETER Experiment Name: Zm_Herbicide-Treatments_P Parameter: Timepoint (hr) Value: 12
  misc_feature: MA Experiment 20000626 PARAMETER Experiment Name: Zm_Herbicide-Treatments_P Parameter: Tissue Value: Aerial
  misc_feature: MA Experiment 20000626 PARAMETER Experiment Name: Zm_Herbicide-Treatments_P Parameter: Treatment Value: Roundup vs. No Treatment
agttcagattccgcaaaacaggcagtcaggctcaggcaccaacaccaaccatggcctccgctgcgacacctgcgcctttgctccccgtgaccagcacggctgccggcggcggctccgcgccgtcctccgccacgggcctctccgacgcggcgctcgccacgccggccttccgcctcttcgtgagccggctggccgagacggcgcggcgctcgctcgcggaccggcgcccatggacggagctgctggaccgatcggctttctcccgccccgactccctctccgaggccacctcgcgcctgcgccgcaacctcggctacttccgcgtcaactacgccgccgtcgtcgccttctccctcgcggcctcgctcctggcgcaccctttctccctcctcgtcctcctcagcatcctcggcgcctggtgcttcctctacgtcttccgcgcccccgaccagctcgtcgtgctcttcggccgcaccttcaccgaccgcgagacgctgcttggccttaccgtcgcttctgtgctcgccttcttcctcacctccgtggcttcgctcatcatctccgggctgcttgtcgggggcgccattgtcgcagcgcacggcgcctgccgcattccagaggacctcttccttgatgatccgagcgctgcgtccagtggaaacaccaccagcaggctgatctccttccttgcgtcgcccggatctggggtttgatgcatcaaggaccggtaggaaattcttgtgctcggcgaattcagttgaagtcaaatagagatctgatccagaagctgtataaaccagctccttgctcatgtggtacctcacctgcgagtagcattgtataagtggatccgatttttctgttctactttgtgtggaattacgcaaggatctgcaattgctgtacttctcttgcacttcaccagatctggtgacaatgaccattaagcattgtcaaatgccaacatgtatcggtgtgatctttacattcatcattcatgtgtacaactctacatcatgacaaatttttatggatctctggttatttttgcctc

SEQ ID NO: 13636 - protein, 236 aa, Zea mays subsp. mays
  peptide (1)..(236): Ceres Seq. ID no. 12349864
  misc_feature (20)..(231): Homolog of NCBI NO: 15226664 NR Description: unknown protein; protein id: At2g40380.1
  misc_feature (21)..(235): Homolog of NCBI NO: 15239101 NR Description: putative protein; protein id: At5g05380.1 thaliana] >gi|10176750|dbj|BAB09981.1|
  misc_feature (21)..(235): Homolog of NCBI NO: 18072825 NR Description: prenylated Rab receptor 2 [Arabidopsis thaliana]
  misc_feature (21)..(229): Homolog of NCBI NO: 15228824 NR Description: putative protein; protein id: At3g56110.1, by cDNA: 11163., supported by cDNA: gi_15450977, supported by
  misc_feature (21)..(229): Homolog of NCBI NO: 15450978 NR Description: putative protein [Arabidopsis thaliana]
  misc_feature (17)..(234): Homolog of NCBI NO: 15224494 NR Description: unknown protein; protein id: At2g38360.1
  misc_feature (21)..(232): Homolog of NCBI NO: 15241022 NR Description: putative protein; protein id: At5g01640.1
  misc_feature (24)..(219): Homolog of NCBI NO: 15240698 NR Description: putative protein; protein id: At5g07110.1, by cDNA: 22460. [Arabidopsis thaliana] >gi|11281602|pir||T48482
  misc_feature (7)..(219): Homolog of NCBI NO: 40539036 NR Description: putative prenylated rab acceptor protein [Oryza
  misc_feature (53)..(231): Homolog of NCBI NO: 18405248 NR Description: expressed protein; protein id: At1g55190.1, by cDNA: 21940. [Arabidopsis thaliana] >gi|25347725|pir||F96593
FRFRKTGSQAQAPTPTMASAATPAPLLPVTSTAAGGGSAPSSATGLSDAALATPAFRLFVSRLAETARRSLADRRPWTELLDRSAFSRPDSLSEATSRLRRNLGYFRVNYAAVVAFSLAASLLAHPFSLLVLLSILGAWCFLYVFRAPDQLVVLFGRTFTDRETLLGLTVASVLAFFLTSVASLIISGLLVGGAIVAAHGACRIPEDLFLDDPSAASSGNTTSRLISFLASPGSGV

SEQ ID NO: 13637 - protein, 220 aa, Zea mays subsp. mays
  peptide (1)..(220): Ceres Seq. ID no. 12349865
  misc_feature (4)..(215): Homolog of NCBI NO: 15226664 NR Description: unknown protein; protein id: At2g40380.1
  misc_feature (5)..(219): Homolog of NCBI NO: 15239101 NR Description: putative protein; protein id: At5g05380.1 thaliana] >gi|10176750|dbj|BAB09981.1|
  misc_feature (5)..(219): Homolog of NCBI NO: 18072825 NR Description: prenylated Rab receptor 2 [Arabidopsis thaliana]
  misc_feature (5)..(213): Homolog of NCBI NO: 15228824 NR Description: putative protein; protein id: At3g56110.1, by cDNA: 11163., supported by cDNA: gi_15450977, supported by
  misc_feature (5)..(213): Homolog of NCBI NO: 15450978 NR Description: putative protein [Arabidopsis thaliana]
  misc_feature (1)..(218): Homolog of NCBI NO: 15224494 NR Description: unknown protein; protein id: At2g38360.1
  misc_feature (5)..(216): Homolog of NCBI NO: 15241022 NR Description: putative protein; protein id: At5g01640.1
  misc_feature (8)..(203): Homolog of NCBI NO: 15240698 NR Description: putative protein; protein id: At5g07110.1, by cDNA: 22460. [Arabidopsis thaliana] >gi|11281602|pir||T48482
  misc_feature (1)..(203): Homolog of NCBI NO: 40539036 NR Description: putative prenylated rab acceptor protein [Oryza
  misc_feature (37)..(215): Homolog of NCBI NO: 18405248 NR Description: expressed protein; protein id: At1g55190.1, by cDNA: 21940. [Arabidopsis thaliana] >gi|25347725|pir||F96593
MASAATPAPLLPVTSTAAGGGSAPSSATGLSDAALATPAFRLFVSRLAETARRSLADRRPWTELLDRSAFSRPDSLSEATSRLRRNLGYFRVNYAAVVAFSLAASLLAHPFSLLVLLSILGAWCFLYVFRAPDQLVVLFGRTFTDRETLLGLTVASVLAFFLTSVASLIISGLLVGGAIVAAHGACRIPEDLFLDDPSAASSGNTTSRLISFLASPGSGV

SEQ ID NO: 13638 - protein, 210 aa, Zea mays subsp. mays
  peptide (1)..(210): Ceres Seq. ID no. 12349866
VQIPQNRQSGSGTNTNHGLRCDTCAFAPRDQHGCRRRLRAVLRHGPLRRGARHAGLPPLREPAGRDGAALARGPAPMDGAAGPIGFLPPRLPLRGHLAPAPQPRLLPRQLRRRRRLLPRGLAPGAPFLPPRPPQHPRRLVLPLRLPRPRPARRALRPHLHRPRDAAWPYRRFCARLLPHLRGFAHHLRAACRGRHCRSARRLPHSRGPLP

SEQ ID NO: 13639 - DNA, 1831 bp, Zea mays subsp. mays
  misc_feature (1)..(1831): Ceres Seq. ID no. 12411187
  misc_feature: MA Experiment ID: 108527 Result: Down-regulated in Transcription
  misc_feature: MA Experiment 108527 PARAMETER Experiment Name: Zm_5mM_NO_P Parameter: Age (day) Value: 8
  misc_feature: MA Experiment 108527 PARAMETER Experiment Name: Zm_5mM_NO_P Parameter: Organism Value: Zea mays
  misc_feature: MA Experiment 108527 PARAMETER Experiment Name: Zm_5mM_NO_P Parameter: Plant Line Value: 35A19
  misc_feature: MA Experiment 108527 PARAMETER Experiment Name: Zm_5mM_NO_P Parameter: Timepoint (hr) Value: 6
  misc_feature: MA Experiment 108527 PARAMETER Experiment Name: Zm_5mM_NO_P Parameter: Tissue Value: Aerial
  misc_feature: MA Experiment 108527 PARAMETER Experiment Name: Zm_5mM_NO_P Parameter: Treatment Value: 5mM NO vs. No Treatment
  misc_feature: MA Experiment ID: 108528 Result: Up-regulated in Transcription
  misc_feature: MA Experiment 108528 PARAMETER Experiment Name: Zm_Imbibed_Seeds_P Parameter: Age (day) Value: 5 vs. 2
  misc_feature: MA Experiment 108528 PARAMETER Experiment Name: Zm_Imbibed_Seeds_P Parameter: Organism Value: Zea mays
  misc_feature: MA Experiment 108528 PARAMETER Experiment Name: Zm_Imbibed_Seeds_P Parameter: Plant Line Value: 35A19
  misc_feature: MA Experiment 108528 PARAMETER Experiment Name: Zm_Imbibed_Seeds_P Parameter: Tissue Value: Aerial vs. Embryo
  misc_feature: MA Experiment ID: 108530 Result: Up-regulated in Transcription
  misc_feature: MA Experiment 108530 PARAMETER Experiment Name: Zm_Imbibed_Seeds_P Parameter: Age (day) Value: 6 vs. 2
  misc_feature: MA Experiment 108530 PARAMETER Experiment Name: Zm_Imbibed_Seeds_P Parameter: Organism Value: Zea mays
  misc_feature: MA Experiment 108530 PARAMETER Experiment Name: Zm_Imbibed_Seeds_P Parameter: Plant Line Value: 35A19
  misc_feature: MA Experiment 108530 PARAMETER Experiment Name: Zm_Imbibed_Seeds_P Parameter: Tissue Value: Aerial vs. Embryo
  misc_feature: MA Experiment ID: 108545 Result: Up-regulated in Transcription
  misc_feature: MA Experiment 108545 PARAMETER Experiment Name: Zm_Imbibed_Seeds_P Parameter: Age (day) Value: 3 vs. 2
  misc_feature: MA Experiment 108545 PARAMETER Experiment Name: Zm_Imbibed_Seeds_P Parameter: Organism Value: Zea mays
  misc_feature: MA Experiment 108545 PARAMETER Experiment Name: Zm_Imbibed_Seeds_P Parameter: Plant Line Value: 35A19
  misc_feature: MA Experiment 108545 PARAMETER Experiment Name: Zm_Imbibed_Seeds_P Parameter: Tissue Value: Aerial vs. Embryo
  misc_feature: MA Experiment ID: 108547 Result: Up-regulated in Transcription
  misc_feature: MA Experiment 108547 PARAMETER Experiment Name: Zm_Imbibed_Seeds_P Parameter: Age (day) Value: 4 vs. 2
  misc_feature: MA Experiment 108547 PARAMETER Experiment Name: Zm_Imbibed_Seeds_P Parameter: Organism Value: Zea mays
  misc_feature: MA Experiment 108547 PARAMETER Experiment Name: Zm_Imbibed_Seeds_P Parameter: Plant Line Value: 35A19
  misc_feature: MA Experiment 108547 PARAMETER Experiment Name: Zm_Imbibed_Seeds_P Parameter: Tissue Value: Aerial vs. Embryo
atccggttcggttccgtcgtccactctcgttccccagttcgctggaccatctcaaaatcctatcctcctctccttccctccgtatctcatccggccgattcgaatctccggtcccatcctctacggcttcaccccgcgcccaatccagtctgtacgtgaatcttgacaggggagagaagaatcggataaggagacctgcaccttcctccgagcaaagcaggagaggaaacaagaatagaggaggagatggccatgcccaccttacgccttgctcctgacctgccgcccgtatcccgcctctgcttcgggacaatgacgatgggagagcagagcggggcggcgtgctcgctccgcctcctcgacgccgcctacgacgccggcgtcaacttcttcgactccgcagagatgtaggctcacctgctccctcatctccctgcctcggttcgagagtaatgaaaggaaaggtgtctggaactctggatgcacatctgcaaacatgtttactcgtcaggtacccagtcccacagcgcagtgagacgcgcgggcgtagcgaggagctcctcggccgctggttgcgggcccgccgggccccacgggacagcgtcgtcgtcgcaaccaaagtcgcggggccttcagggcagatgacgtggattcgcggcgggccgacatctctcgattcacagaacatcgcagaggcaatcgatggctgtttgcgcaggctgggtgtggactacatcgacctctaccagatacactggccggatcggtatgttccaatgtttggggagacagagtatgatccgaactgccagtacacgtctgttccaatggaagagcaactggaggctctcggaagagcaatagatgctggcaaggtacattggccttagcaatgagacaccatatggtttgatgaaatttcttcagttgagtaaggattctcagttgcttccaaagctactgacactgcaggtaagtagcgcagtttgatctaatctgtagtactgtaatcgctctccatatttcttcacctgtgtttttgcagaactcgtataatttgttgtgccgaaattttgattctggattggcagaatgctgccatcatgagaggtatgcttgacacggtcagaagccctaactgttgtcttcagtgtctctaatcttctcatgtatggtcctggcatgagttggtaatgcatattggctttttcccctctatgactatgatacaacgatacatagctctcctgcatgttcgaaaaaatattgacatctgtttagtttaaagaagaatggcattgtcatatcgtatttgctcttggttaagatattttccaaattgtattctgttttgactcaatttatacaattgtttttcttctgaacttccattgttgaactatggcatttgcagaattagccttgctggcttatagcccaatggcaatgggtatactttcaggaaagtatcacttatctgataactgtggtccgccagacgcaagaatgaatcttttcaaagggagatactctgaaggtgaatcccggtacaaactgcagagccccaaagtgaaagcagctgtgaaggaatacacacaaatttctgcaaagtatggcatttctccagtgaccttagcgattgcatttgtcttgagacatccacttgtggcatcggctgttttcggtgcgactaaattgtggcagcttgatgaagttcttcaggcaactacagtccatctttgtgaggaaattgttgctgagatcaatgatgtacatgcaagataccctaacccttgcccataaaattttgcaaaaaaatctttatttagcc

SEQ ID NO: 13640 - protein, 145 aa, Zea mays subsp. mays
  peptide (1)..(145): Ceres Seq. ID no. 12411188
  misc_feature (21)..(144): Homolog of NCBI NO: 23042202 NR Description: hypothetical protein [Trichodesmium erythraeum
  misc_feature (21)..(144): Homolog of NCBI NO: 15640686 NR Description: oxidoreductase Tas, aldo/keto reductase family cholerae] >gi|11355749|pir||C82294 oxidoreductase Tas, aldo/keto
  misc_feature (21)..(144): Homolog of NCBI NO: 23124929 NR Description: hypothetical protein [Nostoc punctiforme]
  misc_feature (21)..(144): Homolog of NCBI NO: 27363986 NR Description: Oxidoreductase Tas, aldo/keto reductase family vulnificus CMCP6] >gi|27360103|gb|AAO09041.1|AE016798_201
  misc_feature (21)..(144): Homolog of NCBI NO: 23043449 NR Description: hypothetical protein [Trichodesmium erythraeum
  misc_feature (21)..(145): Homolog of NCBI NO: 15599630 NR Description: probable oxidoreductase [Pseudomonas aeruginosa
  misc_feature (21)..(144): Homolog of NCBI NO: 16121102 NR Description: putative aldo/keto reductase-family protein pestis] >gi|22127053|ref|NP_670476.1| hypothetical protein
  misc_feature (21)..(144): Homolog of NCBI NO: 28897290 NR Description: oxidoreductase Tas, aldo/keto reductase family parahaemolyticus RIMD 2210633] >gi|28805499|dbj|BAC58779.1|
  misc_feature (21)..(145): Homolog of NCBI NO: 23061190 NR Description: hypothetical protein [Pseudomonas fluorescens
  misc_feature (21)..(144): Homolog of NCBI NO: 24372488 NR Description: oxidoreductase, aldo/keto reductase family
MKGKVSGTLDAHLQTCLLVRYPVPQRSETRGRSEELLGRWLRARRAPRDSVVVATKVAGPSGQMTWIRGGPTSLDSQNIAEAIDGCLRRLGVDYIDLYQIHWPDRYVPMFGETEYDPNCQYTSVPMEEQLEALGRAIDAGKVHWP

SEQ ID NO: 13641 - protein, 133 aa, Zea mays subsp. mays
  peptide (1)..(133): Ceres Seq. ID no. 12411189
  misc_feature (1)..(133): Homolog of NCBI NO: 23042202 NR Description: hypothetical protein [Trichodesmium erythraeum
  misc_feature (8)..(133): Homolog of NCBI NO: 15640686 NR Description: oxidoreductase Tas, aldo/keto reductase family cholerae] >gi|11355749|pir||C82294 oxidoreductase Tas, aldo/keto
  misc_feature (3)..(133): Homolog of NCBI NO: 23124929 NR Description: hypothetical protein [Nostoc punctiforme]
  misc_feature (8)..(133): Homolog of NCBI NO: 27363986 NR Description: Oxidoreductase Tas, aldo/keto reductase family vulnificus CMCP6] >gi|27360103|gb|AAO09041.1|AE016798_201
  misc_feature (1)..(131): Homolog of NCBI NO: 23043449 NR Description: hypothetical protein [Trichodesmium erythraeum
  misc_feature (5)..(133): Homolog of NCBI NO: 15599630 NR Description: probable oxidoreductase [Pseudomonas aeruginosa
  misc_feature (8)..(133): Homolog of NCBI NO: 16121102 NR Description: putative aldo/keto reductase-family protein pestis] >gi|22127053|ref|NP_670476.1| hypothetical protein
  misc_feature (8)..(133): Homolog of NCBI NO: 28897290 NR Description: oxidoreductase Tas, aldo/keto reductase family parahaemolyticus RIMD 2210633] >gi|28805499|dbj|BAC58779.1|
  misc_feature (5)..(133): Homolog of NCBI NO: 23061190 NR Description: hypothetical protein [Pseudomonas fluorescens
  misc_feature (5)..(133): Homolog of NCBI NO: 24372488 NR Description: oxidoreductase, aldo/keto reductase family
MAFAELALLAYSPMAMGILSGKYHLSDNCGPPDARMNLFKGRYSEGESRYKLQSPKVKAAVKEYTQISAKYGISPVTLAIAFVLRHPLVASAVFGATKLWQLDEVLQATTVHLCEEIVAEINDVHARYPNPCP

SEQ ID NO: 13642 - protein, 120 aa, Zea mays subsp. mays
  peptide (1)..(120): Ceres Seq. ID no. 12411190
  misc_feature (1)..(120): Homolog of NCBI NO: 23042202 NR Description: hypothetical protein [Trichodesmium erythraeum
  misc_feature (1)..(120): Homolog of NCBI NO: 15640686 NR Description: oxidoreductase Tas, aldo/keto reductase family cholerae] >gi|11355749|pir||C82294 oxidoreductase Tas, aldo/keto
  misc_feature (1)..(120): Homolog of NCBI NO: 23124929 NR Description: hypothetical protein [Nostoc punctiforme]
  misc_feature (1)..(120): Homolog of NCBI NO: 27363986 NR Description: Oxidoreductase Tas, aldo/keto reductase family vulnificus CMCP6] >gi|27360103|gb|AAO09041.1|AE016798_201
  misc_feature (1)..(118): Homolog of NCBI NO: 23043449 NR Description: hypothetical protein [Trichodesmium erythraeum
  misc_feature (1)..(120): Homolog of NCBI NO: 15599630 NR Description: probable oxidoreductase [Pseudomonas aeruginosa
  misc_feature (1)..(120): Homolog of NCBI NO: 16121102 NR Description: putative aldo/keto reductase-family protein pestis] >gi|22127053|ref|NP_670476.1| hypothetical protein
  misc_feature (1)..(120): Homolog of NCBI NO: 28897290 NR Description: oxidoreductase Tas, aldo/keto reductase family parahaemolyticus RIMD 2210633] >gi|28805499|dbj|BAC58779.1|
  misc_feature (1)..(120): Homolog of NCBI NO: 23061190 NR Description: hypothetical protein [Pseudomonas fluorescens
  misc_feature (1)..(120): Homolog of NCBI NO: 24372488 NR Description: oxidoreductase, aldo/keto reductase family
MAMGILSGKYHLSDNCGPPDARMNLFKGRYSEGESRYKLQSPKVKAAVKEYTQISAKYGISPVTLAIAFVLRHPLVASAVFGATKLWQLDEVLQATTVHLCEEIVAEINDVHARYPNPCP

SEQ ID NO: 13643 - DNA, 1342 bp, Zea mays subsp. mays; identical to SEQ ID NO: 8474
  misc_feature (1)..(1342): Ceres Seq. ID no. 12546334
  misc_feature: MA Experiment ID: 108528 Result: Up-regulated in Transcription
  misc_feature: MA Experiment 108528 PARAMETER Experiment Name: Zm_Imbibed_Seeds_P Parameter: Age (day) Value: 5 vs. 2
  misc_feature: MA Experiment 108528 PARAMETER Experiment Name: Zm_Imbibed_Seeds_P Parameter: Organism Value: Zea mays
  misc_feature: MA Experiment 108528 PARAMETER Experiment Name: Zm_Imbibed_Seeds_P Parameter: Plant Line Value: 35A19
  misc_feature: MA Experiment 108528 PARAMETER Experiment Name: Zm_Imbibed_Seeds_P Parameter: Tissue Value: Aerial vs. Embryo
  misc_feature: MA Experiment ID: 108530 Result: Up-regulated in Transcription
  misc_feature: MA Experiment 108530 PARAMETER Experiment Name: Zm_Imbibed_Seeds_P Parameter: Age (day) Value: 6 vs. 2
  misc_feature: MA Experiment 108530 PARAMETER Experiment Name: Zm_Imbibed_Seeds_P Parameter: Organism Value: Zea mays
  misc_feature: MA Experiment 108530 PARAMETER Experiment Name: Zm_Imbibed_Seeds_P Parameter: Plant Line Value: 35A19
  misc_feature: MA Experiment 108530 PARAMETER Experiment Name: Zm_Imbibed_Seeds_P Parameter: Tissue Value: Aerial vs. Embryo
  misc_feature: MA Experiment ID: 108545 Result: Up-regulated in Transcription
  misc_feature: MA Experiment 108545 PARAMETER Experiment Name: Zm_Imbibed_Seeds_P Parameter: Age (day) Value: 3 vs. 2
  misc_feature: MA Experiment 108545 PARAMETER Experiment Name: Zm_Imbibed_Seeds_P Parameter: Organism Value: Zea mays
  misc_feature: MA Experiment 108545 PARAMETER Experiment Name: Zm_Imbibed_Seeds_P Parameter: Plant Line Value: 35A19
  misc_feature: MA Experiment 108545 PARAMETER Experiment Name: Zm_Imbibed_Seeds_P Parameter: Tissue Value: Aerial vs. Embryo
  misc_feature: MA Experiment ID: 108547 Result: Up-regulated in Transcription
  misc_feature: MA Experiment 108547 PARAMETER Experiment Name: Zm_Imbibed_Seeds_P Parameter: Age (day) Value: 4 vs. 2
  misc_feature: MA Experiment 108547 PARAMETER Experiment Name: Zm_Imbibed_Seeds_P Parameter: Organism Value: Zea mays
  misc_feature: MA Experiment 108547 PARAMETER Experiment Name: Zm_Imbibed_Seeds_P Parameter: Plant Line Value: 35A19
  misc_feature: MA Experiment 108547 PARAMETER Experiment Name: Zm_Imbibed_Seeds_P Parameter: Tissue Value: Aerial vs. Embryo
  misc_feature: MA Experiment ID: 108559 Result: Down-regulated in Transcription
  misc_feature: MA Experiment 108559 PARAMETER Experiment Name: Zm_5mM_NO_P Parameter: Age (day) Value: 8
  misc_feature: MA Experiment 108559 PARAMETER Experiment Name: Zm_5mM_NO_P Parameter: Organism Value: Zea mays
  misc_feature: MA Experiment 108559 PARAMETER Experiment Name: Zm_5mM_NO_P Parameter: Plant Line Value: 35A19
  misc_feature: MA Experiment 108559 PARAMETER Experiment Name: Zm_5mM_NO_P Parameter: Timepoint (hr) Value: 12
  misc_feature: MA Experiment 108559 PARAMETER Experiment Name: Zm_5mM_NO_P Parameter: Tissue Value: Aerial
  misc_feature: MA Experiment 108559 PARAMETER Experiment Name: Zm_5mM_NO_P Parameter: Treatment Value: 5mM NO vs. No Treatment
  misc_feature: MA Experiment ID: 20000480 Result: Down-regulated in Transcription
  misc_feature: MA Experiment 20000480 PARAMETER Experiment Name: Zm_Drought_P Parameter: Age (day) Value: 11
  misc_feature: MA Experiment 20000480 PARAMETER Experiment Name: Zm_Drought_P Parameter: Organism Value: Zea mays
  misc_feature: MA Experiment 20000480 PARAMETER Experiment Name: Zm_Drought_P Parameter: Plant Line Value: 35A19
  misc_feature: MA Experiment 20000480 PARAMETER Experiment Name: Zm_Drought_P Parameter: Timepoint (hr) Value: 72
  misc_feature: MA Experiment 20000480 PARAMETER Experiment Name: Zm_Drought_P Parameter: Tissue Value: Aerial
  misc_feature: MA Experiment 20000480 PARAMETER Experiment Name: Zm_Drought_P Parameter: Treatment Value: Drought vs. No Drought
  misc_feature: MA Experiment ID: 20000535 Result: Down-regulated in Transcription
  misc_feature: MA Experiment 20000535 PARAMETER Experiment Name: Zm_Hybrid_Seed_Dev_P Parameter: DAP Value: 30 vs. 12
  misc_feature: MA Experiment 20000535 PARAMETER Experiment Name: Zm_Hybrid_Seed_Dev_P Parameter: Organism Value: Zea mays
  misc_feature: MA Experiment 20000535 PARAMETER Experiment Name: Zm_Hybrid_Seed_Dev_P Parameter: Plant Line Value: 35A19
  misc_feature: MA Experiment 20000535 PARAMETER Experiment Name: Zm_Hybrid_Seed_Dev_P Parameter: Tissue Value: Embryo vs. Unfert Floret

SEQ ID NO: 13644 - protein, 348 aa, Zea mays subsp. mays; identical to SEQ ID NO: 8475
  peptide (1)..(348): Ceres Seq. ID no. 12546335
  misc_feature (132)..(313): Pfam Name: Clp protease Pfam Description: Clp protease
  misc_feature (132)..(313): Pfam Name: Clp protease Pfam Description: Clp protease
  misc_feature (90)..(346): Homolog of NCBI NO: 38344435 NR Description: OSJNBa0038O10.7 [Oryza sativa (japonica
  misc_feature (119)..(323): Homolog of NCBI NO: 18420643 NR Description: ATP-dependent Clp protease proteolytic subunit
  misc_feature (123)..(316): Homolog of NCBI NO: 31238393 NR Description: ENSANGP00000017225 [Anopheles gambiae]
  misc_feature (69)..(314): Homolog of NCBI NO: 34882298 NR Description: similar to ClpP protease [Rattus norvegicus]
  misc_feature (123)..(321): Homolog of NCBI NO: 6685315 NR Description: ATP-dependent Clp protease proteolytic subunit
  misc_feature (83)..(314): Homolog of NCBI NO: 8393156 NR Description: caseinolytic protease, ATP-dependent, proteolytic
  misc_feature (119)..(314): Homolog of NCBI NO: 5174419 NR Description: endopeptidase Clp precursor; ATP-dependent
  misc_feature (83)..(314): Homolog of NCBI NO: 8393156 NR Description: caseinolytic protease, ATP-dependent, proteolytic
  misc_feature (123)..(321): Homolog of NCBI NO: 6685315 NR Description: ATP-dependent Clp protease proteolytic subunit
  misc_feature (69)..(314): Homolog of NCBI NO: 34882298 NR Description: similar to ClpP protease [Rattus norvegicus]
  misc_feature (123)..(316): Homolog of NCBI NO: 31238393 NR Description: ENSANGP00000017225 [Anopheles gambiae]
  misc_feature (119)..(323): Homolog of NCBI NO: 18420643 NR Description: ATP-dependent Clp protease proteolytic subunit
  misc_feature (90)..(346): Homolog of NCBI NO: 38344435 NR Description: OSJNBa0038O10.7 [Oryza sativa (japonica
  misc_feature (123)..(316): Homolog of NCBI NO: 23014984 NR Description: hypothetical protein [Magnetospirillum
  misc_feature (119)..(321): Homolog of NCBI NO: 20129427 NR Description: CG5045-PA [Drosophila melanogaster]
  misc_feature (123)..(316): Homolog of NCBI NO: 22967580 NR Description: hypothetical protein [Rhodospirillum rubrum]
  misc_feature (119)..(314): Homolog of NCBI NO: 5174419 NR Description: endopeptidase Clp precursor; ATP-dependent
  misc_feature (123)..(316): Homolog of NCBI NO: 23014984 NR Description: hypothetical protein [Magnetospirillum
  misc_feature (119)..(321): Homolog of NCBI NO: 20129427 NR Description: CG5045-PA [Drosophila melanogaster]
  misc_feature (123)..(316): Homolog of NCBI NO: 22967580 NR Description: hypothetical protein [Rhodospirillum rubrum]

SEQ ID NO: 13645 - protein, 302 aa, Zea mays subsp. mays; identical to SEQ ID NO: 8476
  peptide (1)..(302): Ceres Seq. ID no. 12546336
  misc_feature (86)..(267): Pfam Name: Clp protease Pfam Description: Clp protease
  misc_feature (86)..(267): Pfam Name: Clp protease Pfam Description: Clp protease
  misc_feature (44)..(300): Homolog of NCBI NO: 38344435 NR Description: OSJNBa0038O10.7 [Oryza sativa (japonica
  misc_feature (73)..(277): Homolog of NCBI NO: 18420643 NR Description: ATP-dependent Clp protease proteolytic subunit
  misc_feature (77)..(270): Homolog of NCBI NO: 31238393 NR Description: ENSANGP00000017225 [Anopheles gambiae]
  misc_feature (23)..(268): Homolog of NCBI NO: 34882298 NR Description: similar to ClpP protease [Rattus norvegicus]
  misc_feature (77)..(275): Homolog of NCBI NO: 6685315 NR Description: ATP-dependent Clp protease proteolytic subunit
  misc_feature (73)..(277): Homolog of NCBI NO: 18420643 NR Description: ATP-dependent Clp protease proteolytic subunit
  misc_feature (23)..(268): Homolog of NCBI NO: 34882298 NR Description: similar to ClpP protease [Rattus norvegicus]
  misc_feature (77)..(270): Homolog of NCBI NO: 22967580 NR Description: hypothetical protein [Rhodospirillum rubrum]
  misc_feature (73)..(275): Homolog of NCBI NO: 20129427 NR Description: CG5045-PA [Drosophila melanogaster]
  misc_feature (77)..(270): Homolog of NCBI NO: 23014984 NR Description: hypothetical protein [Magnetospirillum
  misc_feature (73)..(268): Homolog of NCBI NO: 5174419 NR Description: endopeptidase Clp precursor; ATP-dependent
  misc_feature (37)..(268): Homolog of NCBI NO: 8393156 NR Description: caseinolytic protease, ATP-dependent, proteolytic
  misc_feature (77)..(275): Homolog of NCBI NO: 6685315 NR Description: ATP-dependent Clp protease proteolytic subunit
  misc_feature (77)..(270): Homolog of NCBI NO: 31238393 NR Description: ENSANGP00000017225 [Anopheles gambiae]
  misc_feature (44)..(300): Homolog of NCBI NO: 38344435 NR Description: OSJNBa0038O10.7 [Oryza sativa (japonica
  misc_feature (37)..(268): Homolog of NCBI NO: 8393156 NR Description: caseinolytic protease, ATP-dependent, proteolytic
  misc_feature (73)..(268): Homolog of NCBI NO: 5174419 NR Description: endopeptidase Clp precursor; ATP-dependent
  misc_feature (77)..(270): Homolog of NCBI NO: 23014984 NR Description: hypothetical protein [Magnetospirillum
  misc_feature (73)..(275): Homolog of NCBI NO: 20129427 NR Description: CG5045-PA [Drosophila melanogaster]
  misc_feature (77)..(270): Homolog of NCBI NO: 22967580 NR Description: hypothetical protein [Rhodospirillum rubrum]

SEQ ID NO: 13646 - protein, 223 aa, Zea mays subsp. mays; identical to SEQ ID NO: 8477
  peptide (1)..(223): Ceres Seq. ID no. 12546337
  misc_feature (7)..(188): Pfam Name: Clp protease Pfam Description: Clp protease
  misc_feature (7)..(188): Pfam Name: Clp protease Pfam Description: Clp protease
  misc_feature (1)..(196): Homolog of NCBI NO: 20129427 NR Description: CG5045-PA [Drosophila melanogaster]
  misc_feature (1)..(221): Homolog of NCBI NO: 38344435 NR Description: OSJNBa0038O10.7 [Oryza sativa (japonica
  misc_feature (1)..(191): Homolog of NCBI NO: 31238393 NR Description: ENSANGP00000017225 [Anopheles gambiae]
  misc_feature (1)..(196): Homolog of NCBI NO: 6685315 NR Description: ATP-dependent Clp protease proteolytic subunit
  misc_feature (1)..(189): Homolog of NCBI NO: 5174419 NR Description: endopeptidase Clp precursor; ATP-dependent
  misc_feature (1)..(198): Homolog of NCBI NO: 18420643 NR Description: ATP-dependent Clp protease proteolytic subunit
  misc_feature (1)..(189): Homolog of NCBI NO: 34882298 NR Description: similar to ClpP protease [Rattus norvegicus]
  misc_feature (1)..(191): Homolog of NCBI NO: 22967580 NR Description: hypothetical protein [Rhodospirillum rubrum]
  misc_feature (1)..(196): Homolog of NCBI NO: 20129427 NR Description: CG5045-PA [Drosophila melanogaster]
  misc_feature (1)..(191): Homolog of NCBI NO: 23014984 NR Description: hypothetical protein [Magnetospirillum
  misc_feature (1)..(189): Homolog of NCBI NO: 5174419 NR Description: endopeptidase Clp precursor; ATP-dependent
  misc_feature (1)..(189): Homolog of NCBI NO: 8393156 NR Description: caseinolytic protease, ATP-dependent, proteolytic
  misc_feature (1)..(196): Homolog of NCBI NO: 6685315 NR Description: ATP-dependent Clp protease proteolytic subunit
  misc_feature (1)..(191): Homolog of NCBI NO: 31238393 NR Description: ENSANGP00000017225 [Anopheles gambiae]
  misc_feature (1)..(221): Homolog of NCBI NO: 38344435 NR Description: OSJNBa0038O10.7 [Oryza sativa (japonica
  misc_feature (1)..(191): Homolog of NCBI NO: 23014984 NR Description: hypothetical protein [Magnetospirillum
  misc_feature (1)..(189): Homolog of NCBI NO: 8393156 NR Description: caseinolytic protease, ATP-dependent, proteolytic
  misc_feature (1)..(189): Homolog of NCBI NO: 34882298 NR Description: similar to ClpP protease [Rattus norvegicus]
  misc_feature (1)..(198): Homolog of NCBI NO: 18420643 NR Description: ATP-dependent Clp protease proteolytic subunit
  misc_feature (1)..(191): Homolog of NCBI NO: 22967580 NR Description: hypothetical protein [Rhodospirillum rubrum]

SEQ ID NO: 13647 - DNA, 1933 bp, Zea mays subsp. mays
  misc_feature (1)..(1933): Ceres Seq. ID no. 12454974
  misc_feature: MA Experiment ID: 20000534 Result: Down-regulated in Transcription
  misc_feature: MA Experiment 20000534 PARAMETER Experiment Name: Zm_Hybrid_Pollen_P Parameter: Age (day) Value: 8
  misc_feature: MA Experiment 20000534 PARAMETER Experiment Name: Zm_Hybrid_Pollen_P Parameter: Organism Value: Zea mays
  misc_feature: MA Experiment 20000534 PARAMETER Experiment Name: Zm_Hybrid_Pollen_P Parameter: Plant Line Value: 35A19
  misc_feature: MA Experiment 20000534 PARAMETER Experiment Name: Zm_Hybrid_Pollen_P Parameter: Tissue Value: Pollen vs. Aerial
ccccattgccgcattgctctccctcggctcggtccctctccggctctccctcacggcctcgcccactgcgccttcgaggagctccgaatcccgatcgcctcggtccccgcgagctcacatggtgggggcgcgcaccagaggctagggttcccagttcccatcattctcctgctgattaaaaccgtggggttttggagagcctgaggctgtggcggcggcaggaatgaacggggaggtggaatgcagcgtgtgccatgcgaaggtgccggtgccgccgccggtgtcgaaagcgtacgacagccaccggagcactgtgtcgtcgcggcaacgtgcgctaaacgtgctcctcgtctccggcgactgcgtccttgccggcctccagcctatattagtgtacatctcaaaagtggatgggaaattcaaatttagcccaatcagcgtgaatttcttgacagagattacaaaaattatgtttaccattgtaatgctattcatccaggctagacgtctaaaggtgggagacaagccactttttacagtttcaatatttatgcaggctgctcgcaataatgttcttctttcagtacctgcttttctctatgctatcaacaactatttgaagttcataatgcagttatattttaatcctgctagcgtgaaaatgctgagtaatctcaaggttctggtaatcgcagtgcttcttaagatgataatgaggaggcgattttccgtaatccagtgggaggcccttgcccttttgttaatcggaatatctgttaatcagctgaaatcattgccagaaggttctagtgtgctaggtcttcctgttgcagctggagcctacctatatacattgttttttgtaacagttcccgcattggcttcagtttacaacgaaaaggctcttaaaagccagtttgataccagtatttaccttcagaacttgtttctgtatggttatggtgcgatatttaactttattgggcttgttgtcactgctatcatccaagggcccagtagttttaacattctagaaggccactcaaaggccacgatgtttcttatctgcaacaatgctgcacagggcatattatcatcatttttcttcaagtatgcagatacaattttgaagaagtactcatcaacaattgcgactatcttcaccggagtagcctctgctgtgctgtttggccacacactgacgataaattttgttcttggaatttcaatagtaatcatatctatgcatcagtatctttctaaccaaattaaggacgaagtgcctagcagcaaagttgaaatggctgaagctcatgatcacagcagaaaagaacctagttatgtcaacgtgcctgattcaggggcaagtgagtctaaacaccgccatggatctgacgagaggcagccacttcttcccgtatgattttgtagaagaggcgcactgtttcctcaacagagcagcatgtaaagagagtatttttagcgggtatttgacctaattgtctctgaagcaacattggtgccatgctgttggcggggtaaagtatatgcatattcggcggcagtgacgagcttcgtgaagtacactaatagagtaatggtctttggatgaatgagtcgatacctttagcctaatgggtggtaaaactagtgtgataagatcagcgaggaataaagtcaccaccattttttcctgtcttgtgagttggtgagttgatattgatacagccatcagccgtggttctactctctctctctctttctcgcggcaccatgtaaatagaaatatcagttcatttctgatggcgcgtgccacggtgccaaccagagattttattcttgtatgtgcgtgttgcatgagagatactacggcgtgtttactgatcactgagctttgcatgtcttctgaattacagcaaaacgcctaattggc

SEQ ID NO: 13648 - protein, 399 aa, Zea mays subsp. mays
  peptide (1)..(399): Ceres Seq. ID no. 12454975
  misc_feature (101)..(337): Pfam Name: Nucleotide-sugar transporter Pfam Description: Nucleotide-sugar transporter
  misc_feature (17)..(383): Homolog of NCBI NO: 34907666 NR Description: putative transporter-like protein [Oryza sativa
  misc_feature (1)..(53): Homolog of NCBI NO: 34907666 NR Description: putative transporter-like protein [Oryza sativa
  misc_feature (2)..(399): Homolog of NCBI NO: 38345234 NR Description: OSJNBa0084K20.12 [Oryza sativa (japonica
  misc_feature (2)..(398): Homolog of NCBI NO: 18411150 NR Description: transporter-like protein; protein id: supported by cDNA: gi_13430657 [Arabidopsis thaliana] putative transporter protein [Arabidopsis thaliana]
  misc_feature (2)..(398): Homolog of NCBI NO: 26450627 NR Description: unknown protein [Arabidopsis thaliana]
  misc_feature (2)..(332): Homolog of NCBI NO: 11358902 NR Description: transporter-like protein - Arabidopsis thaliana
  misc_feature (6)..(332): Homolog of NCBI NO: 25408848 NR Description: hypothetical protein At2g43240 [imported] - thaliana >gi|3763933|gb|AAC64313.1| unknown protein [Arabidopsis
  misc_feature (211)..(383): Homolog of NCBI NO: 30689311 NR Description: expressed protein [Arabidopsis thaliana]
  misc_feature (211)..(383): Homolog of NCBI NO: 25408848 NR Description: hypothetical protein At2g43240 [imported] - thaliana >gi|3763933|gb|AAC64313.1| unknown protein [Arabidopsis
  misc_feature (6)..(332): Homolog of NCBI NO: 30689311 NR Description: expressed protein [Arabidopsis thaliana]
MNGEVECSVCHAKVPVPPPVSKAYDSHRSTVSSRQRALNVLLVSGDCVLAGLQPILVYISKVDGKFKFSPISVNFLTEITKIMFTIVMLFIQARRLKVGDKPLFTVSIFMQAARNNVLLSVPAFLYAINNYLKFIMQLYFNPASVKMLSNLKVLVIAVLLKMIMRRRFSVIQWEALALLLIGISVNQLKSLPEGSSVLGLPVAAGAYLYTLFFVTVPALASVYNEKALKSQFDTSIYLQNLFLYGYGAIFNFIGLVVTAIIQGPSSFNILEGHSKATMFLICNNAAQGILSSFFFKYADTILKKYSSTIATIFTGVASAVLFGHTLTINFVLGISIVIISMHQYLSNQIKDEVPSSKVEMAEAHDHSRKEPSYVNVPDSGASESKHRHGSDERQPLLPV

SEQ ID NO: 13649 - protein, 317 aa, Zea mays subsp. mays
  peptide (1)..(317): Ceres Seq. ID no. 12454976
  misc_feature (19)..(255): Pfam Name: Nucleotide-sugar transporter Pfam Description: Nucleotide-sugar transporter
  misc_feature (1)..(301): Homolog of NCBI NO: 34907666 NR Description: putative transporter-like protein [Oryza sativa
  misc_feature (1)..(317): Homolog of NCBI NO: 38345234 NR Description: OSJNBa0084K20.12 [Oryza sativa (japonica
  misc_feature (1)..(316): Homolog of NCBI NO: 18411150 NR Description: transporter-like protein; protein id: supported by cDNA: gi_13430657 [Arabidopsis thaliana] putative transporter protein [Arabidopsis thaliana]
  misc_feature (1)..(316): Homolog of NCBI NO: 26450627 NR Description: unknown protein [Arabidopsis thaliana]
  misc_feature (1)..(250): Homolog of NCBI NO: 11358902 NR Description: transporter-like protein - Arabidopsis thaliana
  misc_feature (1)..(250): Homolog of NCBI NO: 25408848 NR Description: hypothetical protein At2g43240 [imported] - thaliana >gi|3763933|gb|AAC64313.1| unknown protein [Arabidopsis
  misc_feature (129)..(301): Homolog of NCBI NO: 30689311 NR Description: expressed protein [Arabidopsis thaliana]
  misc_feature (129)..(301): Homolog of NCBI NO: 25408848 NR Description: hypothetical protein At2g43240 [imported] - thaliana >gi|3763933|gb|AAC64313.1| unknown protein [Arabidopsis
  misc_feature (1)..(250): Homolog of NCBI NO: 30689311 NR Description: expressed protein [Arabidopsis thaliana]
  misc_feature (1)..(316): Homolog of NCBI NO: 11358902 NR Description: transporter-like protein - Arabidopsis thaliana
MFTIVMLFIQARRLKVGDKPLFTVSIFMQAARNNVLLSVPAFLYAINNYLKFIMQLYFNPASVKMLSNLKVLVIAVLLKMIMRRRFSVIQWEALALLLIGISVNQLKSLPEGSSVLGLPVAAGAYLYTLFFVTVPALASVYNEKALKSQFDTSIYLQNLFLYGYGAIFNFIGLVVTAIIQGPSSFNILEGHSKATMFLICNNAAQGILSSFFFKYADTILKKYSSTIATIFTGVASAVLFGHTLTINFVLGISIVIISMHQYLSNQIKDEVPSSKVEMAEAHDHSRKEPSYVNVPDSGASESKHRHGSDERQPLLPV

SEQ ID NO: 13650 - protein, 312 aa, Zea mays subsp. mays
  peptide (1)..(312): Ceres Seq. ID no. 12454977
  misc_feature (14)..(250): Pfam Name: Nucleotide-sugar transporter Pfam Description: Nucleotide-sugar transporter
  misc_feature (1)..(296): Homolog of NCBI NO: 34907666 NR Description: putative transporter-like protein [Oryza sativa
  misc_feature (1)..(312): Homolog of NCBI NO: 38345234 NR Description: OSJNBa0084K20.12 [Oryza sativa (japonica
  misc_feature (1)..(311): Homolog of NCBI NO: 18411150 NR Description: transporter-like protein; protein id: supported by cDNA: gi_13430657 [Arabidopsis thaliana] putative transporter protein [Arabidopsis thaliana]
  misc_feature (1)..(311): Homolog of NCBI NO: 26450627 NR Description: unknown protein [Arabidopsis thaliana]
  misc_feature (1)..(245): Homolog of NCBI NO: 11358902 NR Description: transporter-like protein - Arabidopsis thaliana
  misc_feature (1)..(245): Homolog of NCBI NO: 25408848 NR Description: hypothetical protein At2g43240 [imported] - thaliana >gi|3763933|gb|AAC64313.1| unknown protein [Arabidopsis
  misc_feature (124)..(296): Homolog of NCBI NO: 30689311 NR Description: expressed protein [Arabidopsis thaliana]
  misc_feature (124)..(296): Homolog of NCBI NO: 25408848 NR Description: hypothetical protein At2g43240 [imported] - thaliana >gi|3763933|gb|AAC64313.1| unknown protein [Arabidopsis
  misc_feature (1)..(245): Homolog of NCBI NO: 30689311 NR Description: expressed protein [Arabidopsis thaliana]
  misc_feature (1)..(311): Homolog of NCBI NO: 11358902 NR Description: transporter-like protein - Arabidopsis thaliana
MLFIQARRLKVGDKPLFTVSIFMQAARNNVLLSVPAFLYAINNYLKFIMQLYFNPASVKMLSNLKVLVIAVLLKMIMRRRFSVIQWEALALLLIGISVNQLKSLPEGSSVLGLPVAAGAYLYTLFFVTVPALASVYNEKALKSQFDTSIYLQNLFLYGYGAIFNFIGLVVTAIIQGPSSFNILEGHSKATMFLICNNAAQGILSSFFFKYADTILKKYSSTIATIFTGVASAVLFGHTLTINFVLGISIVIISMHQYLSNQIKDEVPSSKVEMAEAHDHSRKEPSYVNVPDSGASESKHRHGSDERQPLLPV

SEQ ID NO: 13651 - DNA, 463 bp, Zea mays subsp. mays
  misc_feature (1)..(463): Ceres Seq. ID no. 2871588
  misc_feature: MA Experiment ID: 108543 Result: Up-regulated in Transcription
gtgactcgagccgttggagatccacactttcctccctccatcgtttctcgatctctcgaccgggcgagggcgacgccgcccgcgcgcgcgccatggatgtggagtacgacgtgatcgtgctgggcaccgggctcaaggagtgcatcctcagcggcctcctctctgtggaccgcctcaaggtgttgcacatggacaggaatgactactacggcggagactccacatcgctcaatctcaatcagctctggaaacggttcaagggtgaagaaacaccgcctgcgcacataggagctagcagagactacaacgttgatatggttccaaagtttatgatggcaaatggtaccttggttcgtgtgctcattcatactggtgtcaccaagtacatgtccttcaaagctgtggatggaagctatgttttcaaacaagggaaagatccacaaggttccttctactgacatgg

SEQ ID NO: 13652 - protein, 151 aa, Zea mays subsp. mays
  peptide (1)..(151): Ceres Seq. ID no. 2871589
  misc_feature (31)..(144): Pfam Name: GDP dissociation inhibitor Pfam Description: GDP dissociation inhibitor
  misc_feature (31)..(144): Homolog of NCBI NO: 33146460 NR Description: putative GDP dissociation inhibitor [Oryza sativa
  misc_feature (31)..(144): Homolog of NCBI NO: 7489478 NR Description: GDP dissociation inhibitor protein - rice
  misc_feature (32)..(142): Homolog of NCBI NO: 7489424 NR Description: probable GDP dissociation inhibitor protein - (fragment) >gi|3355623|emb|CAA03964.1| partial sequence, homology
  misc_feature (31)..(144): Homolog of NCBI NO: 7489479 NR Description: GDP dissociation inhibitor protein - rice
  misc_feature (31)..(144): Homolog of NCBI NO: 1550740 NR Description: GDP-associated inhibitor [Arabidopsis thaliana]
  misc_feature (31)..(144): Homolog of NCBI NO: 21592535 NR Description: GDP dissociation inhibitor [Arabidopsis thaliana]
  misc_feature (31)..(144): Homolog of NCBI NO: 15224814 NR Description: GDP dissociation inhibitor; protein id: supported by cDNA: 29536., supported by cDNA: gi_13605640, by cDNA: gi_15215777, supported by cDNA: gi_1655423, supported by
  misc_feature (31)..(144): Homolog of NCBI NO: 17473582 NR Description: GDP dissociation inhibitor [Arabidopsis thaliana]
  misc_feature (31)..(144): Homolog of NCBI NO: 15232210 NR Description: Rab GDP dissociation inhibitor; protein id: supported by cDNA: gi_19698844, supported by cDNA: gi_2446980
  misc_feature (31)..(144): Homolog of NCBI NO: 3175990 NR Description: GDP dissociation inhibitor [Cicer arietinum]
DSSRWRSTLSSLHRFSISRPGEGDAARARAMDVEYDVIVLGTGLKECILSGLLSVDRLKVLHMDRNDYYGGDSTSLNLNQLWKRFKGEETPPAHIGASRDYNVDMVPKFMMANGTLVRVLIHTGVTKYMSFKAVDGSYVFKQGKDPQGSFY

SEQ ID NO: 13653 - protein, 121 aa, Zea mays subsp. mays
  peptide (1)..(121): Ceres Seq. ID no. 2871590
  misc_feature (1)..(114): Pfam Name: GDP dissociation inhibitor Pfam Description: GDP dissociation inhibitor
  misc_feature (1)..(114): Homolog of NCBI NO: 33146460 NR Description: putative GDP dissociation inhibitor [Oryza sativa
  misc_feature (1)..(114): Homolog of NCBI NO: 7489478 NR Description: GDP dissociation inhibitor protein - rice
  misc_feature (2)..(112): Homolog of NCBI NO: 7489424 NR Description: probable GDP dissociation inhibitor protein - (fragment) >gi|3355623|emb|CAA03964.1| partial sequence, homology
  misc_feature (1)..(114): Homolog of NCBI NO: 7489479 NR Description: GDP dissociation inhibitor protein - rice
  misc_feature (1)..(114): Homolog of NCBI NO: 1550740 NR Description: GDP-associated inhibitor [Arabidopsis thaliana]
  misc_feature (1)..(114): Homolog of NCBI NO: 15224814 NR Description: GDP dissociation inhibitor; protein id: supported by cDNA: 29536., supported by cDNA: gi_13605640, by cDNA: gi_15215777, supported by cDNA: gi_1655423, supported by
  misc_feature (1)..(114): Homolog of NCBI NO: 21592535 NR Description: GDP dissociation inhibitor [Arabidopsis thaliana]
  misc_feature (1)..(114): Homolog of NCBI NO: 17473582 NR Description: GDP dissociation inhibitor [Arabidopsis thaliana]
  misc_feature (1)..(114): Homolog of NCBI NO: 15232210 NR Description: Rab GDP dissociation inhibitor; protein id: supported by cDNA: gi_19698844, supported by cDNA: gi_2446980
  misc_feature (1)..(114): Homolog of NCBI NO: 3175990 NR Description: GDP dissociation inhibitor [Cicer arietinum]
MDVEYDVIVLGTGLKECILSGLLSVDRLKVLHMDRNDYYGGDSTSLNLNQLWKRFKGEETPPAHIGASRDYNVDMVPKFMMANGTLVRVLIHTGVTKYMSFKAVDGSYVFKQGKDPQGSFY

SEQ ID NO: 13654 - protein, 89 aa, Zea mays subsp. mays
  peptide (1)..(89): Ceres Seq. ID no. 2871591
  misc_feature (1)..(82): Pfam Name: GDP dissociation inhibitor Pfam Description: GDP dissociation inhibitor
  misc_feature (1)..(82): Homolog of NCBI NO: 33146460 NR Description: putative GDP dissociation inhibitor [Oryza sativa
  misc_feature (1)..(82): Homolog of NCBI NO: 7489478 NR Description: GDP dissociation inhibitor protein - rice
  misc_feature (1)..(80): Homolog of NCBI NO: 7489424 NR Description: probable GDP dissociation inhibitor protein - (fragment) >gi|3355623|emb|CAA03964.1| partial sequence, homology
  misc_feature (1)..(82): Homolog of NCBI NO: 7489479 NR Description: GDP dissociation inhibitor protein - rice
  misc_feature (1)..(82): Homolog of NCBI NO: 1550740 NR Description: GDP-associated inhibitor [Arabidopsis thaliana]
  misc_feature (1)..(82): Homolog of NCBI NO: 21592535 NR Description: GDP dissociation inhibitor [Arabidopsis thaliana]
  misc_feature (1)..(82): Homolog of NCBI NO: 17473582 NR Description: GDP dissociation inhibitor [Arabidopsis thaliana]
  misc_feature (1)..(82): Homolog of NCBI NO: 15224814 NR Description: GDP dissociation inhibitor; protein id: supported by cDNA: 29536., supported by cDNA: gi_13605640, by cDNA: gi_15215777, supported by cDNA: gi_1655423, supported by
  misc_feature (1)..(82): Homolog of NCBI NO: 15232210 NR Description: Rab GDP dissociation inhibitor; protein id: supported by cDNA: gi_19698844, supported by cDNA: gi_2446980
  misc_feature (1)..(82): Homolog of NCBI NO: 3175990 NR Description: GDP dissociation inhibitor [Cicer arietinum]
MDRNDYYGGDSTSLNLNQLWKRFKGEETPPAHIGASRDYNVDMVPKFMMANGTLVRVLIHTGVTKYMSFKAVDGSYVFKQGKDPQGSFY

SEQ ID NO: 13655 - DNA, 739 bp, Zea mays subsp. mays
  misc_feature (1)..(739): Ceres Seq. ID no. 12376756
  misc_feature: MA Experiment ID: 108528 Result: Up-regulated in Transcription
  misc_feature: MA Experiment 108528 PARAMETER Experiment Name: Zm_Imbibed_Seeds_P Parameter: Age (day) Value: 5 vs. 2
  misc_feature: MA Experiment 108528 PARAMETER Experiment Name: Zm_Imbibed_Seeds_P Parameter: Organism Value: Zea mays
  misc_feature: MA Experiment 108528 PARAMETER Experiment Name: Zm_Imbibed_Seeds_P Parameter: Plant Line Value: 35A19
  misc_feature: MA Experiment 108528 PARAMETER Experiment Name: Zm_Imbibed_Seeds_P Parameter: Tissue Value: Aerial vs. Embryo
  misc_feature: MA Experiment ID: 108530 Result: Up-regulated in Transcription
  misc_feature: MA Experiment 108530 PARAMETER Experiment Name: Zm_Imbibed_Seeds_P Parameter: Age (day) Value: 6 vs. 2
  misc_feature: MA Experiment 108530 PARAMETER Experiment Name: Zm_Imbibed_Seeds_P Parameter: Organism Value: Zea mays
  misc_feature: MA Experiment 108530 PARAMETER Experiment Name: Zm_Imbibed_Seeds_P Parameter: Plant Line Value: 35A19
  misc_feature: MA Experiment 108530 PARAMETER Experiment Name: Zm_Imbibed_Seeds_P Parameter: Tissue Value: Aerial vs. Embryo
  misc_feature: MA Experiment ID: 108547 Result: Up-regulated in Transcription
  misc_feature: MA Experiment 108547 PARAMETER Experiment Name: Zm_Imbibed_Seeds_P Parameter: Age (day) Value: 4 vs. 2
  misc_feature: MA Experiment 108547 PARAMETER Experiment Name: Zm_Imbibed_Seeds_P Parameter: Organism Value: Zea mays
  misc_feature: MA Experiment 108547 PARAMETER Experiment Name: Zm_Imbibed_Seeds_P Parameter: Plant Line Value: 35A19
  misc_feature: MA Experiment 108547 PARAMETER Experiment Name: Zm_Imbibed_Seeds_P Parameter: Tissue Value: Aerial vs. Embryo
aaaccgagcgtacgccatggatcgcgagtggggctccaagcccggcagcggcggtgccgcctccgcccagaatgaggctattgaccggcgggagcgtctccgccgcctggccctcgagaccatcgacctcgccaaggatccctatttcatgcgcaaccacctcggcagctatgagtgcaagctgtgcctgacgctgcacaacaacgaggggaactacctagcccacacgcaagggaagaggcaccataccaacctcgccaagcgcgccgcccgagaggccaaggatgcgcccgcgcagccccagcccaacaagcgcaagcttgtcctgacgttcttatggatcctgaagggtcttctcgaggtggtctgcacatttggaagcatggtgtttgcaagcatccttcttgttcgtggtatatggtctggggtgacatacatcagagaaaaccgttacagctatattcaccggatcgacaacgatgagaaccgatggagcagagtccagactgctggttaatattttgctttccttatctatgaacagacacactctgcgttgataggctgtatagtacaaaaagaaaagatatggtcagcaagtgcnaactatgatgattgccattgctagacctcgcggctaaggctgtctctagcagtaagcctctctctagcagcgtgcgttatattaatcttctagaccccgtggttaaggctgcctctancagcgttatcttttttg

SEQ ID NO: 13656 - protein, 171 aa, Zea mays subsp. mays
  peptide (1)..(171): Ceres Seq. ID no. 12376757
  misc_feature (54)..(106): Homolog of NCBI NO: 34902138 NR Description: hypothetical protein [Oryza sativa (japonica group)] >gi|29893604|gb|AAP06858.1| hypothetical protein [Oryza
  misc_feature (6)..(57): Homolog of NCBI NO: 34902138 NR Description: hypothetical protein [Oryza sativa (japonica group)] >gi|29893604|gb|AAP06858.1| hypothetical protein [Oryza
  misc_feature (6)..(107): Homolog of NCBI NO: 7488346 NR Description: probable spliceosome-associated protein SAP62
  misc_feature (6)..(107): Homolog of NCBI NO: 18403023 NR Description: spliceosome associated protein-family; protein At2g32600.1, supported by cDNA: gi_15450714, supported by cDNA: [Arabidopsis thaliana] >gi|15450715|gb|AAK96629.1|
  misc_feature (11)..(164): Homolog of NCBI NO: 21361376 NR Description: splicing factor 3a, subunit 2, 66kDa; Spliceosome
  misc_feature (11)..(107): Homolog of NCBI NO: 27371271 NR Description: Similar to splicing factor 3a, subunit 2, 66kDa
  misc_feature (11)..(164): Homolog of NCBI NO: 34862283 NR Description: similar to Splicing factor 3A subunit 2
  misc_feature (11)..(107): Homolog of NCBI NO: 30931324 NR Description: Unknown (protein for MGC:64703) [Mus musculus]
  misc_feature (11)..(107): Homolog of NCBI NO: 28278443 NR Description: Similar to splicing factor 3a, subunit 2, 66kDa
  misc_feature (11)..(164): Homolog of NCBI NO: 627605 NR Description: spliceosome-associated protein SAP 62 - human
NRAYAMDREWGSKPGSGGAASAQNEAIDRRERLRRLALETIDLAKDPYFMRNHLGSYECKLCLTLHNNEGNYLAHTQGKRHHTNLAKRAAREAKDAPAQPQPNKRKLVLTFLWILKGLLEVVCTFGSMVFASILLVRGIWSGVTYIRENRYSYIHRIDNDENRWSRVQTAG

SEQ ID NO: 13657 - protein, 166 aa, Zea mays subsp. mays
  peptide (1)..(166): Ceres Seq. ID no. 12376758
  misc_feature (49)..(101): Homolog of NCBI NO: 34902138 NR Description: hypothetical protein [Oryza sativa (japonica group)] >gi|29893604|gb|AAP06858.1| hypothetical protein [Oryza
  misc_feature (1)..(52): Homolog of NCBI NO: 34902138 NR Description: hypothetical protein [Oryza sativa (japonica group)] >gi|29893604|gb|AAP06858.1| hypothetical protein [Oryza
  misc_feature (1)..(102): Homolog of NCBI NO: 7488346 NR Description: probable spliceosome-associated protein SAP62
  misc_feature (1)..(102): Homolog of NCBI NO: 18403023 NR Description: spliceosome associated protein-family; protein At2g32600.1, supported by cDNA: gi_15450714, supported by cDNA: [Arabidopsis thaliana] >gi|15450715|gb|AAK96629.1|
  misc_feature (6)..(159): Homolog of NCBI NO: 21361376 NR Description: splicing factor 3a, subunit 2, 66kDa; Spliceosome
  misc_feature (6)..(102): Homolog of NCBI NO: 27371271 NR Description: Similar to splicing factor 3a, subunit 2, 66kDa
  misc_feature (6)..(159): Homolog of NCBI NO: 34862283 NR Description: similar to Splicing factor 3A subunit 2
  misc_feature (6)..(102): Homolog of NCBI NO: 30931324 NR Description: Unknown (protein for MGC:64703) [Mus musculus]
  misc_feature (6)..(102): Homolog of NCBI NO: 28278443 NR Description: Similar to splicing factor 3a, subunit 2, 66kDa
  misc_feature (6)..(159): Homolog of NCBI NO: 627605 NR Description: spliceosome-associated protein SAP 62 - human
MDREWGSKPGSGGAASAQNEAIDRRERLRRLALETIDLAKDPYFMRNHLGSYECKLCLTLHNNEGNYLAHTQGKRHHTNLAKRAAREAKDAPAQPQPNKRKLVLTFLWILKGLLEVVCTFGSMVFASILLVRGIWSGVTYIRENRYSYIHRIDNDENRWSRVQTAG

SEQ ID NO: 13658 - protein, 122 aa, Zea mays subsp. mays
  peptide (1)..(122): Ceres Seq. ID no. 12376759
  misc_feature (5)..(57): Homolog of NCBI NO: 34902138 NR Description: hypothetical protein [Oryza sativa (japonica group)] >gi|29893604|gb|AAP06858.1| hypothetical protein [Oryza
  misc_feature (1)..(58): Homolog of NCBI NO: 7488346 NR Description: probable spliceosome-associated protein SAP62
  misc_feature (1)..(58): Homolog of NCBI NO: 18403023 NR Description: spliceosome associated protein-family; protein At2g32600.1, supported by cDNA: gi_15450714, supported by cDNA: [Arabidopsis thaliana] >gi|15450715|gb|AAK96629.1|
  misc_feature (1)..(115): Homolog of NCBI NO: 21361376 NR Description: splicing factor 3a, subunit 2, 66kDa; Spliceosome
  misc_feature (1)..(58): Homolog of NCBI NO: 27371271 NR Description: Similar to splicing factor 3a, subunit 2, 66kDa
  misc_feature (1)..(115): Homolog of NCBI NO: 34862283 NR Description: similar to Splicing factor 3A subunit 2
  misc_feature (1)..(58): Homolog of NCBI NO: 30931324 NR Description: Unknown (protein for MGC:64703) [Mus musculus]
  misc_feature (1)..(58): Homolog of NCBI NO: 28278443 NR Description: Similar to splicing factor 3a, subunit 2, 66kDa
  misc_feature (1)..(115): Homolog of NCBI NO: 627605 NR Description: spliceosome-associated protein SAP 62 - human
  misc_feature (1)..(115): Homolog of NCBI NO: 10800150 NR Description: splicing factor 3a, subunit 2; spliceosomal gene 62; splicing factor 3a, subunit 2, 66kD [Mus musculus] Splicing factor 3A subunit 2 (Spliceosome associated protein 62)
MRNHLGSYECKLCLTLHNNEGNYLAHTQGKRHHTNLAKRAAREAKDAPAQPQPNKRKLVLTFLWILKGLLEVVCTFGSMVFASILLVRGIWSGVTYIRENRYSYIHRIDNDENRWSRVQTAG

SEQ ID NO: 13659 - DNA, 2245 bp, Zea mays subsp. mays
  misc_feature (1)..(2245): Ceres Seq. ID no. 12455032
  misc_feature: MA Experiment ID: 108504 Result: Down-regulated in Transcription
  misc_feature: MA Experiment 108504 PARAMETER Experiment Name: Zm_Drought_P Parameter: Age (day) Value: 8
  misc_feature: MA Experiment 108504 PARAMETER Experiment Name: Zm_Drought_P Parameter: Organism Value: Zea mays
  misc_feature: MA Experiment 108504 PARAMETER Experiment Name: Zm_Drought_P Parameter: Plant Line Value: 35A19
  misc_feature: MA Experiment 108504 PARAMETER Experiment Name: Zm_Drought_P Parameter: Timepoint (hr) Value: 12
  misc_feature: MA Experiment 108504 PARAMETER Experiment Name: Zm_Drought_P Parameter: Tissue Value: Aerial
  misc_feature: MA Experiment 108504 PARAMETER Experiment Name: Zm_Drought_P Parameter: Treatment Value: Drought vs. No Drought
  misc_feature: MA Experiment ID: 108529 Result: Down-regulated in Transcription
  misc_feature: MA Experiment 108529 PARAMETER Experiment Name: Zm_Imbibed_Seeds_P Parameter: Age (day) Value: 5 vs. 2
  misc_feature: MA Experiment 108529 PARAMETER Experiment Name: Zm_Imbibed_Seeds_P Parameter: Organism Value: Zea mays
  misc_feature: MA Experiment 108529 PARAMETER Experiment Name: Zm_Imbibed_Seeds_P Parameter: Plant Line Value: 35A19
  misc_feature: MA Experiment 108529 PARAMETER Experiment Name: Zm_Imbibed_Seeds_P Parameter: Tissue Value: Roots vs. Embryo
  misc_feature: MA Experiment ID: 108535 Result: Up-regulated in Transcription
  misc_feature: MA Experiment 108535 PARAMETER Experiment Name: Zm_Meristem_P Parameter: Age (day) Value: 8
  misc_feature: MA Experiment 108535 PARAMETER Experiment Name: Zm_Meristem_P Parameter: Organism Value: Zea mays
  misc_feature: MA Experiment 108535 PARAMETER Experiment Name: Zm_Meristem_P Parameter: Plant Line Value: 35A19
  misc_feature: MA Experiment 108535 PARAMETER Experiment Name: Zm_Meristem_P Parameter: Tissue Value: Root Meristem vs. Above Root Meristem
  misc_feature: MA Experiment ID: 108544 Result: Down-regulated in Transcription
  misc_feature: MA Experiment ID: 108597 Result: Down-regulated in Transcription
  misc_feature: MA Experiment 108597 PARAMETER Experiment Name: Zm_100uM_ABA_P Parameter: Age (day) Value: 9
  misc_feature: MA Experiment 108597 PARAMETER Experiment Name: Zm_100uM_ABA_P Parameter: Organism Value: Zea mays
  misc_feature: MA Experiment 108597 PARAMETER Experiment Name: Zm_100uM_ABA_P Parameter: Plant Line Value: 35A19
  misc_feature: MA Experiment 108597 PARAMETER Experiment Name: Zm_100uM_ABA_P Parameter: Timepoint (hr) Value: 24
  misc_feature: MA Experiment 108597 PARAMETER Experiment Name: Zm_100uM_ABA_P Parameter: Tissue Value: Aerial
  misc_feature: MA Experiment 108597 PARAMETER Experiment Name: Zm_100uM_ABA_P Parameter: Treatment Value: 100uM ABA vs. No Treatment
  misc_feature: MA Experiment ID: 108689 Result: Down-regulated in Transcription
  misc_feature: MA Experiment 108689 PARAMETER Experiment Name: Zm_Drought_Roots_P Parameter: Age (day) Value: 9
  misc_feature: MA Experiment 108689 PARAMETER Experiment Name: Zm_Drought_Roots_P Parameter: Organism Value: Zea mays
  misc_feature: MA Experiment 108689 PARAMETER Experiment Name: Zm_Drought_Roots_P Parameter: Plant Line Value: 35A19
  misc_feature: MA Experiment 108689 PARAMETER Experiment Name: Zm_Drought_Roots_P Parameter: Timepoint (hr) Value: 24
  misc_feature: MA Experiment 108689 PARAMETER Experiment Name: Zm_Drought_Roots_P Parameter: Tissue Value: Roots
  misc_feature: MA Experiment 108689 PARAMETER Experiment Name: Zm_Drought_Roots_P Parameter: Treatment Value: Drought vs. No Drought
  misc_feature: MA Experiment ID: 20000477 Result: Down-regulated in Transcription
  misc_feature: MA Experiment 20000477 PARAMETER Experiment Name: Zm_5mM_SA_P Parameter: Age (day) Value: 10
  misc_feature: MA Experiment 20000477 PARAMETER Experiment Name: Zm_5mM_SA_P Parameter: Organism Value: Zea mays
  misc_feature: MA Experiment 20000477 PARAMETER Experiment Name: Zm_5mM_SA_P Parameter: Plant Line Value: 35A19
  misc_feature: MA Experiment 20000477 PARAMETER Experiment Name: Zm_5mM_SA_P Parameter: Timepoint (hr) Value: 48
  misc_feature: MA Experiment 20000477 PARAMETER Experiment Name: Zm_5mM_SA_P Parameter: Tissue Value: Aerial
  misc_feature: MA Experiment 20000477 PARAMETER Experiment Name: Zm_5mM_SA_P Parameter: Treatment Value: 5mM SA vs. No Treatment
  misc_feature: MA Experiment ID: 20000478 Result: Down-regulated in Transcription
  misc_feature: MA Experiment 20000478 PARAMETER Experiment Name: Zm_5mM_SA_P Parameter: Age (day) Value: 11
  misc_feature: MA Experiment 20000478 PARAMETER Experiment Name: Zm_5mM_SA_P Parameter: Organism Value: Zea mays
  misc_feature: MA Experiment 20000478 PARAMETER Experiment Name: Zm_5mM_SA_P Parameter: Plant Line Value: 35A19
  misc_feature: MA Experiment 20000478 PARAMETER Experiment Name: Zm_5mM_SA_P Parameter: Timepoint (hr) Value: 72
  misc_feature: MA Experiment 20000478 PARAMETER Experiment Name: Zm_5mM_SA_P Parameter: Tissue Value: Aerial
  misc_feature: MA Experiment 20000478 PARAMETER Experiment Name: Zm_5mM_SA_P Parameter: Treatment Value: 5mM SA vs. No Treatment
  misc_feature: MA Experiment ID: 20000479 Result: Down-regulated in Transcription
  misc_feature: MA Experiment 20000479 PARAMETER Experiment Name: Zm_Drought_P Parameter: Age (day) Value: 10
  misc_feature: MA Experiment 20000479 PARAMETER Experiment Name: Zm_Drought_P Parameter: Organism Value: Zea mays
  misc_feature: MA Experiment 20000479 PARAMETER Experiment Name: Zm_Drought_P Parameter: Plant Line Value: 35A19
  misc_feature: MA Experiment 20000479 PARAMETER Experiment Name: Zm_Drought_P Parameter: Timepoint (hr) Value: 48
  misc_feature: MA Experiment 20000479 PARAMETER Experiment Name: Zm_Drought_P Parameter: Tissue Value: Aerial
  misc_feature: MA Experiment 20000479 PARAMETER Experiment Name: Zm_Drought_P Parameter: Treatment Value: Drought vs. No Drought
  misc_feature: MA Experiment ID: 20000480 Result: Down-regulated in Transcription
  misc_feature: MA Experiment 20000480 PARAMETER Experiment Name: Zm_Drought_P Parameter: Age (day) Value: 11
  misc_feature: MA Experiment 20000480 PARAMETER Experiment Name: Zm_Drought_P Parameter: Organism Value: Zea mays
  misc_feature: MA Experiment 20000480 PARAMETER Experiment Name: Zm_Drought_P Parameter: Plant Line Value: 35A19
  misc_feature: MA Experiment 20000480 PARAMETER Experiment Name: Zm_Drought_P Parameter: Timepoint (hr) Value: 72
  misc_feature: MA Experiment 20000480 PARAMETER Experiment Name: Zm_Drought_P Parameter: Tissue Value: Aerial
  misc_feature: MA Experiment 20000480 PARAMETER Experiment Name: Zm_Drought_P Parameter: Treatment Value: Drought vs. No Drought
  misc_feature: MA Experiment ID: 20000534 Result: Down-regulated in Transcription
  misc_feature: MA Experiment 20000534 PARAMETER Experiment Name: Zm_Hybrid_Pollen_P Parameter: Age (day) Value: 8
  misc_feature: MA Experiment 20000534 PARAMETER Experiment Name: Zm_Hybrid_Pollen_P Parameter: Organism Value: Zea mays
  misc_feature: MA Experiment 20000534 PARAMETER Experiment Name: Zm_Hybrid_Pollen_P Parameter: Plant Line Value: 35A19
  misc_feature: MA Experiment 20000534 PARAMETER Experiment Name: Zm_Hybrid_Pollen_P Parameter: Tissue Value: Pollen vs. Aerial
actgccagtgccatcccattcccatccgagctgcagcgctcgacgacggggagaatagcgtggcgtgggcggcgccatgaagtacagcaaggaagataagcccgagagggcgggcggcgccggcgcagggtccagggcggtgccggtggcgctcgtcgtcgtcgtgctctgcgccttctccttctacctgggcggcatctacagcacgggacggagcctgctggactccatccagccggcgccgacggctctcctcgccctcggcgccgccacgacgacccgccgtccctccgacgacggccaggctcggccggcactggcgtccacggccgccgtggcgttccccgagtgccccgccgattaccaggactacaccccctgcaccgaccccaagcgctggcggaggtacggcaactaccgcctgagcttcatggagcggcactgcccgccgccgcccgaccggcagcagtgcctggtgccgccgcccaaggggtacaagccgcccatccggtggcccaagagcaaggaccagtgctggtaccggaacgtcccctacgactggatcaacagccagaagtccaaccagcactggctcgtcaaggagggcgaccgcttccggttccccggcggcggcaccatgttccccaacggcgtgggcgcgtacgtggacctgatgcagggcctggtcccgggcatgcgcgacggcaccgtccgcaccgcgctcgacaccggctgcggcgtcgccagctggggcggcgacctgctggggcggggcatcctcaccgtgtcgctggcgcccagggacaaccacgaggcccaggtgcagttcgcgctggagcgcggcatcccggccatcctcggcatcatctccacgcagcgcctgccgttcccgtccgccgccttcgacatggcgcactgctcgcgctgcctcatcccctggaccgagttcggcagcctctacctcctggagatccaccgcgtcctccgcccgggcggcttctgggtgctctccggcccgcccgtcaactacgagaaccgctggcacggctggaacaccaccgcgcaggcgcagaaggccgacctggacaggctcaagaagatgctggccagcatgtgcttcaagctctacagcatgaagggggacatagccgtgtggcagaagtccgccgacgcctgctacgacaagctcaccccggtcaccacgcccgccaagtgcgacgacagcgtcgaccccgacgccgcctggtacgtgcccatgcgctcctgcgtcacggctcccagccccaagtacaggaagctggggctcaacgccacgcccaagtggccacagaggctcagcgtcgccccggagcgcatcagcgtcgtcccgggcagcagcgccgccgccttcaagcaggacgacgcccggtggaagctcagggccaagcactacaagacgctgctgccggcgctggggagcgacaagatcaggaacgtcatggacatgaacaccgtgtacggaggattcgcaggcagcctcatcaaggaccccgtctgggtcatgaacgtcgtctcctcctacggcccaaactccctcggcgtcgtctacgacagagggctcatcggcgtcaaccacgactggtgtgaggcgttctcgacatatccacgcacctatgacctgttgcatcttgatggcctgttcacagcagagtctcacaggtgcgagatgaagtacgtgctccttgagatggaccgtatccttcgtcccacgggctacgccataatccgggagagcacctacttcctcgattctgtggcacccattgccaaagggatgcgatggagctgcgagaagcacagcagcgagaacaaggccgacaaggacaagatcctcgtctgccagaaaaagctttgggcaggaaagcagtgacgagagaggatcatccttcttccttccgagtataaaaaagtaggcatccagatcagttgctgctgtggtctcgatcggccaacaaggcaagaggcgcttcagtacacatggaagatgagcgagtactttctgatacaagagtgttcgcagttattatcaaaataaataagccgagtaaaactccatataggatccaacagttaccatttttcattaatcacagtttaattctttttctgtaccgacagtttgtaggcaaggaatgggtcgattcatataccatggtgagcaaatgtaagtttactccacactagatgtgtatagcttggttggtgc

SEQ ID NO: 13660 - protein, 610 aa, Zea mays subsp. mays
  peptide (1)..(610): Ceres Seq. ID no. 12455033
  misc_feature (98)..(603): Pfam Name: Putative methyltransferase Pfam Description: Putative methyltransferase
  misc_feature (8)..(606): Homolog of NCBI NO: 18415244 NR Description: putative protein; protein id: At4g19120.1, by cDNA: gi_15320409 [Arabidopsis thaliana]
  misc_feature (1)..(606): Homolog of NCBI NO: 15222494 NR Description: unknown protein; protein id: At1g31850.1
  misc_feature (1)..(606): Homolog of NCBI NO: 24417414 NR Description: unknown [Arabidopsis thaliana]
  misc_feature (106)..(560): Homolog of NCBI NO: 7487142 NR Description: hypothetical protein T18B16.90 - Arabidopsis
  misc_feature (82)..(610): Homolog of NCBI NO: 37535962 NR Description: unknown protein [Oryza sativa (japonica
  misc_feature (1)..(609): Homolog of NCBI NO: 24413975 NR Description: hypothetical protein~similar to Oryza sativa
  misc_feature (89)..(609): Homolog of NCBI NO: 15235080 NR Description: putative protein; protein id: At4g10440.1
  misc_feature (89)..(608): Homolog of NCBI NO: 18398763 NR Description: unknown protein; protein id: At1g33170.1
  misc_feature (19)..(608): Homolog of NCBI NO: 22328758 NR Description: putative protein; protein id: At4g18030.1, by cDNA: gi_15294145 [Arabidopsis thaliana] AT4g18030/T6K21_210 [Arabidopsis thaliana]
  misc_feature (75)..(610): Homolog of NCBI NO: 37537004 NR Description: hypothetical protein [Oryza sativa (japonica group)] >gi|19224990|gb|AAL86466.1| hypothetical protein [Oryza
MKYSKEDKPERAGGAGAGSRAVPVALVVVVLCAFSFYLGGIYSTGRSLLDSIQPAPTALLALGAATTTRRPSDDGQARPALASTAAVAFPECPADYQDYTPCTDPKRWRRYGNYRLSFMERHCPPPPDRQQCLVPPPKGYKPPIRWPKSKDQCWYRNVPYDWINSQKSNQHWLVKEGDRFRFPGGGTMFPNGVGAYVDLMQGLVPGMRDGTVRTALDTGCGVASWGGDLLGRGILTVSLAPRDNHEAQVQFALERGIPAILGIISTQRLPFPSAAFDMAHCSRCLIPWTEFGSLYLLEIHRVLRPGGFWVLSGPPVNYENRWHGWNTTAQAQKADLDRLKKMLASMCFKLYSMKGDIAVWQKSADACYDKLTPVTTPAKCDDSVDPDAAWYVPMRSCVTAPSPKYRKLGLNATPKWPQRLSVAPERISVVPGSSAAAFKQDDARWKLRAKHYKTLLPALGSDKIRNVMDMNTVYGGFAGSLIKDPVWVMNVVSSYGPNSLGVVYDRGLIGVNHDWCEAFSTYPRTYDLLHLDGLFTAESHRCEMKYVLLEMDRILRPTGYAIIRESTYFLDSVAPIAKGMRWSCEKHSSENKADKDKILVCQKKLWAGKQ

SEQ ID NO: 13661 - protein, 492 aa, Zea mays subsp. mays
  peptide (1)..(492): Ceres Seq. ID no. 12455034
  misc_feature (1)..(485): Pfam Name: Putative methyltransferase Pfam Description: Putative methyltransferase
  misc_feature (1)..(492): Homolog of NCBI NO: 37535962 NR Description: unknown protein [Oryza sativa (japonica
  misc_feature (1)..(491): Homolog of NCBI NO: 24413975 NR Description: hypothetical protein~similar to Oryza sativa
  misc_feature (1)..(491): Homolog of NCBI NO: 15235080 NR Description: putative protein; protein id: At4g10440.1
  misc_feature (1)..(488): Homolog of NCBI NO: 18415244 NR Description: putative protein; protein id: At4g19120.1, by cDNA: gi_15320409 [Arabidopsis thaliana]
  misc_feature (1)..(488): Homolog of NCBI NO: 24417414 NR Description: unknown [Arabidopsis thaliana]
  misc_feature (1)..(442): Homolog of NCBI NO: 7487142 NR Description: hypothetical protein T18B16.90 - Arabidopsis
  misc_feature (1)..(488): Homolog of NCBI NO: 15222494 NR Description: unknown protein; protein id: At1g31850.1
  misc_feature (1)..(490): Homolog of NCBI NO: 18398763 NR Description: unknown protein; protein id: At1g33170.1
  misc_feature (1)..(490): Homolog of NCBI NO: 22328758 NR Description: putative protein; protein id: At4g18030.1, by cDNA: gi_15294145 [Arabidopsis thaliana] AT4g18030/T6K21_210 [Arabidopsis thaliana]
  misc_feature (1)..(492): Homolog of NCBI NO: 37537004 NR Description: hypothetical protein [Oryza sativa (japonica group)] >gi|19224990|gb|AAL86466.1| hypothetical protein [Oryza
MERHCPPPPDRQQCLVPPPKGYKPPIRWPKSKDQCWYRNVPYDWINSQKSNQHWLVKEGDRFRFPGGGTMFPNGVGAYVDLMQGLVPGMRDGTVRTALDTGCGVASWGGDLLGRGILTVSLAPRDNHEAQVQFALERGIPAILGIISTQRLPFPSAAFDMAHCSRCLIPWTEFGSLYLLEIHRVLRPGGFWVLSGPPVNYENRWHGWNTTAQAQKADLDRLKKMLASMCFKLYSMKGDIAVWQKSADACYDKLTPVTTPAKCDDSVDPDAAWYVPMRSCVTAPSPKYRKLGLNATPKWPQRLSVAPERISVVPGSSAAAFKQDDARWKLRAKHYKTLLPALGSDKIRNVMDMNTVYGGFAGSLIKDPVWVMNVVSSYGPNSLGVVYDRGLIGVNHDWCEAFSTYPRTYDLLHLDGLFTAESHRCEMKYVLLEMDRILRPTGYAIIRESTYFLDSVAPIAKGMRWSCEKHSSENKADKDKILVCQKKLWAGKQ

SEQ ID NO: 13662 - protein, 423 aa, Zea mays subsp. mays
  peptide (1)..(423): Ceres Seq. ID no. 12455035
  misc_feature (1)..(416): Pfam Name: Putative methyltransferase Pfam Description: Putative methyltransferase
  misc_feature (1)..(419): Homolog of NCBI NO: 18415244 NR Description: putative protein; protein id: At4g19120.1, by cDNA: gi_15320409 [Arabidopsis thaliana]
  misc_feature (1)..(419): Homolog of NCBI NO: 15222494 NR Description: unknown protein; protein id: At1g31850.1
  misc_feature (1)..(419): Homolog of NCBI NO: 24417414 NR Description: unknown [Arabidopsis thaliana]
  misc_feature (1)..(373): Homolog of NCBI NO: 7487142 NR Description: hypothetical protein T18B16.90 - Arabidopsis
  misc_feature (1)..(423): Homolog of NCBI NO: 37535962 NR Description: unknown protein [Oryza sativa (japonica
  misc_feature (1)..(422): Homolog of NCBI NO: 24413975 NR Description: hypothetical protein~similar to Oryza sativa
  misc_feature (1)..(422): Homolog of NCBI NO: 15235080 NR Description: putative protein; protein id: At4g10440.1
  misc_feature (1)..(421): Homolog of NCBI NO: 18398763 NR Description: unknown protein; protein id: At1g33170.1
  misc_feature (1)..(421): Homolog of NCBI NO: 22328758 NR Description: putative protein; protein id: At4g18030.1, by cDNA: gi_15294145 [Arabidopsis thaliana] AT4g18030/T6K21_210 [Arabidopsis thaliana]
  misc_feature (1)..(423): Homolog of NCBI NO: 37537004 NR Description: hypothetical protein [Oryza sativa (japonica group)] >gi|19224990|gb|AAL86466.1| hypothetical protein [Oryza
MFPNGVGAYVDLMQGLVPGMRDGTVRTALDTGCGVASWGGDLLGRGILTVSLAPRDNHEAQVQFALERGIPAILGIISTQRLPFPSAAFDMAHCSRCLIPWTEFGSLYLLEIHRVLRPGGFWVLSGPPVNYENRWHGWNTTAQAQKADLDRLKKMLASMCFKLYSMKGDIAVWQKSADACYDKLTPVTTPAKCDDSVDPDAAWYVPMRSCVTAPSPKYRKLGLNATPKWPQRLSVAPERISVVPGSSAAAFKQDDARWKLRAKHYKTLLPALGSDKIRNVMDMNTVYGGFAGSLIKDPVWVMNVVSSYGPNSLGVVYDRGLIGVNHDWCEAFSTYPRTYDLLHLDGLFTAESHRCEMKYVLLEMDRILRPTGYAIIRESTYFLDSVAPIAKGMRWSCEKHSSENKADKDKILVCQKKLWAGKQ

SEQ ID NO: 13663 - DNA, 948 bp, Zea mays subsp. mays
  misc_feature (1)..(948): Ceres Seq. ID no. 13570435
  misc_feature: MA Experiment ID: 108527 Result: Up-regulated in Transcription
  misc_feature: MA Experiment 108527 PARAMETER Experiment Name: Zm_5mM_NO_P Parameter: Age (day) Value: 8
  misc_feature: MA Experiment 108527 PARAMETER Experiment Name: Zm_5mM_NO_P Parameter: Organism Value: Zea mays
  misc_feature: MA Experiment 108527 PARAMETER Experiment Name: Zm_5mM_NO_P Parameter: Plant Line Value: 35A19
  misc_feature: MA Experiment 108527 PARAMETER Experiment Name: Zm_5mM_NO_P Parameter: Timepoint (hr) Value: 6
  misc_feature: MA Experiment 108527 PARAMETER Experiment Name: Zm_5mM_NO_P Parameter: Tissue Value: Aerial
  misc_feature: MA Experiment 108527 PARAMETER Experiment Name: Zm_5mM_NO_P Parameter: Treatment Value: 5mM NO vs. No Treatment
gccgcacgaacgtgcatcctcctccttagagtcatctcctcccgagcggtgggttcggacgcgagccgcagcgacgtcgccgcggagggcctgggcgcggcttccgtgggcggttcgtgcgcgtccagcggcgtggtctcggttgagcggtcgacgacgaccaggcatcgcagccgtgaagagaagaaggccttggtggtggaggtggcggatcatgaatgcgacgacgacttgggcgccggcgagtctgacatctccgaggagctgggtgcgaaccatgaaggaaacagtactgaaggtggcatatcatcggtcgacagcgtttctagcttgctcagtgggataagctaccaagacgttagctctggctgtgcctaccgagcatcctctcatcatcaccatcagaggaggaggacatccgaagaaaagggtgcccagcaattgcgtccttccaaacccggtccaaaggcggagaaggtcggtctcagacatgangcggtggacggtcggagggccgctgaggagtggatggtcgactacgctctccggaaggaagtcaagaggctggctcgtgctcagaagaggaaagttgagatgcttgtccaggccttcgaatctgttctgcccncggtagcaatagcaagcgagaagaagcccgggcaacacgatggccttcgaaagcatgcatgtagctgacagatagatagatagaatcatagatagccgacactcatcttgagtcaggtagtagtaggacgtgacaatttgagtcaggtagatgaaacgtttcaattcagtcaaacactagtcacaacggatacaaggtttgatgctccaccaaccactgatccgttgtgaacttgtagtagaagcaggccaccgctggcaatgtggcatgccatgccatcaacctaacatggaccattntgaatgtcggctcaaaacgtg

SEQ ID NO: 13664 - protein, 231 aa, Zea mays subsp. mays
  peptide (1)..(231): Ceres Seq. ID no. 13570436
  misc_feature (135)..(211): Homolog of NCBI NO: 24637279 NR Description: pathogen-induced calmodulin-binding protein
  misc_feature (46)..(207): Homolog of NCBI NO: 24637243 NR Description: pathogen-induced calmodulin-binding protein
  misc_feature (46)..(207): Homolog of NCBI NO: 15237600 NR Description: Calmodulin-binding protein [Arabidopsis thaliana]
  misc_feature (153)..(209): Homolog of NCBI NO: 17933110 NR Description: PNCBP [Solanum tuberosum]
  misc_feature (150)..(209): Homolog of NCBI NO: 15224955 NR Description: Calmodulin-binding protein [Arabidopsis thaliana]
  misc_feature (126)..(208): Homolog of NCBI NO: 25956269 NR Description: unnamed protein product [Lotus japonicus]
  misc_feature (145)..(209): Homolog of NCBI NO: 17933110 NR Description: PNCBP [Solanum tuberosum]
  misc_feature (165)..(165): Xaa is any aa, unknown or other
  misc_feature (210)..(210): Xaa is any aa, unknown or other
AARTCILLLRVISSRAVGSDASRSDVAAEGLGAASVGGSCASSGVVSVERSTTTRHRSREEKKALVVEVADHECDDDLGAGESDISEELGANHEGNSTEGGISSVDSVSSLLSGISYQDVSSGCAYRASSHHHHQRRRTSEEKGAQQLRPSKPGPKAEKVGLRHXAVDGRRAAEEWMVDYALRKEVKRLARAQKRKVEMLVQAFESVLPXVAIASEKKPGQHDGLRKHACS

SEQ ID NO: 13665 - DNA, 842 bp, Zea mays subsp. mays; identical to SEQ ID NO: 12153
  misc_feature (1)..(842): Ceres Seq. ID no. 12413106
  misc_feature: MA Experiment ID: 108504 Result: Up-regulated in Transcription
  misc_feature: MA Experiment 108504 PARAMETER Experiment Name: Zm_Drought_P Parameter: Age (day) Value: 8
  misc_feature: MA Experiment 108504 PARAMETER Experiment Name: Zm_Drought_P Parameter: Organism Value: Zea mays
  misc_feature: MA Experiment 108504 PARAMETER Experiment Name: Zm_Drought_P Parameter: Plant Line Value: 35A19
  misc_feature: MA Experiment 108504 PARAMETER Experiment Name: Zm_Drought_P Parameter: Timepoint (hr) Value: 12
  misc_feature: MA Experiment 108504 PARAMETER Experiment Name: Zm_Drought_P Parameter: Tissue Value: Aerial
  misc_feature: MA Experiment 108504 PARAMETER Experiment Name: Zm_Drought_P Parameter: Treatment Value: Drought vs. No Drought
  misc_feature: MA Experiment ID: 108528 Result: Up-regulated in Transcription
  misc_feature: MA Experiment 108528 PARAMETER Experiment Name: Zm_Imbibed_Seeds_P Parameter: Age (day) Value: 5 vs. 2
  misc_feature: MA Experiment 108528 PARAMETER Experiment Name: Zm_Imbibed_Seeds_P Parameter: Organism Value: Zea mays
  misc_feature: MA Experiment 108528 PARAMETER Experiment Name: Zm_Imbibed_Seeds_P Parameter: Plant Line Value: 35A19
  misc_feature: MA Experiment 108528 PARAMETER Experiment Name: Zm_Imbibed_Seeds_P Parameter: Tissue Value: Aerial vs. Embryo
  misc_feature: MA Experiment ID: 108529 Result: Up-regulated in Transcription
  misc_feature: MA Experiment 108529 PARAMETER Experiment Name: Zm_Imbibed_Seeds_P Parameter: Age (day) Value: 5 vs. 2
  misc_feature: MA Experiment 108529 PARAMETER Experiment Name: Zm_Imbibed_Seeds_P Parameter: Organism Value: Zea mays
  misc_feature: MA Experiment 108529 PARAMETER Experiment Name: Zm_Imbibed_Seeds_P Parameter: Plant Line Value: 35A19
  misc_feature: MA Experiment 108529 PARAMETER Experiment Name: Zm_Imbibed_Seeds_P Parameter: Tissue Value: Roots vs. Embryo
  misc_feature: MA Experiment ID: 108530 Result: Up-regulated in Transcription
  misc_feature: MA Experiment 108530 PARAMETER Experiment Name: Zm_Imbibed_Seeds_P Parameter: Age (day) Value: 6 vs. 2
  misc_feature: MA Experiment 108530 PARAMETER Experiment Name: Zm_Imbibed_Seeds_P Parameter: Organism Value: Zea mays
  misc_feature: MA Experiment 108530 PARAMETER Experiment Name: Zm_Imbibed_Seeds_P Parameter: Plant Line Value: 35A19
  misc_feature: MA Experiment 108530 PARAMETER Experiment Name: Zm_Imbibed_Seeds_P Parameter: Tissue Value: Aerial vs. Embryo
  misc_feature: MA Experiment ID: 108534 Result: Down-regulated in Transcription
  misc_feature: MA Experiment 108534 PARAMETER Experiment Name: Zm_4deg_Cold_P Parameter: Age (hr) Value: 8
  misc_feature: MA Experiment 108534 PARAMETER Experiment Name: Zm_4deg_Cold_P Parameter: Organism Value: Zea mays
  misc_feature: MA Experiment 108534 PARAMETER Experiment Name: Zm_4deg_Cold_P Parameter: Plant Line Value: 35A19
  misc_feature: MA Experiment 108534 PARAMETER Experiment Name: Zm_4deg_Cold_P Parameter: Temperature (deg C) Value: 4 vs. 22
  misc_feature: MA Experiment 108534 PARAMETER Experiment Name: Zm_4deg_Cold_P Parameter: Timepoint (hr) Value: 6
  misc_feature: MA Experiment 108534 PARAMETER Experiment Name: Zm_4deg_Cold_P Parameter: Tissue Value: Aerial
  misc_feature: MA Experiment ID: 108535 Result: Down-regulated in Transcription
  misc_feature: MA Experiment 108535 PARAMETER Experiment Name: Zm_Meristem_P Parameter: Age (day) Value: 8
  misc_feature: MA Experiment 108535 PARAMETER Experiment Name: Zm_Meristem_P Parameter: Organism Value: Zea mays
  misc_feature: MA Experiment 108535 PARAMETER Experiment Name: Zm_Meristem_P Parameter: Plant Line Value: 35A19
  misc_feature: MA Experiment 108535 PARAMETER Experiment Name: Zm_Meristem_P Parameter: Tissue Value: Root Meristem vs. Above Root Meristem
  misc_feature: MA Experiment ID: 108544 Result: Up-regulated in Transcription
  misc_feature: MA Experiment ID: 108545 Result: Up-regulated in Transcription
  misc_feature: MA Experiment 108545 PARAMETER Experiment Name: Zm_Imbibed_Seeds_P Parameter: Age (day) Value: 3 vs. 2
  misc_feature: MA Experiment 108545 PARAMETER Experiment Name: Zm_Imbibed_Seeds_P Parameter: Organism Value: Zea mays
  misc_feature: MA Experiment 108545 PARAMETER Experiment Name: Zm_Imbibed_Seeds_P Parameter: Plant Line Value: 35A19
  misc_feature: MA Experiment 108545 PARAMETER Experiment Name: Zm_Imbibed_Seeds_P Parameter: Tissue Value: Aerial vs. Embryo
  misc_feature: MA Experiment ID: 108546 Result: Up-regulated in Transcription
  misc_feature: MA Experiment 108546 PARAMETER Experiment Name: Zm_Imbibed_Seeds_P Parameter: Age (day) Value: 3 vs. 2
  misc_feature: MA Experiment 108546 PARAMETER Experiment Name: Zm_Imbibed_Seeds_P Parameter: Organism Value: Zea mays
  misc_feature: MA Experiment 108546 PARAMETER Experiment Name: Zm_Imbibed_Seeds_P Parameter: Plant Line Value: 35A19
  misc_feature: MA Experiment 108546 PARAMETER Experiment Name: Zm_Imbibed_Seeds_P Parameter: Tissue Value: Roots vs. Embryo
  misc_feature: MA Experiment ID: 108547 Result: Up-regulated in Transcription
  misc_feature: MA Experiment 108547 PARAMETER Experiment Name: Zm_Imbibed_Seeds_P Parameter: Age (day) Value: 4 vs. 2
  misc_feature: MA Experiment 108547 PARAMETER Experiment Name: Zm_Imbibed_Seeds_P Parameter: Organism Value: Zea mays
  misc_feature: MA Experiment 108547 PARAMETER Experiment Name: Zm_Imbibed_Seeds_P Parameter: Plant Line Value: 35A19
  misc_feature: MA Experiment 108547 PARAMETER Experiment Name: Zm_Imbibed_Seeds_P Parameter: Tissue Value: Aerial vs. Embryo
  misc_feature: MA Experiment ID: 108556 Result: Up-regulated in Transcription
  misc_feature: MA Experiment 108556 PARAMETER Experiment Name: Zm_Drought_P Parameter: Age (day) Value: 9
  misc_feature: MA Experiment 108556 PARAMETER Experiment Name: Zm_Drought_P Parameter: Organism Value: Zea mays
  misc_feature: MA Experiment 108556 PARAMETER Experiment Name: Zm_Drought_P Parameter: Plant Line Value: 35A19
  misc_feature: MA Experiment 108556 PARAMETER Experiment Name: Zm_Drought_P Parameter: Timepoint (hr) Value: 24
  misc_feature: MA Experiment 108556 PARAMETER Experiment Name: Zm_Drought_P Parameter: Tissue Value: Aerial
  misc_feature: MA Experiment 108556 PARAMETER Experiment Name: Zm_Drought_P Parameter: Treatment Value: Drought vs. No Drought
  misc_feature: MA Experiment ID: 108687 Result: Down-regulated in Transcription
  misc_feature: MA Experiment 108687 PARAMETER Experiment Name: Zm_Embryos-Flowers__P Parameter: Tissue Value: Embryo vs. Aerial+
  misc_feature: MA Experiment ID: 108688 Result: Down-regulated in Transcription
  misc_feature: MA Experiment 108688 PARAMETER Experiment Name: Zm_Embryos-Flowers__P Parameter: Tissue Value: Immature Flowers vs. Aerial+
  misc_feature: MA Experiment ID: 108689 Result: Up-regulated in Transcription
  misc_feature: MA Experiment 108689 PARAMETER Experiment Name: Zm_Drought_Roots_P Parameter: Age (day) Value: 9
  misc_feature: MA Experiment 108689 PARAMETER Experiment Name: Zm_Drought_Roots_P Parameter: Organism Value: Zea mays
  misc_feature: MA Experiment 108689 PARAMETER Experiment Name: Zm_Drought_Roots_P Parameter: Plant Line Value: 35A19
  misc_feature: MA Experiment 108689 PARAMETER Experiment Name: Zm_Drought_Roots_P Parameter: Timepoint (hr) Value: 24
  misc_feature: MA Experiment 108689 PARAMETER Experiment Name: Zm_Drought_Roots_P Parameter: Tissue Value: Roots
  misc_feature: MA Experiment 108689 PARAMETER Experiment Name: Zm_Drought_Roots_P Parameter: Treatment Value: Drought vs. No Drought
  misc_feature: MA Experiment ID: 20000479 Result: Up-regulated in Transcription
  misc_feature: MA Experiment 20000479 PARAMETER Experiment Name: Zm_Drought_P Parameter: Age (day) Value: 10
  misc_feature: MA Experiment 20000479 PARAMETER Experiment Name: Zm_Drought_P Parameter: Organism Value: Zea mays
  misc_feature: MA Experiment 20000479 PARAMETER Experiment Name: Zm_Drought_P Parameter: Plant Line Value: 35A19
  misc_feature: MA Experiment 20000479 PARAMETER Experiment Name: Zm_Drought_P Parameter: Timepoint (hr) Value: 48
  misc_feature: MA Experiment 20000479 PARAMETER Experiment Name: Zm_Drought_P Parameter: Tissue Value: Aerial
  misc_feature: MA Experiment 20000479 PARAMETER Experiment Name: Zm_Drought_P Parameter: Treatment Value: Drought vs. No Drought
  misc_feature: MA Experiment ID: 20000492 Result: Down-regulated in Transcription
  misc_feature: MA Experiment 20000492 PARAMETER Experiment Name: Zm_Hybrid_Seed_Dev_P Parameter: DAP Value: 12
  misc_feature: MA Experiment 20000492 PARAMETER Experiment Name: Zm_Hybrid_Seed_Dev_P Parameter: Organism Value: Zea mays
  misc_feature: MA Experiment 20000492 PARAMETER Experiment Name: Zm_Hybrid_Seed_Dev_P Parameter: Plant Line Value: 35A19
  misc_feature: MA Experiment 20000492 PARAMETER Experiment Name: Zm_Hybrid_Seed_Dev_P Parameter: Tissue Value: Fert Kernel vs. Unfert Floret

SEQ ID NO: 13666 - protein, 228 aa, Zea mays subsp. mays; identical to SEQ ID NO: 12154
  peptide (1)..(228): Ceres Seq. ID no. 12413107
  misc_feature (70)..(208): Pfam Name: ATP synthase Pfam Description: ATP synthase
  misc_feature (70)..(208): Pfam Name: ATP synthase Pfam Description: ATP synthase
  misc_feature (34)..(208): Homolog of NCBI NO: 27818005 NR Description: OSJNBb0041J06.11 [Oryza sativa (japonica
  misc_feature (34)..(208): Homolog of NCBI NO: 18412632 NR Description: coded for by A. thaliana cDNA AA041141; protein At4g04640.1, supported by cDNA: 6687., supported by cDNA: supported by cDNA: gi_17473928, supported by cDNA: gi_20148352
  misc_feature (31)..(208): Homolog of NCBI NO: 114640 NR Description: ATP synthase gamma chain, chloroplast precursor
  misc_feature (31)..(208): Homolog of NCBI NO: 231610 NR Description: ATP synthase gamma chain, chloroplast precursor
  misc_feature (34)..(205): Homolog of NCBI NO: 114643 NR Description: ATP synthase gamma chain, chloroplast precursor
  misc_feature (34)..(208): Homolog of NCBI NO: 18412632 NR Description: coded for by A. thaliana cDNA AA041141; protein At4g04640.1, supported by cDNA: 6687., supported by cDNA: supported by cDNA: gi_17473928, supported by cDNA: gi_20148352
  misc_feature (31)..(208): Homolog of NCBI NO: 231610 NR Description: ATP synthase gamma chain, chloroplast precursor
  misc_feature (62)..(198): Homolog of NCBI NO: 228698 NR Description: CF1 ATP synthase:SUBUNIT=gamma
  misc_feature (62)..(198): Homolog of NCBI NO: 114638 NR Description: ATP synthase gamma chain, chloroplast precursor
  misc_feature (91)..(208): Homolog of NCBI NO: 5708095 NR Description: ATP synthase gamma chain, chloroplast precursor
  misc_feature (58)..(208): Homolog of NCBI NO: 15218281 NR Description: ATP synthase gamma-subunit, putative; protein id: supported by cDNA: gi_17529041 [Arabidopsis thaliana]
  misc_feature (67)..(205): Homolog of NCBI NO: 755801 NR Description: ATP synthase [Spinacia oleracea]
  misc_feature (34)..(205): Homolog of NCBI NO: 114643 NR Description: ATP synthase gamma chain, chloroplast precursor
  misc_feature (31)..(208): Homolog of NCBI NO: 114640 NR Description: ATP synthase gamma chain, chloroplast precursor
  misc_feature (34)..(208): Homolog of NCBI NO: 27818005 NR Description: OSJNBb0041J06.11 [Oryza sativa (japonica
  misc_feature (67)..(205): Homolog of NCBI NO: 755801 NR Description: ATP synthase [Spinacia oleracea]
  misc_feature (58)..(208): Homolog of NCBI NO: 15218281 NR Description: ATP synthase gamma-subunit, putative; protein id: supported by cDNA: gi_17529041 [Arabidopsis thaliana]
  misc_feature (91)..(208): Homolog of NCBI NO: 5708095 NR Description: ATP synthase gamma chain, chloroplast precursor
  misc_feature (62)..(198): Homolog of NCBI NO: 114638 NR Description: ATP synthase gamma chain, chloroplast precursor
  misc_feature (62)..(198): Homolog of NCBI NO: 228698 NR Description: CF1 ATP synthase:SUBUNIT=gamma

SEQ ID NO: 13667 - protein, 195 aa, Zea mays subsp. mays; identical to SEQ ID NO: 12155
  peptide (1)..(195): Ceres Seq. ID no. 12413108
  misc_feature (37)..(175): Pfam Name: ATP synthase Pfam Description: ATP synthase
  misc_feature (37)..(175): Pfam Name: ATP synthase Pfam Description: ATP synthase
  misc_feature (1)..(175): Homolog of NCBI NO: 27818005 NR Description: OSJNBb0041J06.11 [Oryza sativa (japonica
  misc_feature (1)..(175): Homolog of NCBI NO: 18412632 NR Description: coded for by A. thaliana cDNA AA041141; protein At4g04640.1, supported by cDNA: 6687., supported by cDNA: supported by cDNA: gi_17473928, supported by cDNA: gi_20148352
  misc_feature (1)..(175): Homolog of NCBI NO: 114640 NR Description: ATP synthase gamma chain, chloroplast precursor
  misc_feature (1)..(175): Homolog of NCBI NO: 231610 NR Description: ATP synthase gamma chain, chloroplast precursor
  misc_feature (1)..(172): Homolog of NCBI NO: 114643 NR Description: ATP synthase gamma chain, chloroplast precursor
  misc_feature (1)..(175): Homolog of NCBI NO: 18412632 NR Description: coded for by A. thaliana cDNA AA041141; protein At4g04640.1, supported by cDNA: 6687., supported by cDNA: supported by cDNA: gi_17473928, supported by cDNA: gi_20148352
  misc_feature (1)..(175): Homolog of NCBI NO: 231610 NR Description: ATP synthase gamma chain, chloroplast precursor
  misc_feature (29)..(165): Homolog of NCBI NO: 228698 NR Description: CF1 ATP synthase:SUBUNIT=gamma
  misc_feature (29)..(165): Homolog of NCBI NO: 114638 NR Description: ATP synthase gamma chain, chloroplast precursor
  misc_feature (58)..(175): Homolog of NCBI NO: 5708095 NR Description: ATP synthase gamma chain, chloroplast precursor
  misc_feature (25)..(175): Homolog of NCBI NO: 15218281 NR Description: ATP synthase gamma-subunit, putative; protein id: supported by cDNA: gi_17529041 [Arabidopsis thaliana]
  misc_feature (34)..(172): Homolog of NCBI NO: 755801 NR Description: ATP synthase [Spinacia oleracea]
  misc_feature (1)..(172): Homolog of NCBI NO: 114643 NR Description: ATP synthase gamma chain, chloroplast precursor
  misc_feature (1)..(175): Homolog of NCBI NO: 114640 NR Description: ATP synthase gamma chain, chloroplast precursor
  misc_feature (1)..(175): Homolog of NCBI NO: 27818005 NR Description: OSJNBb0041J06.11 [Oryza sativa (japonica
  misc_feature (34)..(172): Homolog of NCBI NO: 755801 NR Description: ATP synthase [Spinacia oleracea]
  misc_feature (25)..(175): Homolog of NCBI NO: 15218281 NR Description: ATP synthase gamma-subunit, putative; protein id: supported by cDNA: gi_17529041 [Arabidopsis thaliana]
  misc_feature (58)..(175): Homolog of NCBI NO: 5708095 NR Description: ATP synthase gamma chain, chloroplast precursor
  misc_feature (29)..(165): Homolog of NCBI NO: 114638 NR Description: ATP synthase gamma chain, chloroplast precursor
  misc_feature (29)..(165): Homolog of NCBI NO: 228698 NR Description: CF1 ATP synthase:SUBUNIT=gamma

SEQ ID NO: 13668 - protein, 138 aa, Zea mays subsp. mays; identical to SEQ ID NO: 12156
  peptide (1)..(138): Ceres Seq. ID no. 12413109
  misc_feature (1)..(118): Pfam Name: ATP synthase Pfam Description: ATP synthase
  misc_feature (1)..(118): Pfam Name: ATP synthase Pfam Description: ATP synthase
  misc_feature (1)..(118): Homolog of NCBI NO: 27818005 NR Description: OSJNBb0041J06.11 [Oryza sativa (japonica
  misc_feature (1)..(118): Homolog of NCBI NO: 18412632 NR Description: coded for by A. thaliana cDNA AA041141; protein At4g04640.1, supported by cDNA: 6687., supported by cDNA: supported by cDNA: gi_17473928, supported by cDNA: gi_20148352
  misc_feature (1)..(118): Homolog of NCBI NO: 114640 NR Description: ATP synthase gamma chain, chloroplast precursor
  misc_feature (1)..(118): Homolog of NCBI NO: 231610 NR Description: ATP synthase gamma chain, chloroplast precursor
  misc_feature (1)..(115): Homolog of NCBI NO: 114643 NR Description: ATP synthase gamma chain, chloroplast precursor
  misc_feature (1)..(118): Homolog of NCBI NO: 18412632 NR Description: coded for by A. thaliana cDNA AA041141; protein At4g04640.1, supported by cDNA: 6687., supported by cDNA: supported by cDNA: gi_17473928, supported by cDNA: gi_20148352
  misc_feature (1)..(118): Homolog of NCBI NO: 231610 NR Description: ATP synthase gamma chain, chloroplast precursor
  misc_feature (1)..(108): Homolog of NCBI NO: 228698 NR Description: CF1 ATP synthase:SUBUNIT=gamma
  misc_feature (1)..(108): Homolog of NCBI NO: 114638 NR Description: ATP synthase gamma chain, chloroplast precursor
  misc_feature (1)..(118): Homolog of NCBI NO: 5708095 NR Description: ATP synthase gamma chain, chloroplast precursor
  misc_feature (1)..(118): Homolog of NCBI NO: 15218281 NR Description: ATP synthase gamma-subunit, putative; protein id: supported by cDNA: gi_17529041 [Arabidopsis thaliana]
  misc_feature (1)..(115): Homolog of NCBI NO: 755801 NR Description: ATP synthase [Spinacia oleracea]
  misc_feature (1)..(115): Homolog of NCBI NO: 114643 NR Description: ATP synthase gamma chain, chloroplast precursor
  misc_feature (1)..(118): Homolog of NCBI NO: 114640 NR Description: ATP synthase gamma chain, chloroplast precursor
  misc_feature (1)..(118): Homolog of NCBI NO: 27818005 NR Description: OSJNBb0041J06.11 [Oryza sativa (japonica
  misc_feature (1)..(115): Homolog of NCBI NO: 755801 NR Description: ATP synthase [Spinacia oleracea]
  misc_feature (1)..(118): Homolog of NCBI NO: 15218281 NR Description: ATP synthase gamma-subunit, putative; protein id: supported by cDNA: gi_17529041 [Arabidopsis thaliana]
  misc_feature (1)..(118): Homolog of NCBI NO: 5708095 NR Description: ATP synthase gamma chain, chloroplast precursor
  misc_feature (1)..(108): Homolog of NCBI NO: 114638 NR Description: ATP synthase gamma chain, chloroplast precursor
  misc_feature (1)..(108): Homolog of NCBI NO: 228698 NR Description: CF1 ATP synthase:SUBUNIT=gamma

SEQ ID NO: 13669 - DNA, 2725 bp, Zea mays subsp. mays
  misc_feature (1)..(2725): Ceres Seq. ID no. 12436176
  misc_feature: MA Experiment ID: 108527 Result: Up-regulated in Transcription
  misc_feature: MA Experiment 108527 PARAMETER Experiment Name: Zm_5mM_NO_P Parameter: Age (day) Value: 8
  misc_feature: MA Experiment 108527 PARAMETER Experiment Name: Zm_5mM_NO_P Parameter: Organism Value: Zea mays
  misc_feature: MA Experiment 108527 PARAMETER Experiment Name: Zm_5mM_NO_P Parameter: Plant Line Value: 35A19
  misc_feature: MA Experiment 108527 PARAMETER Experiment Name: Zm_5mM_NO_P Parameter: Timepoint (hr) Value: 6
  misc_feature: MA Experiment 108527 PARAMETER Experiment Name: Zm_5mM_NO_P Parameter: Tissue Value: Aerial
  misc_feature: MA Experiment 108527 PARAMETER Experiment Name: Zm_5mM_NO_P Parameter: Treatment Value: 5mM NO vs. No Treatment
  misc_feature: MA Experiment ID: 108559 Result: Up-regulated in Transcription
  misc_feature: MA Experiment 108559 PARAMETER Experiment Name: Zm_5mM_NO_P Parameter: Age (day) Value: 8
  misc_feature: MA Experiment 108559 PARAMETER Experiment Name: Zm_5mM_NO_P Parameter: Organism Value: Zea mays
  misc_feature: MA Experiment 108559 PARAMETER Experiment Name: Zm_5mM_NO_P Parameter: Plant Line Value: 35A19
  misc_feature: MA Experiment 108559 PARAMETER Experiment Name: Zm_5mM_NO_P Parameter: Timepoint (hr) Value: 12
  misc_feature: MA Experiment 108559 PARAMETER Experiment Name: Zm_5mM_NO_P Parameter: Tissue Value: Aerial
  misc_feature: MA Experiment 108559 PARAMETER Experiment Name: Zm_5mM_NO_P Parameter: Treatment Value: 5mM NO vs. No Treatment
aaacaaaaaaaatctcagaacacacacacacacacacacctctatcgccccgacctcgacgcgacccctctcgcttggatccggacggcccggtccctccgccctcccatgcgcacggcgccgccgccgccgacatgacgctcgcctccctcgcccgcgccctcggccggtccgcgcgctcctcccgcccgcgccagggtttccagctcgggggcctccggcagccgcccgcgccaccgctaccgccgcctgtccacggcggtgagggtggggcggcaggatttgttcgcagctacctgactgcggtctcgtcggcagctcttcggaagccatccgcgggcaagaccgtggattggagatatgtcctcgccagcccacatttccgacgcctcttctcggacgggtccaagaagaactacgagaactattaccccaagggtaagaaggaggtgcctaaaggagatggtacaaacaagtctgaatctaagcaggaatccaatacagatgaaggatggaattttcaggataatgctatgaaacacatgcagaatttccttgcgcctttattgattcttggcctgatgctatcatccatgtcatctagctctgcagaccagaaggagataagcttccaagagttcaagaacaagttactagaacctggtttagttgatcgcattgttgtttcaaataaatcagtagcgaaggtctacatcaggaattcacctcatccaaagagccaaggccaagatagtgatatccatattactaccactgatgctccaggcaagcctgctcccagcagatgcaagtattacttcaatattggtagtgttgatttgtttgaagagaagttagaggaagcccaggaagctttgggaatagatccacatgattttgtcccagtaacttatgttgctgaagtaaattggttccaagaagttatgaggtttgccccaacagcattgattattggtctattatatttcacgggaaaaaggatgcagagtggtttcaatattggaggtggtgctggcaaaggaagaggaggtattttcaacattggaaaagctacagtgatgaagatggacaagaactccaaaaataaggtgtttttttaaggatgtagccggttgtgacgaagcaaaacaagaaataatggagtttgtgcatttccttaaaaaccctaagaagtatgaagatttgggagctaaaatacccaaaggtgctctacttgtaggccctcctgggacagggaagactttgctcgccaaagctacagcaggagagtctggtgtgccatttttgtctatttctggttcagatttcatggaaatgtttgttggtgttggaccgtccagggtacggaacttgttccaagaagctaggcagtgtgctcctagtattgtattcattgacgaaatcgatgctattggtcgtgcaagaggacgtggaggtttttcaggttcaaatgatgaacgtgagagtactttgaaccagctgcttgtagagatggatggatttggaacaacttctggtgttgttgttcttgctgggacaaatagacctgacatcctggataaggcattattaaggccaggaagatttgatcgccagatagcaattgacaaaccagatataaagggccgtgatcaaatattccgcatatatcttaaaaagcttaagttggacaacaaaccatcattttattcgcaaaggctagctgccttgacacctgggttcgcaggagctgacattgccaatgtttgtaatgaagctgctttaattgctgcgagaagtgaggaaactcagattaccatgcagcattttgagtccgcaattgataggattatcggtggtttggagaagaaaaatagggtcattagcaaactggagcgccgtactgttgcttaccatgaatctggacatgcagttgctggatggttcttggaacatgctgagcctcttctaaaagttacaattgttcctcgtggaacagctgctttaggctttgcacaatacgtcccaaatgaaaatcttttgatgacaaaagagcagctttttgatatgacatgcatgacattaggtggccgtgctgcagaggaggttttgattggcaaaatctcaactggtgctcagaatgacctggagaaagttaccaaaatgacatatgcacaggtcgccgtgtatggttttagtgaaaaggttgggcttctgtccttcccccagaaagatggtggtttcgaattgagcaagccttacagtaatcagacagcatccatcatcgacgatgaggtccgggaatgggttggcaaggcctacaagaaaacagttgaattgataacagagcacaaggagcaagttgcacagatcgcagaattgctgctcgagaaggaagtcctacaccaggacgatctaaccagggtactaggagaacgtccattcaaggcactggaccaaccaactacgacctctttaagaaaggtttcgaggatggtggtgacaacagccaagcaccagcagagaacgccgagctgcctgatgattcatctcccccagttggtgacgttgtacccacgtagtgtttctctcctcaacgtcagagctgtacattgagcgctcattctcgatagattcttgtttgttggttgcatcataaaaaagatctgtataaattcgcgcccaagctgattatgccactgtggaaatgcatttggatttccgt

SEQ ID NO: 13670 - protein, 485 aa, Zea mays subsp. mays
  peptide (1)..(485): Ceres Seq. ID no. 12436177
  misc_feature (219)..(423): Pfam Name: Peptidase family M41 Pfam Description: Peptidase family M41
  misc_feature (1)..(436): Homolog of NCBI NO: 15021761 NR Description: AAA-metalloprotease FtsH [Pisum sativum]
  misc_feature (1)..(431): Homolog of NCBI NO: 22329400 NR Description: unknown protein; protein id: At1g07510.1, by cDNA: gi_17381252 [Arabidopsis thaliana] At1g07510/F22G5_9 [Arabidopsis thaliana]
  misc_feature (1)..(459): Homolog of NCBI NO: 30684118 NR Description: AAA-type ATPase -related [Arabidopsis thaliana]
  misc_feature (1)..(459): Homolog of NCBI NO: 17380916 NR Description: putative AAA-type ATPase [Arabidopsis thaliana]
  misc_feature (1)..(459): Homolog of NCBI NO: 7487874 NR Description: probable AAA-type ATPase [imported] - Arabidopsis
  misc_feature (1)..(321): Homolog of NCBI NO: 25406980 NR Description: protein F22G5.10 [imported] - Arabidopsis >gi|8778569|gb|AAF79577.1|AC022464_35 F22G5.10 [Arabidopsis
  misc_feature (316)..(431): Homolog of NCBI NO: 25406980 NR Description: protein F22G5.10 [imported] - Arabidopsis >gi|8778569|gb|AAF79577.1|AC022464_35 F22G5.10 [Arabidopsis
  misc_feature (1)..(459): Homolog of NCBI NO: 6539504 NR Description: FtsH2 [Cyanidioschyzon merolae]
  misc_feature (1)..(430): Homolog of NCBI NO: 6320854 NR Description: ATPase family gene; Afg3p [Saccharomyces >gi|728820|sp|P39925|AFG3_YEAST Mitochondrial respiratory chain
  misc_feature (1)..(430): Homolog of NCBI NO: 541748 NR Description: Afg3p [Saccharomyces cerevisiae]
MEFVHFLKNPKKYEDLGAKIPKGALLVGPPGTGKTLLAKATAGESGVPFLSISGSDFMEMFVGVGPSRVRNLFQEARQCAPSIVFIDEIDAIGRARGRGGFSGSNDERESTLNQLLVEMDGFGTTSGVVVLAGTNRPDILDKALLRPGRFDRQIAIDKPDIKGRDQIFRIYLKKLKLDNKPSFYSQRLAALTPGFAGADIANVCNEAALIAARSEETQITMQHFESAIDRIIGGLEKKNRVISKLERRTVAYHESGHAVAGWFLEHAEPLLKVTIVPRGTAALGFAQYVPNENLLMTKEQLFDMTCMTLGGRAAEEVLIGKISTGAQNDLEKVTKMTYAQVAVYGFSEKVGLLSFPQKDGGFELSKPYSNQTASIIDDEVREWVGKAYKKTVELITEHKEQVAQIAELLLEKEVLHQDDLTRVLGERPFKALDQPTTTSLRKVSRMVVTTAKHQQRTPSCLMIHLPQLVTLYPRSVSLLNVRAVH

SEQ ID NO: 13671 - protein, 428 aa, Zea mays subsp. mays
  peptide (1)..(428): Ceres Seq. ID no. 12436178
  misc_feature (162)..(366): Pfam Name: Peptidase family M41 Pfam Description: Peptidase family M41
  misc_feature (1)..(379): Homolog of NCBI NO: 15021761 NR Description: AAA-metalloprotease FtsH [Pisum sativum]
  misc_feature (1)..(374): Homolog of NCBI NO: 22329400 NR Description: unknown protein; protein id: At1g07510.1, by cDNA: gi_17381252 [Arabidopsis thaliana] At1g07510/F22G5_9 [Arabidopsis thaliana]
  misc_feature (1)..(402): Homolog of NCBI NO: 30684118 NR Description: AAA-type ATPase -related [Arabidopsis thaliana]
  misc_feature (1)..(402): Homolog of NCBI NO: 17380916 NR Description: putative AAA-type ATPase [Arabidopsis thaliana]
  misc_feature (1)..(402): Homolog of NCBI NO: 7487874 NR Description: probable AAA-type ATPase [imported] - Arabidopsis
  misc_feature (1)..(264): Homolog of NCBI NO: 25406980 NR Description: protein F22G5.10 [imported] - Arabidopsis >gi|8778569|gb|AAF79577.1|AC022464_35 F22G5.10 [Arabidopsis
  misc_feature (259)..(374): Homolog of NCBI NO: 25406980 NR Description: protein F22G5.10 [imported] - Arabidopsis >gi|8778569|gb|AAF79577.1|AC022464_35 F22G5.10 [Arabidopsis
  misc_feature (1)..(402): Homolog of NCBI NO: 6539504 NR Description: FtsH2 [Cyanidioschyzon merolae]
  misc_feature (1)..(373): Homolog of NCBI NO: 6320854 NR Description: ATPase family gene; Afg3p [Saccharomyces >gi|728820|sp|P39925|AFG3_YEAST Mitochondrial respiratory chain
  misc_feature (1)..(373): Homolog of NCBI NO: 541748 NR Description: Afg3p [Saccharomyces cerevisiae]
MEMFVGVGPSRVRNLFQEARQCAPSIVFIDEIDAIGRARGRGGFSGSNDERESTLNQLLVEMDGFGTTSGVVVLAGTNRPDILDKALLRPGRFDRQIAIDKPDIKGRDQIFRIYLKKLKLDNKPSFYSQRLAALTPGFAGADIANVCNEAALIAARSEETQITMQHFESAIDRIIGGLEKKNRVISKLERRTVAYHESGHAVAGWFLEHAEPLLKVTIVPRGTAALGFAQYVPNENLLMTKEQLFDMTCMTLGGRAAEEVLIGKISTGAQNDLEKVTKMTYAQVAVYGFSEKVGLLSFPQKDGGFELSKPYSNQTASIIDDEVREWVGKAYKKTVELITEHKEQVAQIAELLLEKEVLHQDDLTRVLGERPFKALDQPTTTSLRKVSRMVVTTAKHQQRTPSCLMIHLPQLVTLYPRSVSLLNVRAVH

SEQ ID NO: 13672 - protein, 426 aa, Zea mays subsp. mays
  peptide (1)..(426): Ceres Seq. ID no. 12436179
  misc_feature (160)..(364): Pfam Name: Peptidase family M41 Pfam Description: Peptidase family M41
  misc_feature (1)..(377): Homolog of NCBI NO: 15021761 NR Description: AAA-metalloprotease FtsH [Pisum sativum]
  misc_feature (1)..(372): Homolog of NCBI NO: 22329400 NR Description: unknown protein; protein id: At1g07510.1, by cDNA: gi_17381252 [Arabidopsis thaliana] At1g07510/F22G5_9 [Arabidopsis thaliana]
  misc_feature (1)..(400): Homolog of NCBI NO: 30684118 NR Description: AAA-type ATPase -related [Arabidopsis thaliana]
  misc_feature (1)..(400): Homolog of NCBI NO: 17380916 NR Description: putative AAA-type ATPase [Arabidopsis thaliana]
  misc_feature (1)..(400): Homolog of NCBI NO: 7487874 NR Description: probable AAA-type ATPase [imported] - Arabidopsis
  misc_feature (1)..(262): Homolog of NCBI NO: 25406980 NR Description: protein F22G5.10 [imported] - Arabidopsis >gi|8778569|gb|AAF79577.1|AC022464_35 F22G5.10 [Arabidopsis
  misc_feature (257)..(372): Homolog of NCBI NO: 25406980 NR Description: protein F22G5.10 [imported] - Arabidopsis >gi|8778569|gb|AAF79577.1|AC022464_35 F22G5.10 [Arabidopsis
  misc_feature (1)..(400): Homolog of NCBI NO: 6539504 NR Description: FtsH2 [Cyanidioschyzon merolae]
  misc_feature (1)..(371): Homolog of NCBI NO: 6320854 NR Description: ATPase family gene; Afg3p [Saccharomyces >gi|728820|sp|P39925|AFG3_YEAST Mitochondrial respiratory chain
  misc_feature (1)..(371): Homolog of NCBI NO: 541748 NR Description: Afg3p [Saccharomyces cerevisiae]
MFVGVGPSRVRNLFQEARQCAPSIVFIDEIDAIGRARGRGGFSGSNDERESTLNQLLVEMDGFGTTSGVVVLAGTNRPDILDKALLRPGRFDRQIAIDKPDIKGRDQIFRIYLKKLKLDNKPSFYSQRLAALTPGFAGADIANVCNEAALIAARSEETQITMQHFESAIDRIIGGLEKKNRVISKLERRTVAYHESGHAVAGWFLEHAEPLLKVTIVPRGTAALGFAQYVPNENLLMTKEQLFDMTCMTLGGRAAEEVLIGKISTGAQNDLEKVTKMTYAQVAVYGFSEKVGLLSFPQKDGGFELSKPYSNQTASIIDDEVREWVGKAYKKTVELITEHKEQVAQIAELLLEKEVLHQDDLTRVLGERPFKALDQPTTTSLRKVSRMVVTTAKHQQRTPSCLMIHLPQLVTLYPRSVSLLNVRAVH

SEQ ID NO: 13673 - DNA, 1181 bp, Zea mays subsp. mays; identical to SEQ ID NO: 4402
  misc_feature (1)..(1181): Ceres Seq. ID no. 12419652
  misc_feature: MA Experiment ID: 108535 Result: Up-regulated in Transcription
  misc_feature: MA Experiment 108535 PARAMETER Experiment Name: Zm_Meristem_P Parameter: Age (day) Value: 8
  misc_feature: MA Experiment 108535 PARAMETER Experiment Name: Zm_Meristem_P Parameter: Organism Value: Zea mays
  misc_feature: MA Experiment 108535 PARAMETER Experiment Name: Zm_Meristem_P Parameter: Plant Line Value: 35A19
  misc_feature: MA Experiment 108535 PARAMETER Experiment Name: Zm_Meristem_P Parameter: Tissue Value: Root Meristem vs. Above Root Meristem
  misc_feature: MA Experiment ID: 108545 Result: Down-regulated in Transcription
  misc_feature: MA Experiment 108545 PARAMETER Experiment Name: Zm_Imbibed_Seeds_P Parameter: Age (day) Value: 3 vs. 2
  misc_feature: MA Experiment 108545 PARAMETER Experiment Name: Zm_Imbibed_Seeds_P Parameter: Organism Value: Zea mays
  misc_feature: MA Experiment 108545 PARAMETER Experiment Name: Zm_Imbibed_Seeds_P Parameter: Plant Line Value: 35A19
  misc_feature: MA Experiment 108545 PARAMETER Experiment Name: Zm_Imbibed_Seeds_P Parameter: Tissue Value: Aerial vs. Embryo
  misc_feature: MA Experiment ID: 108547 Result: Down-regulated in Transcription
  misc_feature: MA Experiment 108547 PARAMETER Experiment Name: Zm_Imbibed_Seeds_P Parameter: Age (day) Value: 4 vs. 2
  misc_feature: MA Experiment 108547 PARAMETER Experiment Name: Zm_Imbibed_Seeds_P Parameter: Organism Value: Zea mays
  misc_feature: MA Experiment 108547 PARAMETER Experiment Name: Zm_Imbibed_Seeds_P Parameter: Plant Line Value: 35A19
  misc_feature: MA Experiment 108547 PARAMETER Experiment Name: Zm_Imbibed_Seeds_P Parameter: Tissue Value: Aerial vs. Embryo
  misc_feature: MA Experiment ID: 20000108 Result: Up-regulated in Transcription
  misc_feature: MA Experiment 20000108 PARAMETER Experiment Name: Zm_Root-Tips_P Parameter: Age (day) Value: 12
  misc_feature: MA Experiment 20000108 PARAMETER Experiment Name: Zm_Root-Tips_P Parameter: Organism Value: Zea mays
  misc_feature: MA Experiment 20000108 PARAMETER Experiment Name: Zm_Root-Tips_P Parameter: Tissue Value: Root tips vs. Root mid region    35
  misc_feature: MA Experiment 20000108 PARAMETER Experiment Name: Zm_Root-Tips_P Parameter: Tissue Value: Root tips vs. Root mid region   Sequence Listing-Misc Features (4)

SEQ ID NO: 13674 - protein, 301 aa, Zea mays subsp. mays; identical to SEQ ID NO: 4403
  peptide (1)..(301): Ceres Seq. ID no. 12419653
  misc_feature (126)..(245): Pfam Name: Protein of unknown function (DUF568) Pfam Description: Protein of unknown function (DUF568)
  misc_feature (34)..(295): Homolog of NCBI NO: 29647484 NR Description: OJ1191_A10.2 [Oryza sativa (japonica
  misc_feature (40)..(291): Homolog of NCBI NO: 11357190 NR Description: auxin-induced protein AIR12 [imported] - thaliana (fragment) >gi|3695023|gb|AAC62613.1| unknown
  misc_feature (40)..(291): Homolog of NCBI NO: 30680258 NR Description: auxin-induced protein (AIR12) [Arabidopsis
  misc_feature (37)..(255): Homolog of NCBI NO: 15235545 NR Description: putative protein; protein id: At4g12980.1, by cDNA: 4642. [Arabidopsis thaliana] >gi|7486133|pir||T10200
  misc_feature (37)..(255): Homolog of NCBI NO: 21593814 NR Description: unknown [Arabidopsis thaliana]
  misc_feature (37)..(232): Homolog of NCBI NO: 18404500 NR Description: expressed protein; protein id: At3g25290.1, by cDNA: gi_16323199 [Arabidopsis thaliana] emb|CAB45497.1~gene_id:MJL12.25~strong similarity to unknown
  misc_feature (36)..(231): Homolog of NCBI NO: 38424013 NR Description: auxin-induced protein-like [Oryza sativa
  misc_feature (44)..(228): Homolog of NCBI NO: 18421491 NR Description: Expressed protein; protein id: At5g35735.1, by cDNA: 32450., supported by cDNA: gi_13937201 [Arabidopsis >gi|9758647|dbj|BAB09271.1| gene_id:MXH1.11~pir||T10200~similar
  misc_feature (44)..(228): Homolog of NCBI NO: 21592781 NR Description: putative membrane protein [Arabidopsis thaliana]
  misc_feature (47)..(224): Homolog of NCBI NO: 24414271 NR Description: Unknown protein [Oryza sativa (japonica
  misc_feature (159)..(159): Xaa is any aa, unknown or other
  misc_feature (162)..(162): Xaa is any aa, unknown or other
  misc_feature (176)..(176): Xaa is any aa, unknown or other

SEQ ID NO: 13675 - protein, 274 aa, Zea mays subsp. mays; identical to SEQ ID NO: 4404
  peptide (1)..(274): Ceres Seq. ID no. 12419654
  misc_feature (99)..(218): Pfam Name: Protein of unknown function (DUF568) Pfam Description: Protein of unknown function (DUF568)
  misc_feature (7)..(268): Homolog of NCBI NO: 29647484 NR Description: OJ1191_A10.2 [Oryza sativa (japonica
  misc_feature (13)..(264): Homolog of NCBI NO: 11357190 NR Description: auxin-induced protein AIR12 [imported] - thaliana (fragment) >gi|3695023|gb|AAC62613.1| unknown
  misc_feature (13)..(264): Homolog of NCBI NO: 30680258 NR Description: auxin-induced protein (AIR12) [Arabidopsis
  misc_feature (10)..(228): Homolog of NCBI NO: 15235545 NR Description: putative protein; protein id: At4g12980.1, by cDNA: 4642. [Arabidopsis thaliana] >gi|7486133|pir||T10200
  misc_feature (10)..(228): Homolog of NCBI NO: 21593814 NR Description: unknown [Arabidopsis thaliana]
  misc_feature (10)..(205): Homolog of NCBI NO: 18404500 NR Description: expressed protein; protein id: At3g25290.1, by cDNA: gi_16323199 [Arabidopsis thaliana] emb|CAB45497.1~gene_id:MJL12.25~strong similarity to unknown
  misc_feature (9)..(204): Homolog of NCBI NO: 38424013 NR Description: auxin-induced protein-like [Oryza sativa
  misc_feature (17)..(201): Homolog of NCBI NO: 18421491 NR Description: Expressed protein; protein id: At5g35735.1, by cDNA: 32450., supported by cDNA: gi_13937201 [Arabidopsis >gi|9758647|dbj|BAB09271.1| gene_id:MXH1.11~pir||T10200~similar
  misc_feature (17)..(201): Homolog of NCBI NO: 21592781 NR Description: putative membrane protein [Arabidopsis thaliana]
  misc_feature (20)..(197): Homolog of NCBI NO: 24414271 NR Description: Unknown protein [Oryza sativa (japonica
  misc_feature (132)..(132): Xaa is any aa, unknown or other
  misc_feature (135)..(135): Xaa is any aa, unknown or other
  misc_feature (149)..(149): Xaa is any aa, unknown or other

SEQ ID NO: 13676 - protein, 259 aa, Zea mays subsp. mays; identical to SEQ ID NO: 4405
  peptide (1)..(259): Ceres Seq. ID no. 12419655
  misc_feature (5)..(242): Homolog of NCBI NO: 17027049 NR Description: elongation factor-1 alpha [Chimarra rossi]
  misc_feature (9)..(242): Homolog of NCBI NO: 17027071 NR Description: elongation factor-1 alpha [Xiphocentron sp.
  misc_feature (160)..(160): Xaa is any aa, unknown or other
  misc_feature (162)..(162): Xaa is any aa, unknown or other
  misc_feature (177)..(177): Xaa is any aa, unknown or other

SEQ ID NO: 13677 - DNA, 432 bp, Zea mays subsp. mays
  misc_feature (1)..(432): Ceres Seq. ID no. 2899074
  misc_feature: MA Experiment ID: 108527 Result: Down-regulated in Transcription
  misc_feature: MA Experiment 108527 PARAMETER Experiment Name: Zm_5mM_NO_P Parameter: Age (day) Value: 8
  misc_feature: MA Experiment 108527 PARAMETER Experiment Name: Zm_5mM_NO_P Parameter: Organism Value: Zea mays
  misc_feature: MA Experiment 108527 PARAMETER Experiment Name: Zm_5mM_NO_P Parameter: Plant Line Value: 35A19
  misc_feature: MA Experiment 108527 PARAMETER Experiment Name: Zm_5mM_NO_P Parameter: Timepoint (hr) Value: 6
  misc_feature: MA Experiment 108527 PARAMETER Experiment Name: Zm_5mM_NO_P Parameter: Tissue Value: Aerial
  misc_feature: MA Experiment 108527 PARAMETER Experiment Name: Zm_5mM_NO_P Parameter: Treatment Value: 5mM NO vs. No Treatment
  misc_feature: MA Experiment ID: 108543 Result: Up-regulated in Transcription
  misc_feature: MA Experiment ID: 108687 Result: Down-regulated in Transcription
  misc_feature: MA Experiment 108687 PARAMETER Experiment Name: Zm_Embryos-Flowers__P Parameter: Tissue Value: Embryo vs. Aerial+
  misc_feature: MA Experiment ID: 20000633 Result: Down-regulated in Transcription
  misc_feature: MA Experiment 20000633 PARAMETER Experiment Name: Zm_Herbicide-Treatments_P Parameter: Timepoint (hr) Value: 4
  misc_feature: MA Experiment 20000633 PARAMETER Experiment Name: Zm_Herbicide-Treatments_P Parameter: Tissue Value: Aerial
  misc_feature: MA Experiment 20000633 PARAMETER Experiment Name: Zm_Herbicide-Treatments_P Parameter: Treatment Value: Trimec vs. No Treatment
  misc_feature: MA Experiment ID: 20001613 Result: Up-regulated in Transcription
  misc_feature: MA Experiment 20001613 PARAMETER Experiment Name: Zm_50ppm_KNO3_L-to-H_P Parameter: Age (day) Value: 20
  misc_feature: MA Experiment 20001613 PARAMETER Experiment Name: Zm_50ppm_KNO3_L-to-H_P Parameter: Organism Value: Zea mays
  misc_feature: MA Experiment 20001613 PARAMETER Experiment Name: Zm_50ppm_KNO3_L-to-H_P Parameter: Plant Line Value: 35A19
  misc_feature: MA Experiment 20001613 PARAMETER Experiment Name: Zm_50ppm_KNO3_L-to-H_P Parameter: Timepoint (hr) Value: 24
  misc_feature: MA Experiment 20001613 PARAMETER Experiment Name: Zm_50ppm_KNO3_L-to-H_P Parameter: Tissue Value: Roots
  misc_feature: MA Experiment 20001613 PARAMETER Experiment Name: Zm_50ppm_KNO3_L-to-H_P Parameter: Treatment Value: 50ppm KNO3 vs. 50ppm KCl
acagatagaggaggtttgcccctgcacaccgctgcgctactgggaggagcacaagtgtatcgctgtggctgcggcgcccggcagtccgccacaagcacacgcgcacacaggggccaagcgcctacacctacaganganagacaaggtctgccgtccgcgcgtgcgcggaagangggacggaggaagaaggctgccagcaatcagagatggaggtggggttcttgggtctgggcatcatgggcaaggcaatggcgaccaacctcctccgccacggcttccgcgtcaccgtctggaacaggaccctcgccaagtgccaagagctcgccgcgctcggcgccaccgtcggggagacgcctgcctccgtcgtctccaagtgcagatacaccatcgccatgctctccgancccagcgccgccctatcagtcgtcttcg

SEQ ID NO: 13678 - protein, 144 aa, Zea mays subsp. mays
  peptide (1)..(144): Ceres Seq. ID no. 2899075
  misc_feature (45)..(45): Xaa is any aa, unknown or other
  misc_feature (46)..(46): Xaa is any aa, unknown or other
  misc_feature (58)..(58): Xaa is any aa, unknown or other
  misc_feature (135)..(135): Xaa is any aa, unknown or other
TDRGGLPLHTAALLGGAQVYRCGCGARQSATSTRAHRGQAPTPTXXRQGLPSARARKXGRRKKAASNQRWRWGSWVWASWARQWRPTSSATASASPSGTGPSPSAKSSPRSAPPSGRRLPPSSPSADTPSPCSPXPAPPYQSSS

SEQ ID NO: 13679 - protein, 143 aa, Zea mays subsp. mays
  peptide (1)..(143): Ceres Seq. ID no. 2899076
  misc_feature (45)..(45): Xaa is any aa, unknown or other
  misc_feature (46)..(46): Xaa is any aa, unknown or other
  misc_feature (58)..(58): Xaa is any aa, unknown or other
  misc_feature (135)..(135): Xaa is any aa, unknown or other
QIEEVCPCTPLRYWEEHKCIAVAAAPGSPPQAHAHTGAKRLHLQXXDKVCRPRVRGRXDGGRRLPAIRDGGGVLGSGHHGQGNGDQPPPPRLPRHRLEQDPRQVPRARRARRHRRGDACLRRLQVQIHHRHALRXQRRPISRL

SEQ ID NO: 13680 - protein, 75 aa, Zea mays subsp. mays
  peptide (1)..(75): Ceres Seq. ID no. 2899077
  misc_feature (2)..(74): Pfam Name: NAD binding domain of 6-phosphogluconate dehydrogenase Pfam Description: NAD binding domain of 6-phosphogluconate
  misc_feature (1)..(74): Homolog of NCBI NO: 29368238 NR Description: gamma hydroxybutyrate dehydrogenase-like protein
  misc_feature (1)..(74): Homolog of NCBI NO: 15146314 NR Description: AT3g25530/MWL2_15 [Arabidopsis thaliana]
  misc_feature (1)..(74): Homolog of NCBI NO: 15375068 NR Description: gamma hydroxybutyrate dehydrogenase [Arabidopsis
  misc_feature (1)..(74): Homolog of NCBI NO: 18404556 NR Description: expressed protein; protein id: At3g25530.1, by cDNA: gi_15146313, supported by cDNA: gi_15375067 [Arabidopsis
  misc_feature (4)..(74): Homolog of NCBI NO: 39996474 NR Description: 3-hydroxyisobutyrate dehydrogenase family protein
  misc_feature (4)..(74): Homolog of NCBI NO: 23054597 NR Description: hypothetical protein [Geobacter metallireducens]
  misc_feature (1)..(73): Homolog of NCBI NO: 34914300 NR Description: putative gamma hydroxybutyrate dehydrogenase
  misc_feature (1)..(74): Homolog of NCBI NO: 20891625 NR Description: RIKEN cDNA 3930401K13 [Mus musculus]
  misc_feature (1)..(74): Homolog of NCBI NO: 40675370 NR Description: N-PAC protein [Homo sapiens]
  misc_feature (1)..(74): Homolog of NCBI NO: 13277568 NR Description: Similar to RIKEN cDNA 3930401K13 gene [Homo
  misc_feature (66)..(66): Xaa is any aa, unknown or other
MEVGFLGLGIMGKAMATNLLRHGFRVTVWNRTLAKCQELAALGATVGETPASVVSKCRYTIAMLSXPSAALSVVF

SEQ ID NO: 13681 - DNA, 433 bp, Zea mays subsp. mays
  misc_feature (1)..(433): Ceres Seq. ID no. 3475522
  misc_feature: MA Experiment ID: 108522 Result: Down-regulated in Transcription
  misc_feature: MA Experiment 108522 PARAMETER Experiment Name: Zm_42deg_Heat_P Parameter: Age (day) Value: 8
  misc_feature: MA Experiment 108522 PARAMETER Experiment Name: Zm_42deg_Heat_P Parameter: Organism Value: Zea mays
  misc_feature: MA Experiment 108522 PARAMETER Experiment Name: Zm_42deg_Heat_P Parameter: Plant Line Value: 35A19
  misc_feature: MA Experiment 108522 PARAMETER Experiment Name: Zm_42deg_Heat_P Parameter: Temperature (deg C) Value: 42 vs. 22
  misc_feature: MA Experiment 108522 PARAMETER Experiment Name: Zm_42deg_Heat_P Parameter: Timepoint (hr) Value: 1
  misc_feature: MA Experiment 108522 PARAMETER Experiment Name: Zm_42deg_Heat_P Parameter: Tissue Value: Aerial
  misc_feature: MA Experiment ID: 108523 Result: Down-regulated in Transcription
  misc_feature: MA Experiment 108523 PARAMETER Experiment Name: Zm_42deg_Heat_P Parameter: Age (day) Value: 8
  misc_feature: MA Experiment 108523 PARAMETER Experiment Name: Zm_42deg_Heat_P Parameter: Organism Value: Zea mays
  misc_feature: MA Experiment 108523 PARAMETER Experiment Name: Zm_42deg_Heat_P Parameter: Plant Line Value: 35A19
  misc_feature: MA Experiment 108523 PARAMETER Experiment Name: Zm_42deg_Heat_P Parameter: Temperature (deg C) Value: 42 vs. 22
  misc_feature: MA Experiment 108523 PARAMETER Experiment Name: Zm_42deg_Heat_P Parameter: Timepoint (hr) Value: 6
  misc_feature: MA Experiment 108523 PARAMETER Experiment Name: Zm_42deg_Heat_P Parameter: Tissue Value: Aerial
  misc_feature: MA Experiment ID: 108544 Result: Up-regulated in Transcription
gtgtgcgtgagagagaaacagaagaggaaaaggaatccatggcggcgacgctggcgaggagggcggggcgctccgcggcgacgacgctatggggcgcggcgaggggcttcgcatcggtggggtccgacatcgtctctgcggctcccggcgtgtcgctgcagaaggcgcggtcctgggacgagggcgtcgccaccaagttctctaccacgcctctcaaggacatcttctacgggaagaaggtggtcatcttcggcttgcccggtgcatatacaggggtttgttcacgttcctagttacaagaagaatattgacaagttgaaagcaaaaggaatcgactctgttatctgtgtatctgtgaatgatccgtatgtcctggatggatgggcaaaaaagctagacgctaaagatacaattgagttctatggtgactttg

SEQ ID NO: 13682 - protein, 144 aa, Zea mays subsp. mays
  peptide (1)..(144): Ceres Seq. ID no. 3475523
  misc_feature (95)..(143): Homolog of NCBI NO: 34903114 NR Description: unnamed protein product [Oryza sativa (japonica group)] >gi|6630684|dbj|BAA88530.1| unnamed protein product
  misc_feature (95)..(143): Homolog of NCBI NO: 7658343 NR Description: unknown protein; 13384-11892 [Arabidopsis
  misc_feature (95)..(143): Homolog of NCBI NO: 18397457 NR Description: expressed protein; protein id: At3g06050.1, by cDNA: 14986., supported by cDNA: gi_15450354, supported by gi_20466102 [Arabidopsis thaliana]
  misc_feature (95)..(143): Homolog of NCBI NO: 21553531 NR Description: unknown [Arabidopsis thaliana]
  misc_feature (95)..(143): Homolog of NCBI NO: 28572977 NR Description: CG32920-PB [Drosophila melanogaster]
  misc_feature (95)..(143): Homolog of NCBI NO: 38048721 NR Description: similar to Drosophila melanogaster CG7217
  misc_feature (95)..(143): Homolog of NCBI NO: 18406870 NR Description: peroxiredoxin, putative; protein id: At1g60740.1,
  misc_feature (95)..(143): Homolog of NCBI NO: 4704732 NR Description: peroxiredoxin TPx2 [Arabidopsis thaliana]
  misc_feature (95)..(143): Homolog of NCBI NO: 15218876 NR Description: type 2 peroxiredoxin, putative; protein id: supported by cDNA: 10862., supported by cDNA: gi_12083333, by cDNA: gi_4704731 [Arabidopsis thaliana]
  misc_feature (95)..(143): Homolog of NCBI NO: 27807445 NR Description: peroxiredoxin 5 [Bos taurus]
VCVREKQKRKRNPWRRRWRGGRGAPRRRRYGARRGASHRWGPTSSLRLPACRCRRRGPGTRASPPSSLPRLSRTSSTGRRWSSSACPVHIQGFVHVPSYKKNIDKLKAKGIDSVICVSVNDPYVLDGWAKKLDAKDTIEFYGDF

SEQ ID NO: 13683 - protein, 96 aa, Zea mays subsp. mays
  peptide (1)..(96): Ceres Seq. ID no. 3475524
  misc_feature (43)..(96): Pfam Name: AhpC/TSA family Pfam Description: AhpC/TSA family
  misc_feature (13)..(96): Homolog of NCBI NO: 34903114 NR Description: unnamed protein product [Oryza sativa (japonica group)] >gi|6630684|dbj|BAA88530.1| unnamed protein product
  misc_feature (23)..(95): Homolog of NCBI NO: 7658343 NR Description: unknown protein; 13384-11892 [Arabidopsis
  misc_feature (23)..(95): Homolog of NCBI NO: 18397457 NR Description: expressed protein; protein id: At3g06050.1, by cDNA: 14986., supported by cDNA: gi_15450354, supported by gi_20466102 [Arabidopsis thaliana]
  misc_feature (18)..(95): Homolog of NCBI NO: 21553531 NR Description: unknown [Arabidopsis thaliana]
  misc_feature (49)..(96): Homolog of NCBI NO: 28572977 NR Description: CG32920-PB [Drosophila melanogaster]
  misc_feature (49)..(96): Homolog of NCBI NO: 38048721 NR Description: similar to Drosophila melanogaster CG7217
  misc_feature (65)..(96): Homolog of NCBI NO: 18406870 NR Description: peroxiredoxin, putative; protein id: At1g60740.1,
  misc_feature (65)..(96): Homolog of NCBI NO: 4704732 NR Description: peroxiredoxin TPx2 [Arabidopsis thaliana]
  misc_feature (65)..(96): Homolog of NCBI NO: 15218876 NR Description: type 2 peroxiredoxin, putative; protein id: supported by cDNA: 10862., supported by cDNA: gi_12083333, by cDNA: gi_4704731 [Arabidopsis thaliana]
  misc_feature (11)..(96): Homolog of NCBI NO: 27807445 NR Description: peroxiredoxin 5 [Bos taurus]
VRERETEEEKESMAATLARRAGRSAATTLWGAARGFASVGSDIVSAAPGVSLQKARSWDEGVATKFSTTPLKDIFYGKKVVIFGLPGAYTGVCSRS

SEQ ID NO: 13684 - protein, 84 aa, Zea mays subsp. mays
  peptide (1)..(84): Ceres Seq. ID no. 3475525
  misc_feature (31)..(84): Pfam Name: AhpC/TSA family Pfam Description: AhpC/TSA family
  misc_feature (1)..(84): Homolog of NCBI NO: 34903114 NR Description: unnamed protein product [Oryza sativa (japonica group)] >gi|6630684|dbj|BAA88530.1| unnamed protein product
  misc_feature (11)..(83): Homolog of NCBI NO: 7658343 NR Description: unknown protein; 13384-11892 [Arabidopsis
  misc_feature (11)..(83): Homolog of NCBI NO: 18397457 NR Description: expressed protein; protein id: At3g06050.1, by cDNA: 14986., supported by cDNA: gi_15450354, supported by gi_20466102 [Arabidopsis thaliana]
  misc_feature (6)..(83): Homolog of NCBI NO: 21553531 NR Description: unknown [Arabidopsis thaliana]
  misc_feature (37)..(84): Homolog of NCBI NO: 28572977 NR Description: CG32920-PB [Drosophila melanogaster]
  misc_feature (37)..(84): Homolog of NCBI NO: 38048721 NR Description: similar to Drosophila melanogaster CG7217
  misc_feature (53)..(84): Homolog of NCBI NO: 18406870 NR Description: peroxiredoxin, putative; protein id: At1g60740.1,
  misc_feature (53)..(84): Homolog of NCBI NO: 4704732 NR Description: peroxiredoxin TPx2 [Arabidopsis thaliana]
  misc_feature (53)..(84): Homolog of NCBI NO: 15218876 NR Description: type 2 peroxiredoxin, putative; protein id: supported by cDNA: 10862., supported by cDNA: gi_12083333, by cDNA: gi_4704731 [Arabidopsis thaliana]
  misc_feature (1)..(84): Homolog of NCBI NO: 27807445 NR Description: peroxiredoxin 5 [Bos taurus]
MAATLARRAGRSAATTLWGAARGFASVGSDIVSAAPGVSLQKARSWDEGVATKFSTTPLKDIFYGKKVVIFGLPGAYTGVCSRS

SEQ ID NO: 13685 - DNA, 2535 bp, Zea mays subsp. mays
  misc_feature (1)..(2535): Ceres Seq. ID no. 12436063
  misc_feature: MA Experiment ID: 108522 Result: Up-regulated in Transcription
  misc_feature: MA Experiment 108522 PARAMETER Experiment Name: Zm_42deg_Heat_P Parameter: Age (day) Value: 8
  misc_feature: MA Experiment 108522 PARAMETER Experiment Name: Zm_42deg_Heat_P Parameter: Organism Value: Zea mays
  misc_feature: MA Experiment 108522 PARAMETER Experiment Name: Zm_42deg_Heat_P Parameter: Plant Line Value: 35A19
  misc_feature: MA Experiment 108522 PARAMETER Experiment Name: Zm_42deg_Heat_P Parameter: Temperature (deg C) Value: 42 vs. 22
  misc_feature: MA Experiment 108522 PARAMETER Experiment Name: Zm_42deg_Heat_P Parameter: Timepoint (hr) Value: 1
  misc_feature: MA Experiment 108522 PARAMETER Experiment Name: Zm_42deg_Heat_P Parameter: Tissue Value: Aerial
  misc_feature: MA Experiment ID: 108523 Result: Up-regulated in Transcription
  misc_feature: MA Experiment 108523 PARAMETER Experiment Name: Zm_42deg_Heat_P Parameter: Age (day) Value: 8
  misc_feature: MA Experiment 108523 PARAMETER Experiment Name: Zm_42deg_Heat_P Parameter: Organism Value: Zea mays
  misc_feature: MA Experiment 108523 PARAMETER Experiment Name: Zm_42deg_Heat_P Parameter: Plant Line Value: 35A19
  misc_feature: MA Experiment 108523 PARAMETER Experiment Name: Zm_42deg_Heat_P Parameter: Temperature (deg C) Value: 42 vs. 22
  misc_feature: MA Experiment 108523 PARAMETER Experiment Name: Zm_42deg_Heat_P Parameter: Timepoint (hr) Value: 6
  misc_feature: MA Experiment 108523 PARAMETER Experiment Name: Zm_42deg_Heat_P Parameter: Tissue Value: Aerial
  misc_feature: MA Experiment ID: 108528 Result: Down-regulated in Transcription
  misc_feature: MA Experiment 108528 PARAMETER Experiment Name: Zm_Imbibed_Seeds_P Parameter: Age (day) Value: 5 vs. 2
  misc_feature: MA Experiment 108528 PARAMETER Experiment Name: Zm_Imbibed_Seeds_P Parameter: Organism Value: Zea mays
  misc_feature: MA Experiment 108528 PARAMETER Experiment Name: Zm_Imbibed_Seeds_P Parameter: Plant Line Value: 35A19
  misc_feature: MA Experiment 108528 PARAMETER Experiment Name: Zm_Imbibed_Seeds_P Parameter: Tissue Value: Aerial vs. Embryo
  misc_feature: MA Experiment ID: 108530 Result: Down-regulated in Transcription
  misc_feature: MA Experiment 108530 PARAMETER Experiment Name: Zm_Imbibed_Seeds_P Parameter: Age (day) Value: 6 vs. 2
  misc_feature: MA Experiment 108530 PARAMETER Experiment Name: Zm_Imbibed_Seeds_P Parameter: Organism Value: Zea mays
  misc_feature: MA Experiment 108530 PARAMETER Experiment Name: Zm_Imbibed_Seeds_P Parameter: Plant Line Value: 35A19
  misc_feature: MA Experiment 108530 PARAMETER Experiment Name: Zm_Imbibed_Seeds_P Parameter: Tissue Value: Aerial vs. Embryo
  misc_feature: MA Experiment ID: 108534 Result: Up-regulated in Transcription
  misc_feature: MA Experiment 108534 PARAMETER Experiment Name: Zm_4deg_Cold_P Parameter: Age (hr) Value: 8
  misc_feature: MA Experiment 108534 PARAMETER Experiment Name: Zm_4deg_Cold_P Parameter: Organism Value: Zea mays
  misc_feature: MA Experiment 108534 PARAMETER Experiment Name: Zm_4deg_Cold_P Parameter: Plant Line Value: 35A19
  misc_feature: MA Experiment 108534 PARAMETER Experiment Name: Zm_4deg_Cold_P Parameter: Temperature (deg C) Value: 4 vs. 22
  misc_feature: MA Experiment 108534 PARAMETER Experiment Name: Zm_4deg_Cold_P Parameter: Timepoint (hr) Value: 6
  misc_feature: MA Experiment 108534 PARAMETER Experiment Name: Zm_4deg_Cold_P Parameter: Tissue Value: Aerial
  misc_feature: MA Experiment ID: 108543 Result: Up-regulated in Transcription
  misc_feature: MA Experiment ID: 108548 Result: Up-regulated in Transcription
  misc_feature: MA Experiment 108548 PARAMETER Experiment Name: Zm_20uM_KNO3_H-to-L_P Parameter: Age (day) Value: 11
  misc_feature: MA Experiment 108548 PARAMETER Experiment Name: Zm_20uM_KNO3_H-to-L_P Parameter: Organism Value: Zea mays
  misc_feature: MA Experiment 108548 PARAMETER Experiment Name: Zm_20uM_KNO3_H-to-L_P Parameter: Plant Line Value: 35A19
  misc_feature: MA Experiment 108548 PARAMETER Experiment Name: Zm_20uM_KNO3_H-to-L_P Parameter: Timepoint (hr) Value: 4
  misc_feature: MA Experiment 108548 PARAMETER Experiment Name: Zm_20uM_KNO3_H-to-L_P Parameter: Tissue Value: Roots
  misc_feature: MA Experiment 108548 PARAMETER Experiment Name: Zm_20uM_KNO3_H-to-L_P Parameter: Treatment Value: 20uM KNO3 vs. 60mM KNO3
  misc_feature: MA Experiment ID: 108556 Result: Up-regulated in Transcription
  misc_feature: MA Experiment 108556 PARAMETER Experiment Name: Zm_Drought_P Parameter: Age (day) Value: 9
  misc_feature: MA Experiment 108556 PARAMETER Experiment Name: Zm_Drought_P Parameter: Organism Value: Zea mays
  misc_feature: MA Experiment 108556 PARAMETER Experiment Name: Zm_Drought_P Parameter: Plant Line Value: 35A19
  misc_feature: MA Experiment 108556 PARAMETER Experiment Name: Zm_Drought_P Parameter: Timepoint (hr) Value: 24
  misc_feature: MA Experiment 108556 PARAMETER Experiment Name: Zm_Drought_P Parameter: Tissue Value: Aerial
  misc_feature: MA Experiment 108556 PARAMETER Experiment Name: Zm_Drought_P Parameter: Treatment Value: Drought vs. No Drought
  misc_feature: MA Experiment ID: 20000108 Result: Down-regulated in Transcription
  misc_feature: MA Experiment 20000108 PARAMETER Experiment Name: Zm_Root-Tips_P Parameter: Age (day) Value: 12
  misc_feature: MA Experiment 20000108 PARAMETER Experiment Name: Zm_Root-Tips_P Parameter: Organism Value: Zea mays
  misc_feature: MA Experiment 20000108 PARAMETER Experiment Name: Zm_Root-Tips_P Parameter: Tissue Value: Root tips vs. Root mid region    35
  misc_feature: MA Experiment 20000108 PARAMETER Experiment Name: Zm_Root-Tips_P Parameter: Tissue Value: Root tips vs. Root mid region   Sequence Listing-Misc Features (4)
ataagacgtcgcgctgctgctgccaccgcagtcgccgactcgtccgcagtgcaatgccgggggcctgccaggacctcagcaccatcacgcccacaccacggcggcagagtatggcgcagctccagcgcgggtccgtgctggttggtgggcgcgagctcctcgtccgcgccccgcccaacgtcaacctacggcccgccggtgccggcgtcgccgacggcggggccgcctcgggcgccgcgttcctcggagccagggctccggccgcgtccagccgccacgtgttctccgtcggaaacctggctagtgggtggaggtggttgtcgttgttcaggttcaagatctggtggatgatcccggccacgggcgtcggcgcggcggctgtgccggcggagacgcagatgctgcttctggagtacaggagcgaggcgggtcctgcggccgcgacggagcgtggctcactgtacgcgctggtgctgccagttcttgacggcggcttccgagccagcctccaggggagccccgaggacgagctacagttctgcttcgagagcggtgatcctgatgtccagacgatggaagcagttgatgcagtgttcgtcaactcaggggacaaccccttcaagcttctgaaagaatccatcaagatgttgtccaagatcaaaggaactttcagtcatatagaggacaaggagatcccttcaaatttggactggtttgggtggtgcacttgggatgcattttacaaagctgttaacccaagtgggattgaggagggccttcaaagtctgcgtgaaggtggtgtgccgccaaggtttctgattatagatgatggttggcaagaaacagttgacgaaatcaaggaagtgaatgaagccctccgtgagcagactgtatttgcgcagaggctggctgatctgaaggagaatcataagttcagaggggaaacctgcaagaatcttgaggaccttgttaaaacgataaaaggaaaacatggagtcaagtgtgtctacatgtggcatgctttacttggatattggggaggtaccttagcaacatccgaagtgatgaagaagtataatccaaagcttgtttatccagtccaatcgcggggtaatgttgcgaatctgagggatattgccatggacagcttggagaaatttggagtgggcatcgttgatcctgacaagatatatgagttctacaatgatcagcacagctacctttctagtgtgggtgtggatggcgtgaaggttgatgttcagaacgtgttggaaacccttggacgcggatttggtggtcgtgttgcagtaactcgaaagtaccagcaggctcttgaggaatcaattgcccagaacttcaaaacaaacaacctaatctgctgcatgagtcacaattcagacagcatctttagtgccttgaagggtgcagttgctagagcctcagaagatttcatgcctcgggaaccaacactgcaaactctgcacattgcgtctgtggcattcaatagcctattgttgggagaaatcttcatacctgactgggatatgttccatagcaagcatgaatcagcggaattccacggagcagctagagccctgagtggaggtggtgtttatgtcagtgacaaacctggggtgcatgatttcagtgttctaaaaaagcttgttctaccagatggttcgattctaagagcaaggtatgctggtcgtcctacacgcgattgtctgttcactgacccagtcatggatggcaaaagtctgatgaagatatggaacttgaacaatttcactggtgtcattggagtgttcaattgtcagggagctggacagtgggtttggccagttaaacaaactgcttatgttcctaccaacataaacatcactggtcagctctcaccgtctgacgtagaatctctcgaggagatagctggtgatgactggaatggggagactgcagtatatgctttcggttcatgttctctttcaaggcttcagaaacaccaaagtttggaggtgtcactgtctactatgacatgtgagatctacagcatttcaccaataaagattttcagcgaagtcgtccagtttacgcctcttggactgatcgacatgttcaactccggtggtgcacttgacaatatttcaagcgttgcagattcttcagctacgacagttcatataagatgccgaggaccagggcggtttggggcgtattcagacaccaggccagagctttgcagagttgatgaacacgaagtggagttcactcttgcagaggatggcctcctgaccttttaccttcccccttcttcctcccaggacaacctgagacacgttgagattgtctacaaagcatcatgaacgacatttacccttatgattcttacgctccagcatgcaatttctggcgtgctcttcagtaaccaccacacatgcacattgacatgatgtaacaaggaacccattttgttggatttgactgtgtatgctgtgctgcaaatacctgttttatacgattgttctgcacctggactgc

SEQ ID NO: 13686 - protein, 785 aa, Zea mays subsp. mays
  peptide (1)..(785): Ceres Seq. ID no. 12436064
  misc_feature (40)..(713): Pfam Name: Raffinose synthase or seed imbibition protein Sip1 Pfam Description: Raffinose synthase or seed imbibition protein
  misc_feature (36)..(713): Homolog of NCBI NO: 15292677 NR Description: putative imbibition protein homolog [Arabidopsis
  misc_feature (708)..(781): Homolog of NCBI NO: 15292677 NR Description: putative imbibition protein homolog [Arabidopsis
  misc_feature (36)..(713): Homolog of NCBI NO: 15230330 NR Description: glycosyl hydrolase family 36; protein id: supported by cDNA: gi_15292676 [Arabidopsis thaliana]
  misc_feature (708)..(781): Homolog of NCBI NO: 15230330 NR Description: glycosyl hydrolase family 36; protein id: supported by cDNA: gi_15292676 [Arabidopsis thaliana]
  misc_feature (36)..(718): Homolog of NCBI NO: 629602 NR Description: probable imbibition protein - wild cabbage
  misc_feature (662)..(781): Homolog of NCBI NO: 629602 NR Description: probable imbibition protein - wild cabbage
  misc_feature (28)..(714): Homolog of NCBI NO: 29838631 NR Description: alkaline alpha galactosidase II [Cucumis melo]
  misc_feature (723)..(767): Homolog of NCBI NO: 29838631 NR Description: alkaline alpha galactosidase II [Cucumis melo]
  misc_feature (43)..(767): Homolog of NCBI NO: 282994 NR Description: Sip1 protein - barley >gi|167100|gb|AAA32975.1|
  misc_feature (28)..(720): Homolog of NCBI NO: 7242785 NR Description: putative seed imbibition protein [Persea
KTSRCCCHRSRRLVRSAMPGACQDLSTITPTPRRQSMAQLQRGSVLVGGRELLVRAPPNVNLRPAGAGVADGGAASGAAFLGARAPAASSRHVFSVGNLASGWRWLSLFRFKIWWMIPATGVGAAAVPAETQMLLLEYRSEAGPAAATERGSLYALVLPVLDGGFRASLQGSPEDELQFCFESGDPDVQTMEAVDAVFVNSGDNPFKLLKESIKMLSKIKGTFSHIEDKEIPSNLDWFGWCTWDAFYKAVNPSGIEEGLQSLREGGVPPRFLIIDDGWQETVDEIKEVNEALREQTVFAQRLADLKENHKFRGETCKNLEDLVKTIKGKHGVKCVYMWHALLGYWGGTLATSEVMKKYNPKLVYPVQSRGNVANLRDIAMDSLEKFGVGIVDPDKIYEFYNDQHSYLSSVGVDGVKVDVQNVLETLGRGFGGRVAVTRKYQQALEESIAQNFKTNNLICCMSHNSDSIFSALKGAVARASEDFMPREPTLQTLHIASVAFNSLLLGEIFIPDWDMFHSKHESAEFHGAARALSGGGVYVSDKPGVHDFSVLKKLVLPDGSILRARYAGRPTRDCLFTDPVMDGKSLMKIWNLNNFTGVIGVFNCQGAGQWVWPVKQTAYVPTNINITGQLSPSDVESLEEIAGDDWNGETAVYAFGSCSLSRLQKHQSLEVSLSTMTCEIYSISPIKIFSEVVQFTPLGLIDMFNSGGALDNISSVADSSATTVHIRCRGPGRFGAYSDTRPELCRVDEHEVEFTLAEDGLLTFYLPPSSSQDNLRHVEIVYKAS

SEQ ID NO: 13687 - protein, 768 aa, Zea mays subsp. mays
  peptide (1)..(768): Ceres Seq. ID no. 12436065
  misc_feature (23)..(696): Pfam Name: Raffinose synthase or seed imbibition protein Sip1 Pfam Description: Raffinose synthase or seed imbibition protein
  misc_feature (19)..(696): Homolog of NCBI NO: 15292677 NR Description: putative imbibition protein homolog [Arabidopsis
  misc_feature (691)..(764): Homolog of NCBI NO: 15292677 NR Description: putative imbibition protein homolog [Arabidopsis
  misc_feature (19)..(696): Homolog of NCBI NO: 15230330 NR Description: glycosyl hydrolase family 36; protein id: supported by cDNA: gi_15292676 [Arabidopsis thaliana]
  misc_feature (691)..(764): Homolog of NCBI NO: 15230330 NR Description: glycosyl hydrolase family 36; protein id: supported by cDNA: gi_15292676 [Arabidopsis thaliana]
  misc_feature (19)..(701): Homolog of NCBI NO: 629602 NR Description: probable imbibition protein - wild cabbage
  misc_feature (645)..(764): Homolog of NCBI NO: 629602 NR Description: probable imbibition protein - wild cabbage
  misc_feature (11)..(697): Homolog of NCBI NO: 29838631 NR Description: alkaline alpha galactosidase II [Cucumis melo]
  misc_feature (706)..(750): Homolog of NCBI NO: 29838631 NR Description: alkaline alpha galactosidase II [Cucumis melo]
  misc_feature (26)..(750): Homolog of NCBI NO: 282994 NR Description: Sip1 protein - barley >gi|167100|gb|AAA32975.1|
  misc_feature (11)..(703): Homolog of NCBI NO: 7242785 NR Description: putative seed imbibition protein [Persea
MPGACQDLSTITPTPRRQSMAQLQRGSVLVGGRELLVRAPPNVNLRPAGAGVADGGAASGAAFLGARAPAASSRHVFSVGNLASGWRWLSLFRFKIWWMIPATGVGAAAVPAETQMLLLEYRSEAGPAAATERGSLYALVLPVLDGGFRASLQGSPEDELQFCFESGDPDVQTMEAVDAVFVNSGDNPFKLLKESIKMLSKIKGTFSHIEDKEIPSNLDWFGWCTWDAFYKAVNPSGIEEGLQSLREGGVPPRFLIIDDGWQETVDEIKEVNEALREQTVFAQRLADLKENHKFRGETCKNLEDLVKTIKGKHGVKCVYMWHALLGYWGGTLATSEVMKKYNPKLVYPVQSRGNVANLRDIAMDSLEKFGVGIVDPDKIYEFYNDQHSYLSSVGVDGVKVDVQNVLETLGRGFGGRVAVTRKYQQALEESIAQNFKTNNLICCMSHNSDSIFSALKGAVARASEDFMPREPTLQTLHIASVAFNSLLLGEIFIPDWDMFHSKHESAEFHGAARALSGGGVYVSDKPGVHDFSVLKKLVLPDGSILRARYAGRPTRDCLFTDPVMDGKSLMKIWNLNNFTGVIGVFNCQGAGQWVWPVKQTAYVPTNINITGQLSPSDVESLEEIAGDDWNGETAVYAFGSCSLSRLQKHQSLEVSLSTMTCEIYSISPIKIFSEVVQFTPLGLIDMFNSGGALDNISSVADSSATTVHIRCRGPGRFGAYSDTRPELCRVDEHEVEFTLAEDGLLTFYLPPSSSQDNLRHVEIVYKAS

SEQ ID NO: 13688 - protein, 749 aa, Zea mays subsp. mays
  peptide (1)..(749): Ceres Seq. ID no. 12436066
  misc_feature (4)..(677): Pfam Name: Raffinose synthase or seed imbibition protein Sip1 Pfam Description: Raffinose synthase or seed imbibition protein
  misc_feature (1)..(677): Homolog of NCBI NO: 15292677 NR Description: putative imbibition protein homolog [Arabidopsis
  misc_feature (672)..(745): Homolog of NCBI NO: 15292677 NR Description: putative imbibition protein homolog [Arabidopsis
  misc_feature (1)..(677): Homolog of NCBI NO: 15230330 NR Description: glycosyl hydrolase family 36; protein id: supported by cDNA: gi_15292676 [Arabidopsis thaliana]
  misc_feature (672)..(745): Homolog of NCBI NO: 15230330 NR Description: glycosyl hydrolase family 36; protein id: supported by cDNA: gi_15292676 [Arabidopsis thaliana]
  misc_feature (1)..(682): Homolog of NCBI NO: 629602 NR Description: probable imbibition protein - wild cabbage
  misc_feature (626)..(745): Homolog of NCBI NO: 629602 NR Description: probable imbibition protein - wild cabbage
  misc_feature (1)..(678): Homolog of NCBI NO: 29838631 NR Description: alkaline alpha galactosidase II [Cucumis melo]
  misc_feature (687)..(731): Homolog of NCBI NO: 29838631 NR Description: alkaline alpha galactosidase II [Cucumis melo]
  misc_feature (7)..(731): Homolog of NCBI NO: 282994 NR Description: Sip1 protein - barley >gi|167100|gb|AAA32975.1|
  misc_feature (1)..(684): Homolog of NCBI NO: 7242785 NR Description: putative seed imbibition protein [Persea
MAQLQRGSVLVGGRELLVRAPPNVNLRPAGAGVADGGAASGAAFLGARAPAASSRHVFSVGNLASGWRWLSLFRFKIWWMIPATGVGAAAVPAETQMLLLEYRSEAGPAAATERGSLYALVLPVLDGGFRASLQGSPEDELQFCFESGDPDVQTMEAVDAVFVNSGDNPFKLLKESIKMLSKIKGTFSHIEDKEIPSNLDWFGWCTWDAFYKAVNPSGIEEGLQSLREGGVPPRFLIIDDGWQETVDEIKEVNEALREQTVFAQRLADLKENHKFRGETCKNLEDLVKTIKGKHGVKCVYMWHALLGYWGGTLATSEVMKKYNPKLVYPVQSRGNVANLRDIAMDSLEKFGVGIVDPDKIYEFYNDQHSYLSSVGVDGVKVDVQNVLETLGRGFGGRVAVTRKYQQALEESIAQNFKTNNLICCMSHNSDSIFSALKGAVARASEDFMPREPTLQTLHIASVAFNSLLLGEIFIPDWDMFHSKHESAEFHGAARALSGGGVYVSDKPGVHDFSVLKKLVLPDGSILRARYAGRPTRDCLFTDPVMDGKSLMKIWNLNNFTGVIGVFNCQGAGQWVWPVKQTAYVPTNINITGQLSPSDVESLEEIAGDDWNGETAVYAFGSCSLSRLQKHQSLEVSLSTMTCEIYSISPIKIFSEVVQFTPLGLIDMFNSGGALDNISSVADSSATTVHIRCRGPGRFGAYSDTRPELCRVDEHEVEFTLAEDGLLTFYLPPSSSQDNLRHVEIVYKAS

SEQ ID NO: 13689 - DNA, 1298 bp, Zea mays subsp. mays
  misc_feature (1)..(1298): Ceres Seq. ID no. 12436055
  misc_feature: MA Experiment ID: 108535 Result: Down-regulated in Transcription
  misc_feature: MA Experiment 108535 PARAMETER Experiment Name: Zm_Meristem_P Parameter: Age (day) Value: 8
  misc_feature: MA Experiment 108535 PARAMETER Experiment Name: Zm_Meristem_P Parameter: Organism Value: Zea mays
  misc_feature: MA Experiment 108535 PARAMETER Experiment Name: Zm_Meristem_P Parameter: Plant Line Value: 35A19
  misc_feature: MA Experiment 108535 PARAMETER Experiment Name: Zm_Meristem_P Parameter: Tissue Value: Root Meristem vs. Above Root Meristem
aaaactgggaaagccacacgtaacctctccccgccgatcccttccttccatccttccgccacgcgcggcagcggttcgtcacactcacacgcacacaccatggcgtccacgccacggacgccggcgccggagcggtctccgccgcccgtgcccactcctcctccgcctctggaggacgagccgccgccgtatctggccgacgggtcgccgcgggaggaggccagcttctccagcgacgggagggaaggagcgccccccaagaacccgcagctctcgcccacgcaccacgctgcgccacgcctcgtgccgccgcccagcagcccagccaggcaagacgggcaagaacaagaagggagcgctaataaggccgccgcggccacggcggagccggcccgcgagccgctccgccagatggcgacgggcctcgcccggccactgtcgtcgcagacgtcgcccgccaccaccaactctcctactccgtcggcgtctccgacgccgtcgagtcccgcgcccgtggccaacaacagcaagaggagcggccagagcacgcccaagcgcgcggagacgaagctgccgctgtcgtcgccggccgtcgcggtgcacttcgacccagtcgaggaggccgtcacgtcgccgctgcgcctcggcaaggcgcgcctcgaccagcagcagcagcagcagcacgcggcgggggcggcggagagcggggcatccgtggtccccggtgtggcggcggccgtggccgcggtcgccgagcggagggagctgttgctggcgctgcgcctggccacggcggtgctcagcctcgcggccttctcggtgatcgccagtgcccggacgtccggatgggccggcgactactacgcccgccacctgcagtacaggtacgccgtcgcagtgaacgtgatcgtgttcgcctactcggtcgcgcagtcattgggcaaaatccgccacctggtctcacccaggtttacgttccggaccatgtcgagctactactgcagcctgttcctggaccaggttctggcgtacctcctcatgtcggcgtcgtcggcggccgcgtcgcgcaacgacctgtgggtgtccaggttcggcacggacgccttcgtcaggaagatcaccggcgccctgtggctgtccttcgtcgcgttcctggtgctcgctctgaacgcggtcatctccacggctaatctcttcagcatggtctgacacgactcgtcctgctctggcgttgttggaatcaagtactaattgtagattctggaaataaatgtaaccgcgcgttaattagctgttgc

SEQ ID NO: 13690 - protein, 402 aa, Zea mays subsp. mays
  peptide (1)..(402): Ceres Seq. ID no. 12436056
  misc_feature (250)..(320): Pfam Name: Domain of unknown function (DUF588) Pfam Description: Domain of unknown function (DUF588)
  misc_feature (12)..(320): Homolog of NCBI NO: 34911616 NR Description: P0039G05.10 [Oryza sativa (japonica
  misc_feature (341)..(402): Homolog of NCBI NO: 34911616 NR Description: P0039G05.10 [Oryza sativa (japonica
  misc_feature (126)..(400): Homolog of NCBI NO: 27754604 NR Description: unknown protein [Arabidopsis thaliana]
  misc_feature (34)..(186): Homolog of NCBI NO: 34911616 NR Description: P0039G05.10 [Oryza sativa (japonica
  misc_feature (258)..(402): Homolog of NCBI NO: 15241975 NR Description: putative protein; protein id: At5g62820.1
  misc_feature (194)..(394): Homolog of NCBI NO: 15242642 NR Description: putative protein; protein id: At5g40300.1 thaliana] >gi|10178139|dbj|BAB11584.1| gene_id:MPO12.1~unknown
  misc_feature (121)..(326): Homolog of NCBI NO: 15227628 NR Description: hypothetical protein; protein id: At2g36330.1
  misc_feature (351)..(400): Homolog of NCBI NO: 15227628 NR Description: hypothetical protein; protein id: At2g36330.1
  misc_feature (10)..(212): Homolog of NCBI NO: 1076802 NR Description: extensin-like protein - maize
  misc_feature (2)..(272): Homolog of NCBI NO: 6958206 NR Description: kexin-like protease KEX1 [Pneumocystis carinii f.
KTGKATRNLSPPIPSFHPSATRGSGSSHSHAHTMASTPRTPAPERSPPPVPTPPPPLEDEPPPYLADGSPREEASFSSDGREGAPPKNPQLSPTHHAAPRLVPPPSSPARQDGQEQEGSANKAAAATAEPAREPLRQMATGLARPLSSQTSPATTNSPTPSASPTPSSPAPVANNSKRSGQSTPKRAETKLPLSSPAVAVHFDPVEEAVTSPLRLGKARLDQQQQQQHAAGAAESGASVVPGVAAAVAAVAERRELLLALRLATAVLSLAAFSVIASARTSGWAGDYYARHLQYRYAVAVNVIVFAYSVAQSLGKIRHLVSPRFTFRTMSSYYCSLFLDQVLAYLLMSASSAAASRNDLWVSRFGTDAFVRKITGALWLSFVAFLVLALNAVISTANLFSMV

SEQ ID NO: 13691 - protein, 369 aa, Zea mays subsp. mays
  peptide (1)..(369): Ceres Seq. ID no. 12436057
  misc_feature (217)..(287): Pfam Name: Domain of unknown function (DUF588) Pfam Description: Domain of unknown function (DUF588)
  misc_feature (1)..(287): Homolog of NCBI NO: 34911616 NR Description: P0039G05.10 [Oryza sativa (japonica
  misc_feature (308)..(369): Homolog of NCBI NO: 34911616 NR Description: P0039G05.10 [Oryza sativa (japonica
  misc_feature (93)..(367): Homolog of NCBI NO: 27754604 NR Description: unknown protein [Arabidopsis thaliana]
  misc_feature (1)..(153): Homolog of NCBI NO: 34911616 NR Description: P0039G05.10 [Oryza sativa (japonica
  misc_feature (225)..(369): Homolog of NCBI NO: 15241975 NR Description: putative protein; protein id: At5g62820.1
  misc_feature (161)..(361): Homolog of NCBI NO: 15242642 NR Description: putative protein; protein id: At5g40300.1 thaliana] >gi|10178139|dbj|BAB11584.1| gene_id:MPO12.1~unknown
  misc_feature (88)..(293): Homolog of NCBI NO: 15227628 NR Description: hypothetical protein; protein id: At2g36330.1
  misc_feature (318)..(367): Homolog of NCBI NO: 15227628 NR Description: hypothetical protein; protein id: At2g36330.1
  misc_feature (1)..(179): Homolog of NCBI NO: 1076802 NR Description: extensin-like protein - maize
  misc_feature (1)..(239): Homolog of NCBI NO: 6958206 NR Description: kexin-like protease KEX1 [Pneumocystis carinii f.
MASTPRTPAPERSPPPVPTPPPPLEDEPPPYLADGSPREEASFSSDGREGAPPKNPQLSPTHHAAPRLVPPPSSPARQDGQEQEGSANKAAAATAEPAREPLRQMATGLARPLSSQTSPATTNSPTPSASPTPSSPAPVANNSKRSGQSTPKRAETKLPLSSPAVAVHFDPVEEAVTSPLRLGKARLDQQQQQQHAAGAAESGASVVPGVAAAVAAVAERRELLLALRLATAVLSLAAFSVIASARTSGWAGDYYARHLQYRYAVAVNVIVFAYSVAQSLGKIRHLVSPRFTFRTMSSYYCSLFLDQVLAYLLMSASSAAASRNDLWVSRFGTDAFVRKITGALWLSFVAFLVLALNAVISTANLFSMV

SEQ ID NO: 13692 - protein, 273 aa, Zea mays subsp. mays
  peptide (1)..(273): Ceres Seq. ID no. 12436058
  misc_feature (52)..(167): Pfam Name: Cupin Pfam Description: Cupin
  misc_feature (22)..(273): Homolog of NCBI NO: 5821151 NR Description: RNA binding protein [Homo sapiens]
  misc_feature (22)..(273): Homolog of NCBI NO: 6634015 NR Description: KIAA0324 protein [Homo sapiens]
  misc_feature (22)..(273): Homolog of NCBI NO: 7512967 NR Description: hypothetical protein KIAA0324 - human (fragment)
  misc_feature (22)..(273): Homolog of NCBI NO: 19923466 NR Description: splicing coactivator subunit SRm300; RNA binding
  misc_feature (21)..(273): Homolog of NCBI NO: 30424862 NR Description: RIKEN cDNA 5033413A03 [Mus musculus]
  misc_feature (5)..(273): Homolog of NCBI NO: 34868816 NR Description: similar to splicing coactivator subunit SRm300;
  misc_feature (5)..(273): Homolog of NCBI NO: 28972153 NR Description: mKIAA0324 protein [Mus musculus]
  misc_feature (5)..(273): Homolog of NCBI NO: 30424862 NR Description: RIKEN cDNA 5033413A03 [Mus musculus]
  misc_feature (35)..(273): Homolog of NCBI NO: 34868816 NR Description: similar to splicing coactivator subunit SRm300;
  misc_feature (22)..(245): Homolog of NCBI NO: 6649242 NR Description: splicing coactivator subunit SRm300 [Homo sapiens]
KLGKPHVTSPRRSLPSILPPRAAAVRHTHTHTPWRPRHGRRRRSGLRRPCPLLLRLWRTSRRRIWPTGRRGRRPASPATGGKERPPRTRSSRPRTTLRHASCRRPAAQPGKTGKNKKGALIRPPRPRRSRPASRSARWRRASPGHCRRRRRPPPPTLLLRRRLRRRRVPRPWPTTARGAARARPSARRRSCRCRRRPSRCTSTQSRRPSRRRCASARRASTSSSSSSTRRGRRRAGHPWSPVWRRPWPRSPSGGSCCWRCAWPRRCSASRPSR

SEQ ID NO: 13693 - DNA, 651 bp, Zea mays subsp. mays
  misc_feature (1)..(651): Ceres Seq. ID no. 12436230
  misc_feature: MA Experiment ID: 108534 Result: Down-regulated in Transcription
  misc_feature: MA Experiment 108534 PARAMETER Experiment Name: Zm_4deg_Cold_P Parameter: Age (hr) Value: 8
  misc_feature: MA Experiment 108534 PARAMETER Experiment Name: Zm_4deg_Cold_P Parameter: Organism Value: Zea mays
  misc_feature: MA Experiment 108534 PARAMETER Experiment Name: Zm_4deg_Cold_P Parameter: Plant Line Value: 35A19
  misc_feature: MA Experiment 108534 PARAMETER Experiment Name: Zm_4deg_Cold_P Parameter: Temperature (deg C) Value: 4 vs. 22
  misc_feature: MA Experiment 108534 PARAMETER Experiment Name: Zm_4deg_Cold_P Parameter: Timepoint (hr) Value: 6
  misc_feature: MA Experiment 108534 PARAMETER Experiment Name: Zm_4deg_Cold_P Parameter: Tissue Value: Aerial
  misc_feature: MA Experiment ID: 108543 Result: Down-regulated in Transcription
  misc_feature: MA Experiment ID: 108544 Result: Up-regulated in Transcription
aacaaacatttcaacgtctcctaaagcagcatcggctaataccaccgactcttgctcacacagctcgttctctgcagctgccgcacatagctagtgaacgaccatggcgtcccaggccatcgagagccaccgtgccggtgctgaggtcgtcaccggaggagacgccatctgcaggaagaagtcaatcgagctgctggaggagctcggcctccccaaaggcttcctgccccttgaggacatccaggagttcgggtacaaccgcgagacagggtttatgtggctggtgcaggggaagaagaaggtggagcacaccttcaaaaagatcaagcagactgtgtcgtacgccactgaggtgacggcattcgccgagaagggcaagctgaggaagatcaccggcgtgaagacaaaggagctgatgctctggctcagcgtcgtcgaggtctacgtgcctgaggcctcaccggagaaggttaccttcaagactggcactggcctatccgacacctttgatgcctctgcctttgcgctgggagagtaattaccaaccacaaaaatggttggcttcaaaagacatgcataatctatcttttgtattttaaacttccatatatcttgtgatgagtttatgacccatactcaagggccgtgccc

SEQ ID NO: 13694 - protein, 144 aa, Zea mays subsp. mays
  peptide (1)..(144): Ceres Seq. ID no. 12436231
  misc_feature (4)..(143): Pfam Name: Protein of unknown function, DUF538 Pfam Description: Protein of unknown function, DUF538
  misc_feature (1)..(144): Homolog of NCBI NO: 34915410 NR Description: hypothetical protein~similar to Arabidopsis
  misc_feature (1)..(144): Homolog of NCBI NO: 33146557 NR Description: unknown protein [Oryza sativa (japonica
  misc_feature (1)..(144): Homolog of NCBI NO: 34915426 NR Description: hypothetical protein~similar to Arabidopsis
  misc_feature (1)..(144): Homolog of NCBI NO: 34915422 NR Description: hypothetical protein~similar to Arabidopsis
  misc_feature (1)..(144): Homolog of NCBI NO: 34915418 NR Description: hypothetical protein~similar to Arabidopsis
  misc_feature (1)..(144): Homolog of NCBI NO: 34915376 NR Description: hypothetical protein~similar to Oryza sativa
  misc_feature (1)..(144): Homolog of NCBI NO: 34915430 NR Description: hypothetical protein~similar to Arabidopsis
  misc_feature (1)..(144): Homolog of NCBI NO: 34915416 NR Description: hypothetical protein~similar to Arabidopsis
  misc_feature (1)..(144): Homolog of NCBI NO: 34915378 NR Description: hypothetical protein~similar to Oryza sativa
  misc_feature (1)..(141): Homolog of NCBI NO: 34903866 NR Description: unnamed protein product [Oryza sativa (japonica group)] >gi|8096574|dbj|BAA96147.1| unnamed protein product
MASQAIESHRAGAEVVTGGDAICRKKSIELLEELGLPKGFLPLEDIQEFGYNRETGFMWLVQGKKKVEHTFKKIKQTVSYATEVTAFAEKGKLRKITGVKTKELMLWLSVVEVYVPEASPEKVTFKTGTGLSDTFDASAFALGE

SEQ ID NO: 13695 - protein, 117 aa, Zea mays subsp. mays
  peptide (1)..(117): Ceres Seq. ID no. 12436232
QTFQRLLKQHRLIPPTLAHTARSLQLPHIASERPWRPRPSRATVPVLRSSPEETPSAGRSQSSCWRSSASPKASCPLRTSRSSGTTARQGLCGWCRGRRRWSTPSKRSSRLCRTPLR

SEQ ID NO: 13696 - protein, 87 aa, Zea mays subsp. mays
  peptide (1)..(87): Ceres Seq. ID no. 12436233
  misc_feature (1)..(86): Pfam Name: Protein of unknown function, DUF538 Pfam Description: Protein of unknown function, DUF538
  misc_feature (1)..(87): Homolog of NCBI NO: 34915410 NR Description: hypothetical protein~similar to Arabidopsis
  misc_feature (1)..(87): Homolog of NCBI NO: 33146557 NR Description: unknown protein [Oryza sativa (japonica
  misc_feature (1)..(87): Homolog of NCBI NO: 34915426 NR Description: hypothetical protein~similar to Arabidopsis
  misc_feature (1)..(87): Homolog of NCBI NO: 34915422 NR Description: hypothetical protein~similar to Arabidopsis
  misc_feature (1)..(87): Homolog of NCBI NO: 34915418 NR Description: hypothetical protein~similar to Arabidopsis
  misc_feature (1)..(87): Homolog of NCBI NO: 34915376 NR Description: hypothetical protein~similar to Oryza sativa
  misc_feature (1)..(87): Homolog of NCBI NO: 34915430 NR Description: hypothetical protein~similar to Arabidopsis
  misc_feature (1)..(87): Homolog of NCBI NO: 34915416 NR Description: hypothetical protein~similar to Arabidopsis
  misc_feature (1)..(87): Homolog of NCBI NO: 34915378 NR Description: hypothetical protein~similar to Oryza sativa
  misc_feature (1)..(84): Homolog of NCBI NO: 34903866 NR Description: unnamed protein product [Oryza sativa (japonica group)] >gi|8096574|dbj|BAA96147.1| unnamed protein product
MWLVQGKKKVEHTFKKIKQTVSYATEVTAFAEKGKLRKITGVKTKELMLWLSVVEVYVPEASPEKVTFKTGTGLSDTFDASAFALGE

SEQ ID NO: 13697 - DNA, 1288 bp, Zea mays subsp. mays
  misc_feature (1)..(1288): Ceres Seq. ID no. 12419233
  misc_feature: MA Experiment ID: 108535 Result: Down-regulated in Transcription
  misc_feature: MA Experiment 108535 PARAMETER Experiment Name: Zm_Meristem_P Parameter: Age (day) Value: 8
  misc_feature: MA Experiment 108535 PARAMETER Experiment Name: Zm_Meristem_P Parameter: Organism Value: Zea mays
  misc_feature: MA Experiment 108535 PARAMETER Experiment Name: Zm_Meristem_P Parameter: Plant Line Value: 35A19
  misc_feature: MA Experiment 108535 PARAMETER Experiment Name: Zm_Meristem_P Parameter: Tissue Value: Root Meristem vs. Above Root Meristem
  misc_feature: MA Experiment ID: 20000477 Result: Down-regulated in Transcription
  misc_feature: MA Experiment 20000477 PARAMETER Experiment Name: Zm_5mM_SA_P Parameter: Age (day) Value: 10
  misc_feature: MA Experiment 20000477 PARAMETER Experiment Name: Zm_5mM_SA_P Parameter: Organism Value: Zea mays
  misc_feature: MA Experiment 20000477 PARAMETER Experiment Name: Zm_5mM_SA_P Parameter: Plant Line Value: 35A19
  misc_feature: MA Experiment 20000477 PARAMETER Experiment Name: Zm_5mM_SA_P Parameter: Timepoint (hr) Value: 48
  misc_feature: MA Experiment 20000477 PARAMETER Experiment Name: Zm_5mM_SA_P Parameter: Tissue Value: Aerial
  misc_feature: MA Experiment 20000477 PARAMETER Experiment Name: Zm_5mM_SA_P Parameter: Treatment Value: 5mM SA vs. No Treatment
  misc_feature: MA Experiment ID: 20000480 Result: Down-regulated in Transcription
  misc_feature: MA Experiment 20000480 PARAMETER Experiment Name: Zm_Drought_P Parameter: Age (day) Value: 11
  misc_feature: MA Experiment 20000480 PARAMETER Experiment Name: Zm_Drought_P Parameter: Organism Value: Zea mays
  misc_feature: MA Experiment 20000480 PARAMETER Experiment Name: Zm_Drought_P Parameter: Plant Line Value: 35A19
  misc_feature: MA Experiment 20000480 PARAMETER Experiment Name: Zm_Drought_P Parameter: Timepoint (hr) Value: 72
  misc_feature: MA Experiment 20000480 PARAMETER Experiment Name: Zm_Drought_P Parameter: Tissue Value: Aerial
  misc_feature: MA Experiment 20000480 PARAMETER Experiment Name: Zm_Drought_P Parameter: Treatment Value: Drought vs. No Drought
  misc_feature: MA Experiment ID: 20000535 Result: Down-regulated in Transcription
  misc_feature: MA Experiment 20000535 PARAMETER Experiment Name: Zm_Hybrid_Seed_Dev_P Parameter: DAP Value: 30 vs. 12
  misc_feature: MA Experiment 20000535 PARAMETER Experiment Name: Zm_Hybrid_Seed_Dev_P Parameter: Organism Value: Zea mays
  misc_feature: MA Experiment 20000535 PARAMETER Experiment Name: Zm_Hybrid_Seed_Dev_P Parameter: Plant Line Value: 35A19
  misc_feature: MA Experiment 20000535 PARAMETER Experiment Name: Zm_Hybrid_Seed_Dev_P Parameter: Tissue Value: Embryo vs. Unfert Floret
aagagaagaatgtggcgtgaacagagagacctgaccctgaggcaggtgaggaggtccagggagcaatgggtttcggcgtagtgcacctcctcgacgcggtgttccgccgcatgttccggtcggccggcctccgcccgggctcggccacggtgaacgccgaagacgacacggtcatccactactgggcccacccgtccctcctccgcccgccgccctccgactccgactccgagcagcggcagccggtggtggtgctgatccacgggttcgggccggacccgacgtggcagtgggcggcgcangcgggcccgctgtcgcgccacttccgcctggtggtgccgacgctgctcttcttcggggcgtccggcacgcgcgcgcccgcgcggtccgacgcctcccaggccnccgcgctcgccgcgctgctcgcgggcccgggccagcagcacctcccgggcctcggcgccggccgcaccgtgcacgtggtgggcnccagctacggcggcctcgtggcgtaccacctcgcccgggagctggagcggcaaggcggcggcgttcgcgtcggcaaggtggtgntgtgcgactcggacgcgtncaagggcgccgaggncgaccgcgcgctggcggccaggagcggcgtggcggaggtggcggagctgctggcgcccgccgacacccgggcgctgcgccgcctcatggcggtctgcgcccaccgccccgtcaagtacgtccccgagtgcctcctccgcgacatgctccggagatacttcgcggncaagagggaggagaagatggcgctcatcagagggatcgccaccggagaaggcttcgagcttgctccgctgcctcaggaggtgctcatcatctggggagagttcgaccagatcttcccggtggacaaagcgcacaaggtgaaagagaagctcggggagaaggcgacggtgaaggtgatccccaacgcggggcacctgccgcagcaggaggacagcaagctnttcaaccgagtcctcctcgacttcctgctgcgcccttngtccaccgccgcctgacctccaacggcagcgcccaagccaaacagcttagcttgctcggctgccttcttctttggttatccattatcatcctgccgcgcgcgtttccggcgttcttgtttgtttgtagagtggaggaggcgctgccgccttctgtttttgtttgagggtggcaatgtgcagatcctacctgtttggttgtgctgtgaaaaaaagttgctgtgggctgtggaaaaagattttatcattattttatcatt

SEQ ID NO: 13698 - protein, 326 aa, Zea mays subsp. mays
  peptide (1)..(326): Ceres Seq. ID no. 12419234
  misc_feature (87)..(315): Pfam Name: alpha/beta hydrolase fold Pfam Description: alpha/beta hydrolase fold
  misc_feature (3)..(319): Homolog of NCBI NO: 18411865 NR Description: hypothetical protein; protein id: At1g78210.1, by cDNA: gi_19699018 [Arabidopsis thaliana] unknown protein [Arabidopsis thaliana]
  misc_feature (1)..(326): Homolog of NCBI NO: 34896168 NR Description: contains ESTs
  misc_feature (224)..(324): Homolog of NCBI NO: 24059850 NR Description: hydrolase-like protein [Oryza sativa (japonica
  misc_feature (1)..(319): Homolog of NCBI NO: 27436746 NR Description: Unknown protein [Oryza sativa (japonica
  misc_feature (10)..(321): Homolog of NCBI NO: 37533664 NR Description: putative hydrolase [Oryza sativa (japonica >gi|19920100|gb|AAM08532.1| Putative hydrolase [Oryza sativa]
  misc_feature (62)..(318): Homolog of NCBI NO: 21592805 NR Description: unknown [Arabidopsis thaliana]
  misc_feature (26)..(318): Homolog of NCBI NO: 30689631 NR Description: hydrolase, alpha/beta fold family [Arabidopsis
  misc_feature (1)..(319): Homolog of NCBI NO: 27436745 NR Description: Hypothetical protein [Oryza sativa (japonica
  misc_feature (4)..(229): Homolog of NCBI NO: 24059850 NR Description: hydrolase-like protein [Oryza sativa (japonica
  misc_feature (12)..(318): Homolog of NCBI NO: 19387256 NR Description: putative hydrolase [Oryza sativa (japonica
  misc_feature (79)..(79): Xaa is any aa, unknown or other
  misc_feature (114)..(114): Xaa is any aa, unknown or other
  misc_feature (142)..(142): Xaa is any aa, unknown or other
  misc_feature (170)..(170): Xaa is any aa, unknown or other
  misc_feature (176)..(176): Xaa is any aa, unknown or other
  misc_feature (181)..(181): Xaa is any aa, unknown or other
  misc_feature (236)..(236): Xaa is any aa, unknown or other
  misc_feature (309)..(309): Xaa is any aa, unknown or other
  misc_feature (322)..(322): Xaa is any aa, unknown or other
MGFGVVHLLDAVFRRMFRSAGLRPGSATVNAEDDTVIHYWAHPSLLRPPPSDSDSEQRQPVVVLIHGFGPDPTWQWAAXAGPLSRHFRLVVPTLLFFGASGTRAPARSDASQAXALAALLAGPGQQHLPGLGAGRTVHVVGXSYGGLVAYHLARELERQGGGVRVGKVVXCDSDAXKGAEXDRALAARSGVAEVAELLAPADTRALRRLMAVCAHRPVKYVPECLLRDMLRRYFAXKREEKMALIRGIATGEGFELAPLPQEVLIIWGEFDQIFPVDKAHKVKEKLGEKATVKVIPNAGHLPQQEDSKXFNRVLLDFLLRPXSTAA

SEQ ID NO: 13699 - protein, 311 aa, Zea mays subsp. mays
  peptide (1)..(311): Ceres Seq. ID no. 12419235
  misc_feature (72)..(300): Pfam Name: alpha/beta hydrolase fold Pfam Description: alpha/beta hydrolase fold
  misc_feature (1)..(311): Homolog of NCBI NO: 34896168 NR Description: contains ESTs
  misc_feature (1)..(214): Homolog of NCBI NO: 24059850 NR Description: hydrolase-like protein [Oryza sativa (japonica
  misc_feature (209)..(309): Homolog of NCBI NO: 24059850 NR Description: hydrolase-like protein [Oryza sativa (japonica
  misc_feature (1)..(304): Homolog of NCBI NO: 27436745 NR Description: Hypothetical protein [Oryza sativa (japonica
  misc_feature (1)..(304): Homolog of NCBI NO: 27436746 NR Description: Unknown protein [Oryza sativa (japonica
  misc_feature (11)..(303): Homolog of NCBI NO: 30689631 NR Description: hydrolase, alpha/beta fold family [Arabidopsis
  misc_feature (1)..(306): Homolog of NCBI NO: 37533664 NR Description: putative hydrolase [Oryza sativa (japonica >gi|19920100|gb|AAM08532.1| Putative hydrolase [Oryza sativa]
  misc_feature (47)..(303): Homolog of NCBI NO: 21592805 NR Description: unknown [Arabidopsis thaliana]
  misc_feature (1)..(304): Homolog of NCBI NO: 18411865 NR Description: hypothetical protein; protein id: At1g78210.1, by cDNA: gi_19699018 [Arabidopsis thaliana] unknown protein [Arabidopsis thaliana]
  misc_feature (1)..(303): Homolog of NCBI NO: 19387256 NR Description: putative hydrolase [Oryza sativa (japonica
  misc_feature (64)..(64): Xaa is any aa, unknown or other
  misc_feature (99)..(99): Xaa is any aa, unknown or other
  misc_feature (127)..(127): Xaa is any aa, unknown or other
  misc_feature (155)..(155): Xaa is any aa, unknown or other
  misc_feature (161)..(161): Xaa is any aa, unknown or other
  misc_feature (166)..(166): Xaa is any aa, unknown or other
  misc_feature (221)..(221): Xaa is any aa, unknown or other
  misc_feature (294)..(294): Xaa is any aa, unknown or other
  misc_feature (307)..(307): Xaa is any aa, unknown or other
MFRSAGLRPGSATVNAEDDTVIHYWAHPSLLRPPPSDSDSEQRQPVVVLIHGFGPDPTWQWAAXAGPLSRHFRLVVPTLLFFGASGTRAPARSDASQAXALAALLAGPGQQHLPGLGAGRTVHVVGXSYGGLVAYHLARELERQGGGVRVGKVVXCDSDAXKGAEXDRALAARSGVAEVAELLAPADTRALRRLMAVCAHRPVKYVPECLLRDMLRRYFAXKREEKMALIRGIATGEGFELAPLPQEVLIIWGEFDQIFPVDKAHKVKEKLGEKATVKVIPNAGHLPQQEDSKXFNRVLLDFLLRPXSTAA

SEQ ID NO: 13700 - DNA, 1990 bp, Zea mays subsp. mays
  misc_feature (1)..(1990): Ceres Seq. ID no. 12391586
  misc_feature: MA Experiment ID: 108529 Result: Up-regulated in Transcription
  misc_feature: MA Experiment 108529 PARAMETER Experiment Name: Zm_Imbibed_Seeds_P Parameter: Age (day) Value: 5 vs. 2
  misc_feature: MA Experiment 108529 PARAMETER Experiment Name: Zm_Imbibed_Seeds_P Parameter: Organism Value: Zea mays
  misc_feature: MA Experiment 108529 PARAMETER Experiment Name: Zm_Imbibed_Seeds_P Parameter: Plant Line Value: 35A19
  misc_feature: MA Experiment 108529 PARAMETER Experiment Name: Zm_Imbibed_Seeds_P Parameter: Tissue Value: Roots vs. Embryo
  misc_feature: MA Experiment ID: 108535 Result: Down-regulated in Transcription
  misc_feature: MA Experiment 108535 PARAMETER Experiment Name: Zm_Meristem_P Parameter: Age (day) Value: 8
  misc_feature: MA Experiment 108535 PARAMETER Experiment Name: Zm_Meristem_P Parameter: Organism Value: Zea mays
  misc_feature: MA Experiment 108535 PARAMETER Experiment Name: Zm_Meristem_P Parameter: Plant Line Value: 35A19
  misc_feature: MA Experiment 108535 PARAMETER Experiment Name: Zm_Meristem_P Parameter: Tissue Value: Root Meristem vs. Above Root Meristem
  misc_feature: MA Experiment ID: 108547 Result: Up-regulated in Transcription
  misc_feature: MA Experiment 108547 PARAMETER Experiment Name: Zm_Imbibed_Seeds_P Parameter: Age (day) Value: 4 vs. 2
  misc_feature: MA Experiment 108547 PARAMETER Experiment Name: Zm_Imbibed_Seeds_P Parameter: Organism Value: Zea mays
  misc_feature: MA Experiment 108547 PARAMETER Experiment Name: Zm_Imbibed_Seeds_P Parameter: Plant Line Value: 35A19
  misc_feature: MA Experiment 108547 PARAMETER Experiment Name: Zm_Imbibed_Seeds_P Parameter: Tissue Value: Aerial vs. Embryo
attcctgagcaaaaatcccctgcaacccgacccatagccatgggcaagctcgaggagaggacgcgtgcgttctggacgaaccgatggcttgtgttcgttggggccatgtggatgcagtccatggccggcaccacttacatcttcggcgccatctcgccggtggtcaaggccaggctgggctacgaccagccgcaggtggccgcgctgggtgtcgccaagaacctcggcggctgcctcggcctcctcgccggcgcgctctcggcgacgtggccgccgtgggcgctgctggccatcggcgccgcgcagaacttcctcggctacggctggctctggctcgtcgtctccgggaacgtgccggcgctgcccctctggctgatgtgtgttgttatctttattggaacaaatggccagacgtatttcatcacggcttcacttgttacaagcatccagaatttcccaaagagcaggggcccaacagtgggcatcctcaaaggatttatgggcctaactagcgccattctgacacaagtttatacagtgatgcacactccagaccatgctgcgcttatcttcatggttgctgttggtccgtcgctggttgccattggcttgatgtttgttattaggcctgttggtggtcacaggcagatacggccatctgacaagaacagcttcatgttcatctacactgtatgcttgctcctcgcctcataccttgtcggtgctatgcttatccaagatttcctgcaaccaagctatgatgtggttgtttttctgactgtgattctgttcgtcctccttatttcaccaatcgcaatccctgtgattgtgtcgttcatgccggaaaaagctcagcatctcatggaagatgctctcttatctgaaccattgacaggagaggcaagcagttcacgacaaaaggaggatcaaccagaggtcattttaagtgaggtagaagaggagaagtctaaggaaactgattcattgccgccatctgaaaggagaaagaggattgcggaattgcaggccaagctagtggaagcagcggcaagaggtggggttagaatcaaaagaaggccacaccgaggggataacttcaccctgatgcaggcattggtgaaggctgatttttggcttatttggctatcacttttgcttgggtcgggatcagggctgacagtgattgataacctgggtcagatgagccaggctattggttataaaaatgcacatatcttttgtcactcgtgagcatatggaactttcttggtcgtgttggaggtggctacttctctgagatcattgtcagggaacgtacatacccaaggcacatagcattggcagttgctcagatcgtgatggctgctgggcatttcctctttgctatggcttggcctggaactatgtacattgcgagcttgctggttggacttggatatggagctcactgggctattgtgccagctgctgtctccgagctttttggtgtaaaacactttggtgcgatgtacaattttctcatactagcgaaccccgcaggatccctcatcttctcagagctaattgtcagcaacctctatgaacatgaagctgagaaacaagctagccaacagcagatgtcagcattgctgtctccacgattgcttcgtgataccggctttcttgcagatgatgcactcaagtgtgaagggcctgcttgcttctttttcagctctctgattatgtcggtgttctgtgctgttgccgctgggttgagcctcctcgtcgttcaaaggaccagacaagtttatcctcgcctctacagttctgtccgcacttgagattctccaattctccatggatgggaagctcaaatcctcgtattctatgtccgtttattcttgcatacatatgcacaaagataagtatgtgaataaattctcaaatcttttcctaagctggtattgtaaaaacagatattcttgaatggactgtcccttgtgacttgcct

SEQ ID NO: 13701 - protein, 416 aa, Zea mays subsp. mays
  peptide (1)..(416): Ceres Seq. ID no. 12391587
  misc_feature (27)..(210): Pfam Name: Sugar (and other) transporter Pfam Description: Sugar (and other) transporter
  misc_feature (19)..(416): Homolog of NCBI NO: 18395988 NR Description: unknown protein; protein id: At3g01930.1 thaliana] >gi|6091732|gb|AAF03444.1|AC010797_20 unknown protein thaliana] >gi|6513938|gb|AAF14842.1|AC011664_24 unknown protein
  misc_feature (19)..(416): Homolog of NCBI NO: 15241312 NR Description: nodulin-like protein; protein id: At5g14120.1
  misc_feature (19)..(416): Homolog of NCBI NO: 11358583 NR Description: nodulin-like protein [imported] - Arabidopsis
  misc_feature (126)..(416): Homolog of NCBI NO: 30678455 NR Description: expressed protein [Arabidopsis thaliana]
  misc_feature (19)..(416): Homolog of NCBI NO: 1532169 NR Description: similar to a E. coli hypothetical protein F402
  misc_feature (27)..(274): Homolog of NCBI NO: 18423161 NR Description: nodulin-like protein; protein id: At5g50520.1,
  misc_feature (328)..(416): Homolog of NCBI NO: 18423161 NR Description: nodulin-like protein; protein id: At5g50520.1,
  misc_feature (14)..(412): Homolog of NCBI NO: 15220164 NR Description: nodulin-like protein; protein id: At1g80530.1, by cDNA: gi_14334879, supported by cDNA: gi_15810606 [Arabidopsis
  misc_feature (28)..(325): Homolog of NCBI NO: 15227274 NR Description: nodulin-like protein; protein id: At2g16660.1, by cDNA: gi_17979282, supported by cDNA: gi_20465249 [Arabidopsis
  misc_feature (339)..(413): Homolog of NCBI NO: 15227274 NR Description: nodulin-like protein; protein id: At2g16660.1, by cDNA: gi_17979282, supported by cDNA: gi_20465249 [Arabidopsis
IPEQKSPATRPIAMGKLEERTRAFWTNRWLVFVGAMWMQSMAGTTYIFGAISPVVKARLGYDQPQVAALGVAKNLGGCLGLLAGALSATWPPWALLAIGAAQNFLGYGWLWLVVSGNVPALPLWLMCVVIFIGTNGQTYFITASLVTSIQNFPKSRGPTVGILKGFMGLTSAILTQVYTVMHTPDHAALIFMVAVGPSLVAIGLMFVIRPVGGHRQIRPSDKNSFMFIYTVCLLLASYLVGAMLIQDFLQPSYDVVVFLTVILFVLLISPIAIPVIVSFMPEKAQHLMEDALLSEPLTGEASSSRQKEDQPEVILSEVEEEKSKETDSLPPSERRKRIAELQAKLVEAAARGGVRIKRRPHRGDNFTLMQALVKADFWLIWLSLLLGSGSGLTVIDNLGQMSQAIGYKNAHIFCHS

SEQ ID NO: 13702 - protein, 403 aa, Zea mays subsp. mays
  peptide (1)..(403): Ceres Seq. ID no. 12391588
  misc_feature (14)..(197): Pfam Name: Sugar (and other) transporter Pfam Description: Sugar (and other) transporter
  misc_feature (6)..(403): Homolog of NCBI NO: 18395988 NR Description: unknown protein; protein id: At3g01930.1 thaliana] >gi|6091732|gb|AAF03444.1|AC010797_20 unknown protein thaliana] >gi|6513938|gb|AAF14842.1|AC011664_24 unknown protein
  misc_feature (6)..(403): Homolog of NCBI NO: 15241312 NR Description: nodulin-like protein; protein id: At5g14120.1
  misc_feature (6)..(403): Homolog of NCBI NO: 11358583 NR Description: nodulin-like protein [imported] - Arabidopsis
  misc_feature (113)..(403): Homolog of NCBI NO: 30678455 NR Description: expressed protein [Arabidopsis thaliana]
  misc_feature (6)..(403): Homolog of NCBI NO: 1532169 NR Description: similar to a E. coli hypothetical protein F402
  misc_feature (14)..(261): Homolog of NCBI NO: 18423161 NR Description: nodulin-like protein; protein id: At5g50520.1,
  misc_feature (315)..(403): Homolog of NCBI NO: 18423161 NR Description: nodulin-like protein; protein id: At5g50520.1,
  misc_feature (1)..(399): Homolog of NCBI NO: 15220164 NR Description: nodulin-like protein; protein id: At1g80530.1, by cDNA: gi_14334879, supported by cDNA: gi_15810606 [Arabidopsis
  misc_feature (15)..(312): Homolog of NCBI NO: 15227274 NR Description: nodulin-like protein; protein id: At2g16660.1, by cDNA: gi_17979282, supported by cDNA: gi_20465249 [Arabidopsis
  misc_feature (326)..(400): Homolog of NCBI NO: 15227274 NR Description: nodulin-like protein; protein id: At2g16660.1, by cDNA: gi_17979282, supported by cDNA: gi_20465249 [Arabidopsis
MGKLEERTRAFWTNRWLVFVGAMWMQSMAGTTYIFGAISPVVKARLGYDQPQVAALGVAKNLGGCLGLLAGALSATWPPWALLAIGAAQNFLGYGWLWLVVSGNVPALPLWLMCVVIFIGTNGQTYFITASLVTSIQNFPKSRGPTVGILKGFMGLTSAILTQVYTVMHTPDHAALIFMVAVGPSLVAIGLMFVIRPVGGHRQIRPSDKNSFMFIYTVCLLLASYLVGAMLIQDFLQPSYDVVVFLTVILFVLLISPIAIPVIVSFMPEKAQHLMEDALLSEPLTGEASSSRQKEDQPEVILSEVEEEKSKETDSLPPSERRKRIAELQAKLVEAAARGGVRIKRRPHRGDNFTLMQALVKADFWLIWLSLLLGSGSGLTVIDNLGQMSQAIGYKNAHIFCHS

SEQ ID NO: 13703 - protein, 381 aa, Zea mays subsp. mays
  peptide (1)..(381): Ceres Seq. ID no. 12391589
  misc_feature (1)..(175): Pfam Name: Sugar (and other) transporter Pfam Description: Sugar (and other) transporter
  misc_feature (1)..(381): Homolog of NCBI NO: 18395988 NR Description: unknown protein; protein id: At3g01930.1 thaliana] >gi|6091732|gb|AAF03444.1|AC010797_20 unknown protein thaliana] >gi|6513938|gb|AAF14842.1|AC011664_24 unknown protein
  misc_feature (1)..(381): Homolog of NCBI NO: 15241312 NR Description: nodulin-like protein; protein id: At5g14120.1
  misc_feature (1)..(381): Homolog of NCBI NO: 11358583 NR Description: nodulin-like protein [imported] - Arabidopsis
  misc_feature (91)..(381): Homolog of NCBI NO: 30678455 NR Description: expressed protein [Arabidopsis thaliana]
  misc_feature (1)..(381): Homolog of NCBI NO: 1532169 NR Description: similar to a E. coli hypothetical protein F402
  misc_feature (1)..(239): Homolog of NCBI NO: 18423161 NR Description: nodulin-like protein; protein id: At5g50520.1,
  misc_feature (293)..(381): Homolog of NCBI NO: 18423161 NR Description: nodulin-like protein; protein id: At5g50520.1,
  misc_feature (1)..(377): Homolog of NCBI NO: 15220164 NR Description: nodulin-like protein; protein id: At1g80530.1, by cDNA: gi_14334879, supported by cDNA: gi_15810606 [Arabidopsis
  misc_feature (1)..(290): Homolog of NCBI NO: 15227274 NR Description: nodulin-like protein; protein id: At2g16660.1, by cDNA: gi_17979282, supported by cDNA: gi_20465249 [Arabidopsis
  misc_feature (304)..(378): Homolog of NCBI NO: 15227274 NR Description: nodulin-like protein; protein id: At2g16660.1, by cDNA: gi_17979282, supported by cDNA: gi_20465249 [Arabidopsis
MWMQSMAGTTYIFGAISPVVKARLGYDQPQVAALGVAKNLGGCLGLLAGALSATWPPWALLAIGAAQNFLGYGWLWLVVSGNVPALPLWLMCVVIFIGTNGQTYFITASLVTSIQNFPKSRGPTVGILKGFMGLTSAILTQVYTVMHTPDHAALIFMVAVGPSLVAIGLMFVIRPVGGHRQIRPSDKNSFMFIYTVCLLLASYLVGAMLIQDFLQPSYDVVVFLTVILFVLLISPIAIPVIVSFMPEKAQHLMEDALLSEPLTGEASSSRQKEDQPEVILSEVEEEKSKETDSLPPSERRKRIAELQAKLVEAAARGGVRIKRRPHRGDNFTLMQALVKADFWLIWLSLLLGSGSGLTVIDNLGQMSQAIGYKNAHIFCHS

SEQ ID NO: 13704 - DNA, 1894 bp, Zea mays subsp. mays
  misc_feature (1)..(1894): Ceres Seq. ID no. 12455023
  misc_feature: MA Experiment ID: 108515 Result: Up-regulated in Transcription
  misc_feature: MA Experiment 108515 PARAMETER Experiment Name: Zm_2mM_SA_P Parameter: Age (day) Value: 8
  misc_feature: MA Experiment 108515 PARAMETER Experiment Name: Zm_2mM_SA_P Parameter: Organism Value: Zea mays
  misc_feature: MA Experiment 108515 PARAMETER Experiment Name: Zm_2mM_SA_P Parameter: Plant Line Value: 35A19
  misc_feature: MA Experiment 108515 PARAMETER Experiment Name: Zm_2mM_SA_P Parameter: Timepoint (hr) Value: 12
  misc_feature: MA Experiment 108515 PARAMETER Experiment Name: Zm_2mM_SA_P Parameter: Tissue Value: Aerial
  misc_feature: MA Experiment 108515 PARAMETER Experiment Name: Zm_2mM_SA_P Parameter: Treatment Value: 2mM SA vs. No Treatment
  misc_feature: MA Experiment ID: 108526 Result: Up-regulated in Transcription
  misc_feature: MA Experiment 108526 PARAMETER Experiment Name: Zm_5mM_NO_P Parameter: Age (day) Value: 8
  misc_feature: MA Experiment 108526 PARAMETER Experiment Name: Zm_5mM_NO_P Parameter: Organism Value: Zea mays
  misc_feature: MA Experiment 108526 PARAMETER Experiment Name: Zm_5mM_NO_P Parameter: Plant Line Value: 35A19
  misc_feature: MA Experiment 108526 PARAMETER Experiment Name: Zm_5mM_NO_P Parameter: Timepoint (hr) Value: 1
  misc_feature: MA Experiment 108526 PARAMETER Experiment Name: Zm_5mM_NO_P Parameter: Tissue Value: Aerial
  misc_feature: MA Experiment 108526 PARAMETER Experiment Name: Zm_5mM_NO_P Parameter: Treatment Value: 5mM NO vs. No Treatment
  misc_feature: MA Experiment ID: 108527 Result: Up-regulated in Transcription
  misc_feature: MA Experiment 108527 PARAMETER Experiment Name: Zm_5mM_NO_P Parameter: Age (day) Value: 8
  misc_feature: MA Experiment 108527 PARAMETER Experiment Name: Zm_5mM_NO_P Parameter: Organism Value: Zea mays
  misc_feature: MA Experiment 108527 PARAMETER Experiment Name: Zm_5mM_NO_P Parameter: Plant Line Value: 35A19
  misc_feature: MA Experiment 108527 PARAMETER Experiment Name: Zm_5mM_NO_P Parameter: Timepoint (hr) Value: 6
  misc_feature: MA Experiment 108527 PARAMETER Experiment Name: Zm_5mM_NO_P Parameter: Tissue Value: Aerial
  misc_feature: MA Experiment 108527 PARAMETER Experiment Name: Zm_5mM_NO_P Parameter: Treatment Value: 5mM NO vs. No Treatment
  misc_feature: MA Experiment ID: 108534 Result: Up-regulated in Transcription
  misc_feature: MA Experiment 108534 PARAMETER Experiment Name: Zm_4deg_Cold_P Parameter: Age (hr) Value: 8
  misc_feature: MA Experiment 108534 PARAMETER Experiment Name: Zm_4deg_Cold_P Parameter: Organism Value: Zea mays
  misc_feature: MA Experiment 108534 PARAMETER Experiment Name: Zm_4deg_Cold_P Parameter: Plant Line Value: 35A19
  misc_feature: MA Experiment 108534 PARAMETER Experiment Name: Zm_4deg_Cold_P Parameter: Temperature (deg C) Value: 4 vs. 22
  misc_feature: MA Experiment 108534 PARAMETER Experiment Name: Zm_4deg_Cold_P Parameter: Timepoint (hr) Value: 6
  misc_feature: MA Experiment 108534 PARAMETER Experiment Name: Zm_4deg_Cold_P Parameter: Tissue Value: Aerial
  misc_feature: MA Experiment ID: 108535 Result: Down-regulated in Transcription
  misc_feature: MA Experiment 108535 PARAMETER Experiment Name: Zm_Meristem_P Parameter: Age (day) Value: 8
  misc_feature: MA Experiment 108535 PARAMETER Experiment Name: Zm_Meristem_P Parameter: Organism Value: Zea mays
  misc_feature: MA Experiment 108535 PARAMETER Experiment Name: Zm_Meristem_P Parameter: Plant Line Value: 35A19
  misc_feature: MA Experiment 108535 PARAMETER Experiment Name: Zm_Meristem_P Parameter: Tissue Value: Root Meristem vs. Above Root Meristem
  misc_feature: MA Experiment ID: 108545 Result: Down-regulated in Transcription
  misc_feature: MA Experiment 108545 PARAMETER Experiment Name: Zm_Imbibed_Seeds_P Parameter: Age (day) Value: 3 vs. 2
  misc_feature: MA Experiment 108545 PARAMETER Experiment Name: Zm_Imbibed_Seeds_P Parameter: Organism Value: Zea mays
  misc_feature: MA Experiment 108545 PARAMETER Experiment Name: Zm_Imbibed_Seeds_P Parameter: Plant Line Value: 35A19
  misc_feature: MA Experiment 108545 PARAMETER Experiment Name: Zm_Imbibed_Seeds_P Parameter: Tissue Value: Aerial vs. Embryo
  misc_feature: MA Experiment ID: 108559 Result: Up-regulated in Transcription
  misc_feature: MA Experiment 108559 PARAMETER Experiment Name: Zm_5mM_NO_P Parameter: Age (day) Value: 8
  misc_feature: MA Experiment 108559 PARAMETER Experiment Name: Zm_5mM_NO_P Parameter: Organism Value: Zea mays
  misc_feature: MA Experiment 108559 PARAMETER Experiment Name: Zm_5mM_NO_P Parameter: Plant Line Value: 35A19
  misc_feature: MA Experiment 108559 PARAMETER Experiment Name: Zm_5mM_NO_P Parameter: Timepoint (hr) Value: 12
  misc_feature: MA Experiment 108559 PARAMETER Experiment Name: Zm_5mM_NO_P Parameter: Tissue Value: Aerial
  misc_feature: MA Experiment 108559 PARAMETER Experiment Name: Zm_5mM_NO_P Parameter: Treatment Value: 5mM NO vs. No Treatment
  misc_feature: MA Experiment ID: 108689 Result: Up-regulated in Transcription
  misc_feature: MA Experiment 108689 PARAMETER Experiment Name: Zm_Drought_Roots_P Parameter: Age (day) Value: 9
  misc_feature: MA Experiment 108689 PARAMETER Experiment Name: Zm_Drought_Roots_P Parameter: Organism Value: Zea mays
  misc_feature: MA Experiment 108689 PARAMETER Experiment Name: Zm_Drought_Roots_P Parameter: Plant Line Value: 35A19
  misc_feature: MA Experiment 108689 PARAMETER Experiment Name: Zm_Drought_Roots_P Parameter: Timepoint (hr) Value: 24
  misc_feature: MA Experiment 108689 PARAMETER Experiment Name: Zm_Drought_Roots_P Parameter: Tissue Value: Roots
  misc_feature: MA Experiment 108689 PARAMETER Experiment Name: Zm_Drought_Roots_P Parameter: Treatment Value: Drought vs. No Drought
  misc_feature: MA Experiment ID: 20000477 Result: Up-regulated in Transcription
  misc_feature: MA Experiment 20000477 PARAMETER Experiment Name: Zm_5mM_SA_P Parameter: Age (day) Value: 10
  misc_feature: MA Experiment 20000477 PARAMETER Experiment Name: Zm_5mM_SA_P Parameter: Organism Value: Zea mays
  misc_feature: MA Experiment 20000477 PARAMETER Experiment Name: Zm_5mM_SA_P Parameter: Plant Line Value: 35A19
  misc_feature: MA Experiment 20000477 PARAMETER Experiment Name: Zm_5mM_SA_P Parameter: Timepoint (hr) Value: 48
  misc_feature: MA Experiment 20000477 PARAMETER Experiment Name: Zm_5mM_SA_P Parameter: Tissue Value: Aerial
  misc_feature: MA Experiment 20000477 PARAMETER Experiment Name: Zm_5mM_SA_P Parameter: Treatment Value: 5mM SA vs. No Treatment
  misc_feature: MA Experiment ID: 20000478 Result: Up-regulated in Transcription
  misc_feature: MA Experiment 20000478 PARAMETER Experiment Name: Zm_5mM_SA_P Parameter: Age (day) Value: 11
  misc_feature: MA Experiment 20000478 PARAMETER Experiment Name: Zm_5mM_SA_P Parameter: Organism Value: Zea mays
  misc_feature: MA Experiment 20000478 PARAMETER Experiment Name: Zm_5mM_SA_P Parameter: Plant Line Value: 35A19
  misc_feature: MA Experiment 20000478 PARAMETER Experiment Name: Zm_5mM_SA_P Parameter: Timepoint (hr) Value: 72
  misc_feature: MA Experiment 20000478 PARAMETER Experiment Name: Zm_5mM_SA_P Parameter: Tissue Value: Aerial
  misc_feature: MA Experiment 20000478 PARAMETER Experiment Name: Zm_5mM_SA_P Parameter: Treatment Value: 5mM SA vs. No Treatment
  misc_feature: MA Experiment ID: 20000479 Result: Up-regulated in Transcription
  misc_feature: MA Experiment 20000479 PARAMETER Experiment Name: Zm_Drought_P Parameter: Age (day) Value: 10
  misc_feature: MA Experiment 20000479 PARAMETER Experiment Name: Zm_Drought_P Parameter: Organism Value: Zea mays
  misc_feature: MA Experiment 20000479 PARAMETER Experiment Name: Zm_Drought_P Parameter: Plant Line Value: 35A19
  misc_feature: MA Experiment 20000479 PARAMETER Experiment Name: Zm_Drought_P Parameter: Timepoint (hr) Value: 48
  misc_feature: MA Experiment 20000479 PARAMETER Experiment Name: Zm_Drought_P Parameter: Tissue Value: Aerial
  misc_feature: MA Experiment 20000479 PARAMETER Experiment Name: Zm_Drought_P Parameter: Treatment Value: Drought vs. No Drought
  misc_feature: MA Experiment ID: 20000480 Result: Up-regulated in Transcription
  misc_feature: MA Experiment 20000480 PARAMETER Experiment Name: Zm_Drought_P Parameter: Age (day) Value: 11
  misc_feature: MA Experiment 20000480 PARAMETER Experiment Name: Zm_Drought_P Parameter: Organism Value: Zea mays
  misc_feature: MA Experiment 20000480 PARAMETER Experiment Name: Zm_Drought_P Parameter: Plant Line Value: 35A19
  misc_feature: MA Experiment 20000480 PARAMETER Experiment Name: Zm_Drought_P Parameter: Timepoint (hr) Value: 72
  misc_feature: MA Experiment 20000480 PARAMETER Experiment Name: Zm_Drought_P Parameter: Tissue Value: Aerial
  misc_feature: MA Experiment 20000480 PARAMETER Experiment Name: Zm_Drought_P Parameter: Treatment Value: Drought vs. No Drought
  misc_feature: MA Experiment ID: 20000532 Result: Up-regulated in Transcription
  misc_feature: MA Experiment 20000532 PARAMETER Experiment Name: Zm_0.001percent_MeJA_P Parameter: Age (day) Value: 10
  misc_feature: MA Experiment 20000532 PARAMETER Experiment Name: Zm_0.001percent_MeJA_P Parameter: Organism Value: Zea mays
  misc_feature: MA Experiment 20000532 PARAMETER Experiment Name: Zm_0.001percent_MeJA_P Parameter: Plant Line Value: 35A19
  misc_feature: MA Experiment 20000532 PARAMETER Experiment Name: Zm_0.001percent_MeJA_P Parameter: Timepoint (hr) Value: 48
  misc_feature: MA Experiment 20000532 PARAMETER Experiment Name: Zm_0.001percent_MeJA_P Parameter: Tissue Value: Aerial
  misc_feature: MA Experiment 20000532 PARAMETER Experiment Name: Zm_0.001percent_MeJA_P Parameter: Treatment Value: 0.001percent MeJA vs. No Treatment
  misc_feature: MA Experiment ID: 20000535 Result: Down-regulated in Transcription
  misc_feature: MA Experiment 20000535 PARAMETER Experiment Name: Zm_Hybrid_Seed_Dev_P Parameter: DAP Value: 30 vs. 12
  misc_feature: MA Experiment 20000535 PARAMETER Experiment Name: Zm_Hybrid_Seed_Dev_P Parameter: Organism Value: Zea mays
  misc_feature: MA Experiment 20000535 PARAMETER Experiment Name: Zm_Hybrid_Seed_Dev_P Parameter: Plant Line Value: 35A19
  misc_feature: MA Experiment 20000535 PARAMETER Experiment Name: Zm_Hybrid_Seed_Dev_P Parameter: Tissue Value: Embryo vs. Unfert Floret
  misc_feature: MA Experiment ID: 20000626 Result: Up-regulated in Transcription
  misc_feature: MA Experiment 20000626 PARAMETER Experiment Name: Zm_Herbicide-Treatments_P Parameter: Timepoint (hr) Value: 12
  misc_feature: MA Experiment 20000626 PARAMETER Experiment Name: Zm_Herbicide-Treatments_P Parameter: Tissue Value: Aerial
  misc_feature: MA Experiment 20000626 PARAMETER Experiment Name: Zm_Herbicide-Treatments_P Parameter: Treatment Value: Roundup vs. No Treatment
  misc_feature: MA Experiment ID: 20000629 Result: Down-regulated in Transcription
  misc_feature: MA Experiment 20000629 PARAMETER Experiment Name: Zm_Herbicide-Treatments_P Parameter: Timepoint (hr) Value: 12
  misc_feature: MA Experiment 20000629 PARAMETER Experiment Name: Zm_Herbicide-Treatments_P Parameter: Tissue Value: Aerial
  misc_feature: MA Experiment 20000629 PARAMETER Experiment Name: Zm_Herbicide-Treatments_P Parameter: Treatment Value: Trimec vs. No Treatment
atgcaccagtcgactctccatattcgccacatcttcttacgtagctctctctctctctctcgctaatacaaggaggagacggagtagaagaaagggtgcagcaaattaatcgggggcactagttcaccttcatcctcaatccattcattcatcagtactcccagccttttccggcacacgcatctatggccccgccatcacacttctacaacaacaatggcgccccgcaggacgccgccagctacctccatgcgggaccaggaaatgcacctccacaggactcctgcttgctcgacgcagacgagttccgccggcagggccaccaagtcatcgacttcatcgccgactactacggccgcatggacgactaccccgtgcaccccagcgtcaaccccggcttcctgcgccgccagctccccgacaaggcgccgtcgcgtccggagtcgtccgacgcgttcggtgccgcgctgcgggacgtccgtgacctcatcctgccaggcatgacgcactggcagagcgcccgccacttcgcgcacttcccggcgtccancaacaccgtcggcgccctcggcgaggccctcacggccggcatcaactccgtcccgttcacgtgggccgcctcgccggccgccacggagctcgagatggtcgtcgtggactggctcggcaaggcgctccacctgcccgagagcctaatgttctgcggcggcggcggaggcacgcttctcggcaccacgtgcgaggccatcctctgcgccctcgtcgccgcgagggaccgcaagctcgtggacatcggcagcgggaggatcggagacctcgtcgtctactgttccgaccagacgcactttgccttccgcaaggcagcgcatattgccgggatccaccgcgacaactgccgcgagatcgccacgtaccgtgacgacatgttcgcgctctcgccagccgagctgcaggccgccatgcaggcggacgtggacgccgggctggtcccgctcttcctgtgcgcgacggtcggaaccactcagacgacggccgtcgaccctatcagagggctctgcgccgtcgcagcgacacacggtgtctgggtgcacgtggatgcggcctacgcgggctcggcgctcgtctgcccagagttccggcacctgatcgacggcgccgaagccgtggactccttcagcatgaatgctcacaagtggctgctggccaacaacgactgctgcgctctgtgggtgaagaagccagctctgctcgtcgcggctctcggcacggagcaggagtacatcctcaaagacgcggcctctgaggggcacgacgtcgtggactacaaggactggtccgtgacgctgacccgccggttccgcgcgctcaagctatggctcgtgctccgctgctatggcgtcgagggcctgcgcgaccacatccgcggccatgtgcgcatggccgcgtcgttcgaggacatggtcaaggccgacccacgcttccaagtcgtggcaaagaggcaattcgcactcgtttgctttaggctccgggcgcccgaggagttgggcggccccaaggcagccaacgcgctcaaccgaaggctgctagaggaggtgaatgcggcttgctccgggccctacatgagctccgctaatgtcggtggcgtctacatgctcagatgcgctatcgggagcacgcttacggaggagcgacacgtccgcgaggcatggacagttgtgcagaacgtagcttcttccctcctcactaaaatggagatgcatgaagattattgaaagcgcctttgcctaataagctcaactcattccactttgttgttgtttattagtttattctattattaagcatcgagttgtgtaacctattatatatacattatggaatgcattatacgact

SEQ ID NO: 13705 - protein, 528 aa, Zea mays subsp. mays
  peptide (1)..(528): Ceres Seq. ID no. 12455024
  misc_feature (70)..(448): Pfam Name: Pyridoxal-dependent decarboxylase conserved domain Pfam Description: Pyridoxal-dependent decarboxylase conserved
  misc_feature (1)..(521): Homolog of NCBI NO: 34909906 NR Description: putative tyrosine/DOPA decarboxylase [Oryza
  misc_feature (36)..(519): Homolog of NCBI NO: 12620328 NR Description: tyrosine/dopa decarboxylase [Thalictrum flavum
  misc_feature (36)..(495): Homolog of NCBI NO: 1717826 NR Description: Tyrosine/DOPA decarboxylase 2 [Includes: DOPA (DDC); Tyrosine decarboxylase ] >gi|1076245|pir||B55066 tyrosine
  misc_feature (459)..(521): Homolog of NCBI NO: 1717826 NR Description: Tyrosine/DOPA decarboxylase 2 [Includes: DOPA (DDC); Tyrosine decarboxylase ] >gi|1076245|pir||B55066 tyrosine
  misc_feature (36)..(495): Homolog of NCBI NO: 22261822 NR Description: Tyrosine/DOPA decarboxylase 3 [Includes: DOPA
  misc_feature (459)..(523): Homolog of NCBI NO: 22261822 NR Description: Tyrosine/DOPA decarboxylase 3 [Includes: DOPA
  misc_feature (36)..(495): Homolog of NCBI NO: 3282525 NR Description: tyrosine/dopa decarboxylase [Papaver somniferum]
  misc_feature (459)..(521): Homolog of NCBI NO: 3282525 NR Description: tyrosine/dopa decarboxylase [Papaver somniferum]
  misc_feature (36)..(523): Homolog of NCBI NO: 3282527 NR Description: tyrosine/dopa decarboxylase [Papaver somniferum]
  misc_feature (36)..(519): Homolog of NCBI NO: 3282523 NR Description: tyrosine/dopa decarboxylase [Papaver somniferum]
  misc_feature (122)..(122): Xaa is any aa, unknown or other
MAPPSHFYNNNGAPQDAASYLHAGPGNAPPQDSCLLDADEFRRQGHQVIDFIADYYGRMDDYPVHPSVNPGFLRRQLPDKAPSRPESSDAFGAALRDVRDLILPGMTHWQSARHFAHFPASXNTVGALGEALTAGINSVPFTWAASPAATELEMVVVDWLGKALHLPESLMFCGGGGGTLLGTTCEAILCALVAARDRKLVDIGSGRIGDLVVYCSDQTHFAFRKAAHIAGIHRDNCREIATYRDDMFALSPAELQAAMQADVDAGLVPLFLCATVGTTQTTAVDPIRGLCAVAATHGVWVHVDAAYAGSALVCPEFRHLIDGAEAVDSFSMNAHKWLLANNDCCALWVKKPALLVAALGTEQEYILKDAASEGHDVVDYKDWSVTLTRRFRALKLWLVLRCYGVEGLRDHIRGHVRMAASFEDMVKADPRFQVVAKRQFALVCFRLRAPEELGGPKAANALNRRLLEEVNAACSGPYMSSANVGGVYMLRCAIGSTLTEERHVREAWTVVQNVASSLLTKMEMHEDY

SEQ ID NO: 13706 - protein, 470 aa, Zea mays subsp. mays
  peptide (1)..(470): Ceres Seq. ID no. 12455025
  misc_feature (12)..(390): Pfam Name: Pyridoxal-dependent decarboxylase conserved domain Pfam Description: Pyridoxal-dependent decarboxylase conserved
  misc_feature (1)..(463): Homolog of NCBI NO: 34909906 NR Description: putative tyrosine/DOPA decarboxylase [Oryza
  misc_feature (1)..(461): Homolog of NCBI NO: 12620328 NR Description: tyrosine/dopa decarboxylase [Thalictrum flavum
  misc_feature (1)..(437): Homolog of NCBI NO: 1717826 NR Description: Tyrosine/DOPA decarboxylase 2 [Includes: DOPA (DDC); Tyrosine decarboxylase ] >gi|1076245|pir||B55066 tyrosine
  misc_feature (401)..(463): Homolog of NCBI NO: 1717826 NR Description: Tyrosine/DOPA decarboxylase 2 [Includes: DOPA (DDC); Tyrosine decarboxylase ] >gi|1076245|pir||B55066 tyrosine
  misc_feature (1)..(437): Homolog of NCBI NO: 22261822 NR Description: Tyrosine/DOPA decarboxylase 3 [Includes: DOPA
  misc_feature (401)..(465): Homolog of NCBI NO: 22261822 NR Description: Tyrosine/DOPA decarboxylase 3 [Includes: DOPA
  misc_feature (1)..(437): Homolog of NCBI NO: 3282525 NR Description: tyrosine/dopa decarboxylase [Papaver somniferum]
  misc_feature (401)..(463): Homolog of NCBI NO: 3282525 NR Description: tyrosine/dopa decarboxylase [Papaver somniferum]
  misc_feature (1)..(465): Homolog of NCBI NO: 3282527 NR Description: tyrosine/dopa decarboxylase [Papaver somniferum]
  misc_feature (1)..(461): Homolog of NCBI NO: 3282523 NR Description: tyrosine/dopa decarboxylase [Papaver somniferum]
  misc_feature (64)..(64): Xaa is any aa, unknown or other
MDDYPVHPSVNPGFLRRQLPDKAPSRPESSDAFGAALRDVRDLILPGMTHWQSARHFAHFPASXNTVGALGEALTAGINSVPFTWAASPAATELEMVVVDWLGKALHLPESLMFCGGGGGTLLGTTCEAILCALVAARDRKLVDIGSGRIGDLVVYCSDQTHFAFRKAAHIAGIHRDNCREIATYRDDMFALSPAELQAAMQADVDAGLVPLFLCATVGTTQTTAVDPIRGLCAVAATHGVWVHVDAAYAGSALVCPEFRHLIDGAEAVDSFSMNAHKWLLANNDCCALWVKKPALLVAALGTEQEYILKDAASEGHDVVDYKDWSVTLTRRFRALKLWLVLRCYGVEGLRDHIRGHVRMAASFEDMVKADPRFQVVAKRQFALVCFRLRAPEELGGPKAANALNRRLLEEVNAACSGPYMSSANVGGVYMLRCAIGSTLTEERHVREAWTVVQNVASSLLTKMEMHEDY

SEQ ID NO: 13707 - protein, 423 aa, Zea mays subsp. mays
  peptide (1)..(423): Ceres Seq. ID no. 12455026
  misc_feature (1)..(343): Pfam Name: Pyridoxal-dependent decarboxylase conserved domain Pfam Description: Pyridoxal-dependent decarboxylase conserved
  misc_feature (1)..(416): Homolog of NCBI NO: 34909906 NR Description: putative tyrosine/DOPA decarboxylase [Oryza
  misc_feature (1)..(414): Homolog of NCBI NO: 12620328 NR Description: tyrosine/dopa decarboxylase [Thalictrum flavum
  misc_feature (1)..(390): Homolog of NCBI NO: 1717826 NR Description: Tyrosine/DOPA decarboxylase 2 [Includes: DOPA (DDC); Tyrosine decarboxylase ] >gi|1076245|pir||B55066 tyrosine
  misc_feature (354)..(416): Homolog of NCBI NO: 1717826 NR Description: Tyrosine/DOPA decarboxylase 2 [Includes: DOPA (DDC); Tyrosine decarboxylase ] >gi|1076245|pir||B55066 tyrosine
  misc_feature (1)..(390): Homolog of NCBI NO: 22261822 NR Description: Tyrosine/DOPA decarboxylase 3 [Includes: DOPA
  misc_feature (354)..(418): Homolog of NCBI NO: 22261822 NR Description: Tyrosine/DOPA decarboxylase 3 [Includes: DOPA
  misc_feature (1)..(390): Homolog of NCBI NO: 3282525 NR Description: tyrosine/dopa decarboxylase [Papaver somniferum]
  misc_feature (354)..(416): Homolog of NCBI NO: 3282525 NR Description: tyrosine/dopa decarboxylase [Papaver somniferum]
  misc_feature (1)..(418): Homolog of NCBI NO: 3282527 NR Description: tyrosine/dopa decarboxylase [Papaver somniferum]
  misc_feature (1)..(414): Homolog of NCBI NO: 3282523 NR Description: tyrosine/dopa decarboxylase [Papaver somniferum]
  misc_feature (17)..(17): Xaa is any aa, unknown or other
MTHWQSARHFAHFPASXNTVGALGEALTAGINSVPFTWAASPAATELEMVVVDWLGKALHLPESLMFCGGGGGTLLGTTCEAILCALVAARDRKLVDIGSGRIGDLVVYCSDQTHFAFRKAAHIAGIHRDNCREIATYRDDMFALSPAELQAAMQADVDAGLVPLFLCATVGTTQTTAVDPIRGLCAVAATHGVWVHVDAAYAGSALVCPEFRHLIDGAEAVDSFSMNAHKWLLANNDCCALWVKKPALLVAALGTEQEYILKDAASEGHDVVDYKDWSVTLTRRFRALKLWLVLRCYGVEGLRDHIRGHVRMAASFEDMVKADPRFQVVAKRQFALVCFRLRAPEELGGPKAANALNRRLLEEVNAACSGPYMSSANVGGVYMLRCAIGSTLTEERHVREAWTVVQNVASSLLTKMEMHEDY

SEQ ID NO: 13708 - DNA, 1324 bp, Zea mays subsp. mays; identical to SEQ ID NO: 5515
  misc_feature (1)..(1324): Ceres Seq. ID no. 13492565
  misc_feature: MA Experiment ID: 108522 Result: Down-regulated in Transcription
  misc_feature: MA Experiment 108522 PARAMETER Experiment Name: Zm_42deg_Heat_P Parameter: Age (day) Value: 8
  misc_feature: MA Experiment 108522 PARAMETER Experiment Name: Zm_42deg_Heat_P Parameter: Organism Value: Zea mays
  misc_feature: MA Experiment 108522 PARAMETER Experiment Name: Zm_42deg_Heat_P Parameter: Plant Line Value: 35A19
  misc_feature: MA Experiment 108522 PARAMETER Experiment Name: Zm_42deg_Heat_P Parameter: Temperature (deg C) Value: 42 vs. 22
  misc_feature: MA Experiment 108522 PARAMETER Experiment Name: Zm_42deg_Heat_P Parameter: Timepoint (hr) Value: 1
  misc_feature: MA Experiment 108522 PARAMETER Experiment Name: Zm_42deg_Heat_P Parameter: Tissue Value: Aerial
  misc_feature: MA Experiment ID: 108527 Result: Down-regulated in Transcription
  misc_feature: MA Experiment 108527 PARAMETER Experiment Name: Zm_5mM_NO_P Parameter: Age (day) Value: 8
  misc_feature: MA Experiment 108527 PARAMETER Experiment Name: Zm_5mM_NO_P Parameter: Organism Value: Zea mays
  misc_feature: MA Experiment 108527 PARAMETER Experiment Name: Zm_5mM_NO_P Parameter: Plant Line Value: 35A19
  misc_feature: MA Experiment 108527 PARAMETER Experiment Name: Zm_5mM_NO_P Parameter: Timepoint (hr) Value: 6
  misc_feature: MA Experiment 108527 PARAMETER Experiment Name: Zm_5mM_NO_P Parameter: Tissue Value: Aerial
  misc_feature: MA Experiment 108527 PARAMETER Experiment Name: Zm_5mM_NO_P Parameter: Treatment Value: 5mM NO vs. No Treatment
  misc_feature: MA Experiment ID: 108535 Result: Down-regulated in Transcription
  misc_feature: MA Experiment 108535 PARAMETER Experiment Name: Zm_Meristem_P Parameter: Age (day) Value: 8
  misc_feature: MA Experiment 108535 PARAMETER Experiment Name: Zm_Meristem_P Parameter: Organism Value: Zea mays
  misc_feature: MA Experiment 108535 PARAMETER Experiment Name: Zm_Meristem_P Parameter: Plant Line Value: 35A19
  misc_feature: MA Experiment 108535 PARAMETER Experiment Name: Zm_Meristem_P Parameter: Tissue Value: Root Meristem vs. Above Root Meristem
  misc_feature: MA Experiment ID: 108536 Result: Up-regulated in Transcription
  misc_feature: MA Experiment 108536 PARAMETER Experiment Name: Zm_Meristem_P Parameter: Age (day) Value: 8
  misc_feature: MA Experiment 108536 PARAMETER Experiment Name: Zm_Meristem_P Parameter: Organism Value: Zea mays
  misc_feature: MA Experiment 108536 PARAMETER Experiment Name: Zm_Meristem_P Parameter: Plant Line Value: 35A19
  misc_feature: MA Experiment 108536 PARAMETER Experiment Name: Zm_Meristem_P Parameter: Tissue Value: Shoot Meristem vs. Above Shoot Meristem
  misc_feature: MA Experiment ID: 108689 Result: Down-regulated in Transcription
  misc_feature: MA Experiment 108689 PARAMETER Experiment Name: Zm_Drought_Roots_P Parameter: Age (day) Value: 9
  misc_feature: MA Experiment 108689 PARAMETER Experiment Name: Zm_Drought_Roots_P Parameter: Organism Value: Zea mays
  misc_feature: MA Experiment 108689 PARAMETER Experiment Name: Zm_Drought_Roots_P Parameter: Plant Line Value: 35A19
  misc_feature: MA Experiment 108689 PARAMETER Experiment Name: Zm_Drought_Roots_P Parameter: Timepoint (hr) Value: 24
  misc_feature: MA Experiment 108689 PARAMETER Experiment Name: Zm_Drought_Roots_P Parameter: Tissue Value: Roots
  misc_feature: MA Experiment 108689 PARAMETER Experiment Name: Zm_Drought_Roots_P Parameter: Treatment Value: Drought vs. No Drought

SEQ ID NO: 13709 - protein, 235 aa, Zea mays subsp. mays; identical to SEQ ID NO: 5516
  peptide (1)..(235): Ceres Seq. ID no. 13492566
  misc_feature (1)..(196): Pfam Name: Phosphofructokinase Pfam Description: Phosphofructokinase
  misc_feature (1)..(196): Pfam Name: Phosphofructokinase Pfam Description: Phosphofructokinase
  misc_feature (1)..(234): Homolog of NCBI NO: 29647436 NR Description: putative pyrophosphate--fructose 6-phosphate 1-
  misc_feature (1)..(234): Homolog of NCBI NO: 29367525 NR Description: fructose-6-phosphate 1-phosphotransferase [Oryza
  misc_feature (1)..(234): Homolog of NCBI NO: 3790102 NR Description: pyrophosphate-dependent phosphofructokinase alpha
  misc_feature (1)..(234): Homolog of NCBI NO: 2499488 NR Description: Pyrophosphate--fructose 6-phosphate
  misc_feature (1)..(234): Homolog of NCBI NO: 129881 NR Description: Pyrophosphate--fructose 6-phosphate
  misc_feature (1)..(234): Homolog of NCBI NO: 29367525 NR Description: fructose-6-phosphate 1-phosphotransferase [Oryza
  misc_feature (1)..(234): Homolog of NCBI NO: 2499488 NR Description: Pyrophosphate--fructose 6-phosphate
  misc_feature (1)..(234): Homolog of NCBI NO: 2507174 NR Description: PYROPHOSPHATE--FRUCTOSE 6-PHOSPHATE
  misc_feature (1)..(234): Homolog of NCBI NO: 3790100 NR Description: pyrophosphate-dependent phosphofructokinase beta
  misc_feature (1)..(234): Homolog of NCBI NO: 2499489 NR Description: Pyrophosphate--fructose 6-phosphate
  misc_feature (1)..(234): Homolog of NCBI NO: 15218074 NR Description: pyrophosphate-dependent phosphofructokinase alpha - related [Arabidopsis thaliana] >gi|25314966|pir||D86342
  misc_feature (1)..(234): Homolog of NCBI NO: 15223082 NR Description: pyrophosphate-dependent phosphofructokinase alpha - related [Arabidopsis thaliana] >gi|25314958|pir||E96793
  misc_feature (1)..(234): Homolog of NCBI NO: 129881 NR Description: Pyrophosphate--fructose 6-phosphate
  misc_feature (1)..(234): Homolog of NCBI NO: 3790102 NR Description: pyrophosphate-dependent phosphofructokinase alpha
  misc_feature (1)..(234): Homolog of NCBI NO: 29647436 NR Description: putative pyrophosphate--fructose 6-phosphate 1-
  misc_feature (1)..(234): Homolog of NCBI NO: 15223082 NR Description: pyrophosphate-dependent phosphofructokinase alpha - related [Arabidopsis thaliana] >gi|25314958|pir||E96793
  misc_feature (1)..(234): Homolog of NCBI NO: 15218074 NR Description: pyrophosphate-dependent phosphofructokinase alpha - related [Arabidopsis thaliana] >gi|25314966|pir||D86342
  misc_feature (1)..(234): Homolog of NCBI NO: 2499489 NR Description: Pyrophosphate--fructose 6-phosphate
  misc_feature (1)..(234): Homolog of NCBI NO: 3790100 NR Description: pyrophosphate-dependent phosphofructokinase beta
  misc_feature (1)..(234): Homolog of NCBI NO: 2507174 NR Description: PYROPHOSPHATE--FRUCTOSE 6-PHOSPHATE

SEQ ID NO: 13710 - protein, 143 aa, Zea mays subsp. mays; identical to SEQ ID NO: 5517
  peptide (1)..(143): Ceres Seq. ID no. 13492567
  misc_feature (1)..(104): Pfam Name: Phosphofructokinase Pfam Description: Phosphofructokinase
  misc_feature (1)..(104): Pfam Name: Phosphofructokinase Pfam Description: Phosphofructokinase
  misc_feature (1)..(142): Homolog of NCBI NO: 29647436 NR Description: putative pyrophosphate--fructose 6-phosphate 1-
  misc_feature (1)..(142): Homolog of NCBI NO: 29367525 NR Description: fructose-6-phosphate 1-phosphotransferase [Oryza
  misc_feature (1)..(142): Homolog of NCBI NO: 3790102 NR Description: pyrophosphate-dependent phosphofructokinase alpha
  misc_feature (1)..(142): Homolog of NCBI NO: 2499488 NR Description: Pyrophosphate--fructose 6-phosphate
  misc_feature (1)..(142): Homolog of NCBI NO: 129881 NR Description: Pyrophosphate--fructose 6-phosphate
  misc_feature (1)..(142): Homolog of NCBI NO: 29367525 NR Description: fructose-6-phosphate 1-phosphotransferase [Oryza
  misc_feature (1)..(142): Homolog of NCBI NO: 2499488 NR Description: Pyrophosphate--fructose 6-phosphate
  misc_feature (1)..(142): Homolog of NCBI NO: 2507174 NR Description: PYROPHOSPHATE--FRUCTOSE 6-PHOSPHATE
  misc_feature (1)..(142): Homolog of NCBI NO: 3790100 NR Description: pyrophosphate-dependent phosphofructokinase beta
  misc_feature (1)..(142): Homolog of NCBI NO: 2499489 NR Description: Pyrophosphate--fructose 6-phosphate
  misc_feature (1)..(142): Homolog of NCBI NO: 15218074 NR Description: pyrophosphate-dependent phosphofructokinase alpha - related [Arabidopsis thaliana] >gi|25314966|pir||D86342
  misc_feature (1)..(142): Homolog of NCBI NO: 15223082 NR Description: pyrophosphate-dependent phosphofructokinase alpha - related [Arabidopsis thaliana] >gi|25314958|pir||E96793
  misc_feature (1)..(142): Homolog of NCBI NO: 129881 NR Description: Pyrophosphate--fructose 6-phosphate
  misc_feature (1)..(142): Homolog of NCBI NO: 3790102 NR Description: pyrophosphate-dependent phosphofructokinase alpha
  misc_feature (1)..(142): Homolog of NCBI NO: 29647436 NR Description: putative pyrophosphate--fructose 6-phosphate 1-
  misc_feature (1)..(142): Homolog of NCBI NO: 15223082 NR Description: pyrophosphate-dependent phosphofructokinase alpha - related [Arabidopsis thaliana] >gi|25314958|pir||E96793
  misc_feature (1)..(142): Homolog of NCBI NO: 15218074 NR Description: pyrophosphate-dependent phosphofructokinase alpha - related [Arabidopsis thaliana] >gi|25314966|pir||D86342
  misc_feature (1)..(142): Homolog of NCBI NO: 2499489 NR Description: Pyrophosphate--fructose 6-phosphate
  misc_feature (1)..(142): Homolog of NCBI NO: 3790100 NR Description: pyrophosphate-dependent phosphofructokinase beta
  misc_feature (1)..(142): Homolog of NCBI NO: 2507174 NR Description: PYROPHOSPHATE--FRUCTOSE 6-PHOSPHATE

SEQ ID NO: 13711 - protein, 124 aa, Zea mays subsp. mays; identical to SEQ ID NO: 5518
  peptide (1)..(124): Ceres Seq. ID no. 13492568
  misc_feature (1)..(85): Pfam Name: Phosphofructokinase Pfam Description: Phosphofructokinase
  misc_feature (1)..(85): Pfam Name: Phosphofructokinase Pfam Description: Phosphofructokinase
  misc_feature (1)..(123): Homolog of NCBI NO: 29647436 NR Description: putative pyrophosphate--fructose 6-phosphate 1-
  misc_feature (1)..(123): Homolog of NCBI NO: 29367525 NR Description: fructose-6-phosphate 1-phosphotransferase [Oryza
  misc_feature (1)..(123): Homolog of NCBI NO: 3790102 NR Description: pyrophosphate-dependent phosphofructokinase alpha
  misc_feature (1)..(123): Homolog of NCBI NO: 2499488 NR Description: Pyrophosphate--fructose 6-phosphate
  misc_feature (1)..(123): Homolog of NCBI NO: 129881 NR Description: Pyrophosphate--fructose 6-phosphate
  misc_feature (1)..(123): Homolog of NCBI NO: 29367525 NR Description: fructose-6-phosphate 1-phosphotransferase [Oryza
  misc_feature (1)..(123): Homolog of NCBI NO: 2499488 NR Description: Pyrophosphate--fructose 6-phosphate
  misc_feature (1)..(123): Homolog of NCBI NO: 2507174 NR Description: PYROPHOSPHATE--FRUCTOSE 6-PHOSPHATE
  misc_feature (1)..(123): Homolog of NCBI NO: 3790100 NR Description: pyrophosphate-dependent phosphofructokinase beta
  misc_feature (1)..(123): Homolog of NCBI NO: 2499489 NR Description: Pyrophosphate--fructose 6-phosphate
  misc_feature (1)..(123): Homolog of NCBI NO: 15218074 NR Description: pyrophosphate-dependent phosphofructokinase alpha - related [Arabidopsis thaliana] >gi|25314966|pir||D86342
  misc_feature (1)..(123): Homolog of NCBI NO: 15223082 NR Description: pyrophosphate-dependent phosphofructokinase alpha - related [Arabidopsis thaliana] >gi|25314958|pir||E96793
  misc_feature (1)..(123): Homolog of NCBI NO: 129881 NR Description: Pyrophosphate--fructose 6-phosphate
  misc_feature (1)..(123): Homolog of NCBI NO: 3790102 NR Description: pyrophosphate-dependent phosphofructokinase alpha
  misc_feature (1)..(123): Homolog of NCBI NO: 29647436 NR Description: putative pyrophosphate--fructose 6-phosphate 1-
  misc_feature (1)..(123): Homolog of NCBI NO: 15223082 NR Description: pyrophosphate-dependent phosphofructokinase alpha - related [Arabidopsis thaliana] >gi|25314958|pir||E96793
  misc_feature (1)..(123): Homolog of NCBI NO: 15218074 NR Description: pyrophosphate-dependent phosphofructokinase alpha - related [Arabidopsis thaliana] >gi|25314966|pir||D86342
  misc_feature (1)..(123): Homolog of NCBI NO: 2499489 NR Description: Pyrophosphate--fructose 6-phosphate
  misc_feature (1)..(123): Homolog of NCBI NO: 3790100 NR Description: pyrophosphate-dependent phosphofructokinase beta
  misc_feature (1)..(123): Homolog of NCBI NO: 2507174 NR Description: PYROPHOSPHATE--FRUCTOSE 6-PHOSPHATE

SEQ ID NO: 13712 - DNA, 955 bp, Zea mays subsp. mays
  misc_feature (1)..(955): Ceres Seq. ID no. 12377211
  misc_feature: MA Experiment ID: 108528 Result: Up-regulated in Transcription
  misc_feature: MA Experiment 108528 PARAMETER Experiment Name: Zm_Imbibed_Seeds_P Parameter: Age (day) Value: 5 vs. 2
  misc_feature: MA Experiment 108528 PARAMETER Experiment Name: Zm_Imbibed_Seeds_P Parameter: Organism Value: Zea mays
  misc_feature: MA Experiment 108528 PARAMETER Experiment Name: Zm_Imbibed_Seeds_P Parameter: Plant Line Value: 35A19
  misc_feature: MA Experiment 108528 PARAMETER Experiment Name: Zm_Imbibed_Seeds_P Parameter: Tissue Value: Aerial vs. Embryo
  misc_feature: MA Experiment ID: 108530 Result: Up-regulated in Transcription
  misc_feature: MA Experiment 108530 PARAMETER Experiment Name: Zm_Imbibed_Seeds_P Parameter: Age (day) Value: 6 vs. 2
  misc_feature: MA Experiment 108530 PARAMETER Experiment Name: Zm_Imbibed_Seeds_P Parameter: Organism Value: Zea mays
  misc_feature: MA Experiment 108530 PARAMETER Experiment Name: Zm_Imbibed_Seeds_P Parameter: Plant Line Value: 35A19
  misc_feature: MA Experiment 108530 PARAMETER Experiment Name: Zm_Imbibed_Seeds_P Parameter: Tissue Value: Aerial vs. Embryo
  misc_feature: MA Experiment ID: 108545 Result: Up-regulated in Transcription
  misc_feature: MA Experiment 108545 PARAMETER Experiment Name: Zm_Imbibed_Seeds_P Parameter: Age (day) Value: 3 vs. 2
  misc_feature: MA Experiment 108545 PARAMETER Experiment Name: Zm_Imbibed_Seeds_P Parameter: Organism Value: Zea mays
  misc_feature: MA Experiment 108545 PARAMETER Experiment Name: Zm_Imbibed_Seeds_P Parameter: Plant Line Value: 35A19
  misc_feature: MA Experiment 108545 PARAMETER Experiment Name: Zm_Imbibed_Seeds_P Parameter: Tissue Value: Aerial vs. Embryo
  misc_feature: MA Experiment ID: 108547 Result: Up-regulated in Transcription
  misc_feature: MA Experiment 108547 PARAMETER Experiment Name: Zm_Imbibed_Seeds_P Parameter: Age (day) Value: 4 vs. 2
  misc_feature: MA Experiment 108547 PARAMETER Experiment Name: Zm_Imbibed_Seeds_P Parameter: Organism Value: Zea mays
  misc_feature: MA Experiment 108547 PARAMETER Experiment Name: Zm_Imbibed_Seeds_P Parameter: Plant Line Value: 35A19
  misc_feature: MA Experiment 108547 PARAMETER Experiment Name: Zm_Imbibed_Seeds_P Parameter: Tissue Value: Aerial vs. Embryo
  misc_feature: MA Experiment ID: 20000626 Result: Down-regulated in Transcription
  misc_feature: MA Experiment 20000626 PARAMETER Experiment Name: Zm_Herbicide-Treatments_P Parameter: Timepoint (hr) Value: 12
  misc_feature: MA Experiment 20000626 PARAMETER Experiment Name: Zm_Herbicide-Treatments_P Parameter: Tissue Value: Aerial
  misc_feature: MA Experiment 20000626 PARAMETER Experiment Name: Zm_Herbicide-Treatments_P Parameter: Treatment Value: Roundup vs. No Treatment
acgcttggcagttggcaagcagcgagtggggggagacagccaactctctatcctcttcccccctcgtccatccccatcccaccgccttgctctcccctctccacttccagctgtccatggctgcagcagcgtgctcctctgcctcgccgctcctcctcccctcagggccgagacatgcgtcggcctccagggcgtggtttctcggcggcaggagcagggcgctgagatcagaggcgccgtgctgctgcaaggccgccgccgcccgtggaagcgctccgcaatgcgggacggtcggtggtggcagcagcagcacccggagggggctgctaggcgtggccctgggagcctctgccttggggctggccgcgtttgacgccgtcgccgccgggttgccgccggaggagaagcccaagctctgcgacgccgcctgcgaaggcgagctcgaaaatgttggttgagcctccgtgcctatggtaactacagaatccggactgcagtacaaggatatcaaagtgggcgaagggcctagcccacccgttggtttccaggttgcagcaaattatgttgctatggtgccaactgggcagatattcgacagttcgctggagaaaggtcagccctacatattccgtgttggatcagggcaggtgatcaaggggcttgatgagggaattttgtcgatgaaggttggaggactacgtcggctgtacatacctgggccattagcgttccctaagggtcttacttctgctcctggaaggccaagagtacccccaagcagccctgtcgttttcgacgtcaatttactgtacataccaggtntcgatgatgagtgaaggcattctgtggcaacagtcatcttttttttgtatacttcattcgagagcaacatactgtacatntagagcacaattctttcaagctataaaatctatgcgaatatctatgttaaccg

SEQ ID NO: 13713 - protein, 151 aa, Zea mays subsp. mays
  peptide (1)..(151): Ceres Seq. ID no. 12377212
  misc_feature (27)..(151): Homolog of NCBI NO: 38636681 NR Description: putative immunophilin / FKBP-type peptidyl-prolyl
  misc_feature (43)..(151): Homolog of NCBI NO: 15224305 NR Description: FKBP-type peptidyl-prolyl cis-trans isomerase; id: At2g43560.1, supported by cDNA: gi_15810120, supported by
  misc_feature (108)..(151): Homolog of NCBI NO: 25408885 NR Description: hypothetical protein At2g43560 [imported] -
  misc_feature (108)..(151): Homolog of NCBI NO: 18252321 NR Description: putative FKBP type peptidyl-prolyl cis-trans [Pyrus communis] >gi|18252333|gb|AAL66198.1|AF386516_1 putative
  misc_feature (140)..(151): Homolog of NCBI NO: 23053670 NR Description: hypothetical protein [Geobacter metallireducens]
  misc_feature (111)..(151): Homolog of NCBI NO: 16329650 NR Description: FKBP-type peptidyl-prolyl cis-trans isomerase
  misc_feature (111)..(151): Homolog of NCBI NO: 17228073 NR Description: FKBP-type peptidyl-prolyl cis-trans isomerase
  misc_feature (115)..(151): Homolog of NCBI NO: 37520410 NR Description: FKBP-type peptidyl-prolyl cis-trans isomerase
  misc_feature (140)..(151): Homolog of NCBI NO: 23063828 NR Description: hypothetical protein [Pseudomonas fluorescens
  misc_feature (122)..(151): Homolog of NCBI NO: 23028135 NR Description: hypothetical protein [Microbulbifer degradans
AWQLASSEWGETANSLSSSPLVHPHPTALLSPLHFQLSMAAAACSSASPLLLPSGPRHASASRAWFLGGRSRALRSEAPCCCKAAAARGSAPQCGTVGGGSSSTRRGLLGVALGASALGLAAFDAVAAGLPPEEKPKLCDAACEGELENVG

SEQ ID NO: 13714 - protein, 123 aa, Zea mays subsp. mays
  peptide (1)..(123): Ceres Seq. ID no. 12377213
RLAVGKQRVGGDSQLSILFPPRPSPSHRLALPSPLPAVHGCSSVLLCLAAPPPLRAETCVGLQGVVSRRQEQGAEIRGAVLLQGRRRPWKRSAMRDGRWWQQQHPEGAARRGPGSLCLGAGRV

SEQ ID NO: 13715 - protein, 121 aa, Zea mays subsp. mays
  peptide (1)..(121): Ceres Seq. ID no. 12377214
  misc_feature (16)..(112): Pfam Name: FKBP-type peptidyl-prolyl cis-trans isomerase Pfam Description: FKBP-type peptidyl-prolyl cis-trans isomerase
  misc_feature (1)..(121): Homolog of NCBI NO: 38636681 NR Description: putative immunophilin / FKBP-type peptidyl-prolyl
  misc_feature (1)..(121): Homolog of NCBI NO: 15224305 NR Description: FKBP-type peptidyl-prolyl cis-trans isomerase; id: At2g43560.1, supported by cDNA: gi_15810120, supported by
  misc_feature (1)..(121): Homolog of NCBI NO: 25408885 NR Description: hypothetical protein At2g43560 [imported] -
  misc_feature (1)..(121): Homolog of NCBI NO: 18252321 NR Description: putative FKBP type peptidyl-prolyl cis-trans [Pyrus communis] >gi|18252333|gb|AAL66198.1|AF386516_1 putative
  misc_feature (1)..(113): Homolog of NCBI NO: 22298646 NR Description: FKBP-type peptidyl-prolyl cis-trans isomerase
  misc_feature (1)..(113): Homolog of NCBI NO: 23053670 NR Description: hypothetical protein [Geobacter metallireducens]
  misc_feature (1)..(115): Homolog of NCBI NO: 16329650 NR Description: FKBP-type peptidyl-prolyl cis-trans isomerase
  misc_feature (1)..(115): Homolog of NCBI NO: 23042526 NR Description: hypothetical protein [Trichodesmium erythraeum
  misc_feature (2)..(113): Homolog of NCBI NO: 39997372 NR Description: FKBP-type peptidyl-prolyl cis-trans isomerase
  misc_feature (1)..(115): Homolog of NCBI NO: 17228073 NR Description: FKBP-type peptidyl-prolyl cis-trans isomerase
  misc_feature (118)..(118): Xaa is any aa, unknown or other
MVTTESGLQYKDIKVGEGPSPPVGFQVAANYVAMVPTGQIFDSSLEKGQPYIFRVGSGQVIKGLDEGILSMKVGGLRRLYIPGPLAFPKGLTSAPGRPRVPPSSPVVFDVNLLYIPGXDDE

SEQ ID NO: 13716 - protein, 113 aa, Zea mays subsp. mays
  peptide (1)..(113): Ceres Seq. ID no. 12377215
  misc_feature (1)..(113): Homolog of NCBI NO: 38636681 NR Description: putative immunophilin / FKBP-type peptidyl-prolyl
  misc_feature (5)..(113): Homolog of NCBI NO: 15224305 NR Description: FKBP-type peptidyl-prolyl cis-trans isomerase; id: At2g43560.1, supported by cDNA: gi_15810120, supported by
  misc_feature (70)..(113): Homolog of NCBI NO: 25408885 NR Description: hypothetical protein At2g43560 [imported] -
  misc_feature (70)..(113): Homolog of NCBI NO: 18252321 NR Description: putative FKBP type peptidyl-prolyl cis-trans [Pyrus communis] >gi|18252333|gb|AAL66198.1|AF386516_1 putative
  misc_feature (102)..(113): Homolog of NCBI NO: 23053670 NR Description: hypothetical protein [Geobacter metallireducens]
  misc_feature (73)..(113): Homolog of NCBI NO: 16329650 NR Description: FKBP-type peptidyl-prolyl cis-trans isomerase
  misc_feature (73)..(113): Homolog of NCBI NO: 17228073 NR Description: FKBP-type peptidyl-prolyl cis-trans isomerase
  misc_feature (77)..(113): Homolog of NCBI NO: 37520410 NR Description: FKBP-type peptidyl-prolyl cis-trans isomerase
  misc_feature (102)..(113): Homolog of NCBI NO: 23063828 NR Description: hypothetical protein [Pseudomonas fluorescens
  misc_feature (84)..(113): Homolog of NCBI NO: 23028135 NR Description: hypothetical protein [Microbulbifer degradans
MAAAACSSASPLLLPSGPRHASASRAWFLGGRSRALRSEAPCCCKAAAARGSAPQCGTVGGGSSSTRRGLLGVALGASALGLAAFDAVAAGLPPEEKPKLCDAACEGELENVG

SEQ ID NO: 13717 - DNA, 1251 bp, Zea mays subsp. mays; identical to SEQ ID NO: 11897
  misc_feature (1)..(1251): Ceres Seq. ID no. 12403165
  misc_feature: MA Experiment ID: 20000534 Result: Down-regulated in Transcription
  misc_feature: MA Experiment 20000534 PARAMETER Experiment Name: Zm_Hybrid_Pollen_P Parameter: Age (day) Value: 8
  misc_feature: MA Experiment 20000534 PARAMETER Experiment Name: Zm_Hybrid_Pollen_P Parameter: Organism Value: Zea mays
  misc_feature: MA Experiment 20000534 PARAMETER Experiment Name: Zm_Hybrid_Pollen_P Parameter: Plant Line Value: 35A19
  misc_feature: MA Experiment 20000534 PARAMETER Experiment Name: Zm_Hybrid_Pollen_P Parameter: Tissue Value: Pollen vs. Aerial

SEQ ID NO: 13718 - protein, 260 aa, Zea mays subsp. mays; identical to SEQ ID NO: 11898
  peptide (1)..(260): Ceres Seq. ID no. 12403166
  misc_feature (18)..(89): Pfam Name: RNA recognition motif. (a.k.a. RRM, RBD, or RNP domain) Pfam Description: RNA recognition motif. (a.k.a. RRM, RBD, or RNP
  misc_feature (18)..(89): Pfam Name: RNA recognition motif. (a.k.a. RRM, RBD, or RNP domain) Pfam Description: RNA recognition motif. (a.k.a. RRM, RBD, or RNP
  misc_feature (1)..(258): Homolog of NCBI NO: 7446336 NR Description: probable arginine/serine-rich splicing factor -
  misc_feature (1)..(259): Homolog of NCBI NO: 33146621 NR Description: putative splicing factor, arginine/serine-rich 2
  misc_feature (1)..(260): Homolog of NCBI NO: 15237641 NR Description: arginine/serine-rich splicing factor SC35; id: At5g64200.1, supported by cDNA: gi_17380867 [Arabidopsis >gi|17380868|gb|AAL36246.1| unknown protein [Arabidopsis
  misc_feature (1)..(259): Homolog of NCBI NO: 9843653 NR Description: splicing factor SC35 [Arabidopsis thaliana]
  misc_feature (4)..(219): Homolog of NCBI NO: 28279759 NR Description: Similar to splicing factor, arginine/serine-rich
  misc_feature (1)..(259): Homolog of NCBI NO: 33146621 NR Description: putative splicing factor, arginine/serine-rich 2
  misc_feature (1)..(259): Homolog of NCBI NO: 9843653 NR Description: splicing factor SC35 [Arabidopsis thaliana]
  misc_feature (4)..(219): Homolog of NCBI NO: 4506899 NR Description: splicing factor, arginine/serine-rich 2 [Homo
  misc_feature (4)..(219): Homolog of NCBI NO: 39794351 NR Description: Unknown (protein for MGC:75633) [Silurana
  misc_feature (4)..(219): Homolog of NCBI NO: 28175397 NR Description: Unknown (protein for MGC:53177) [Xenopus laevis]
  misc_feature (4)..(219): Homolog of NCBI NO: 6755478 NR Description: splicing factor, arginine/serine-rich 2; DNA Chr 11, Wayne State University 175, expressed; splicing factor [Mus musculus] >gi|27691222|ref|XP_213556.1| similar to
  misc_feature (4)..(219): Homolog of NCBI NO: 266991 NR Description: Splicing factor, arginine/serine-rich 2 (Splicing
  misc_feature (4)..(219): Homolog of NCBI NO: 28279759 NR Description: Similar to splicing factor, arginine/serine-rich
  misc_feature (1)..(260): Homolog of NCBI NO: 15237641 NR Description: arginine/serine-rich splicing factor SC35; id: At5g64200.1, supported by cDNA: gi_17380867 [Arabidopsis >gi|17380868|gb|AAL36246.1| unknown protein [Arabidopsis
  misc_feature (1)..(258): Homolog of NCBI NO: 7446336 NR Description: probable arginine/serine-rich splicing factor -
  misc_feature (4)..(219): Homolog of NCBI NO: 266991 NR Description: Splicing factor, arginine/serine-rich 2 (Splicing
  misc_feature (4)..(219): Homolog of NCBI NO: 6755478 NR Description: splicing factor, arginine/serine-rich 2; DNA Chr 11, Wayne State University 175, expressed; splicing factor [Mus musculus] >gi|27691222|ref|XP_213556.1| similar to
  misc_feature (4)..(219): Homolog of NCBI NO: 28175397 NR Description: Unknown (protein for MGC:53177) [Xenopus laevis]
  misc_feature (4)..(219): Homolog of NCBI NO: 39794351 NR Description: Unknown (protein for MGC:75633) [Silurana
  misc_feature (4)..(219): Homolog of NCBI NO: 4506899 NR Description: splicing factor, arginine/serine-rich 2 [Homo

SEQ ID NO: 13719 - protein, 173 aa, Zea mays subsp. mays; identical to SEQ ID NO: 11899
  peptide (1)..(173): Ceres Seq. ID no. 12403167
  misc_feature (25)..(73): Pfam Name: Protamine P1 Pfam Description: Protamine P1
  misc_feature (25)..(73): Pfam Name: Protamine P1 Pfam Description: Protamine P1
  misc_feature (1)..(171): Homolog of NCBI NO: 7446336 NR Description: probable arginine/serine-rich splicing factor -
  misc_feature (1)..(172): Homolog of NCBI NO: 33146621 NR Description: putative splicing factor, arginine/serine-rich 2
  misc_feature (1)..(173): Homolog of NCBI NO: 15237641 NR Description: arginine/serine-rich splicing factor SC35; id: At5g64200.1, supported by cDNA: gi_17380867 [Arabidopsis >gi|17380868|gb|AAL36246.1| unknown protein [Arabidopsis
  misc_feature (1)..(172): Homolog of NCBI NO: 9843653 NR Description: splicing factor SC35 [Arabidopsis thaliana]
  misc_feature (1)..(132): Homolog of NCBI NO: 28279759 NR Description: Similar to splicing factor, arginine/serine-rich
  misc_feature (1)..(172): Homolog of NCBI NO: 33146621 NR Description: putative splicing factor, arginine/serine-rich 2
  misc_feature (1)..(172): Homolog of NCBI NO: 9843653 NR Description: splicing factor SC35 [Arabidopsis thaliana]
  misc_feature (1)..(132): Homolog of NCBI NO: 4506899 NR Description: splicing factor, arginine/serine-rich 2 [Homo
  misc_feature (1)..(132): Homolog of NCBI NO: 39794351 NR Description: Unknown (protein for MGC:75633) [Silurana
  misc_feature (1)..(132): Homolog of NCBI NO: 28175397 NR Description: Unknown (protein for MGC:53177) [Xenopus laevis]
  misc_feature (1)..(132): Homolog of NCBI NO: 6755478 NR Description: splicing factor, arginine/serine-rich 2; DNA Chr 11, Wayne State University 175, expressed; splicing factor [Mus musculus] >gi|27691222|ref|XP_213556.1| similar to
  misc_feature (1)..(132): Homolog of NCBI NO: 266991 NR Description: Splicing factor, arginine/serine-rich 2 (Splicing
  misc_feature (1)..(132): Homolog of NCBI NO: 28279759 NR Description: Similar to splicing factor, arginine/serine-rich
  misc_feature (1)..(173): Homolog of NCBI NO: 15237641 NR Description: arginine/serine-rich splicing factor SC35; id: At5g64200.1, supported by cDNA: gi_17380867 [Arabidopsis >gi|17380868|gb|AAL36246.1| unknown protein [Arabidopsis
  misc_feature (1)..(171): Homolog of NCBI NO: 7446336 NR Description: probable arginine/serine-rich splicing factor -
  misc_feature (1)..(132): Homolog of NCBI NO: 266991 NR Description: Splicing factor, arginine/serine-rich 2 (Splicing
  misc_feature (1)..(132): Homolog of NCBI NO: 6755478 NR Description: splicing factor, arginine/serine-rich 2; DNA Chr 11, Wayne State University 175, expressed; splicing factor [Mus musculus] >gi|27691222|ref|XP_213556.1| similar to
  misc_feature (1)..(132): Homolog of NCBI NO: 28175397 NR Description: Unknown (protein for MGC:53177) [Xenopus laevis]
  misc_feature (1)..(132): Homolog of NCBI NO: 39794351 NR Description: Unknown (protein for MGC:75633) [Silurana
  misc_feature (1)..(132): Homolog of NCBI NO: 4506899 NR Description: splicing factor, arginine/serine-rich 2 [Homo

SEQ ID NO: 13720 - protein, 139 aa, Zea mays subsp. mays; identical to SEQ ID NO: 11900
  peptide (1)..(139): Ceres Seq. ID no. 12403168

SEQ ID NO: 13721 - DNA, 1974 bp, Zea mays subsp. mays
  misc_feature (1)..(1974): Ceres Seq. ID no. 12419180
  misc_feature: MA Experiment ID: 108528 Result: Up-regulated in Transcription
  misc_feature: MA Experiment 108528 PARAMETER Experiment Name: Zm_Imbibed_Seeds_P Parameter: Age (day) Value: 5 vs. 2
  misc_feature: MA Experiment 108528 PARAMETER Experiment Name: Zm_Imbibed_Seeds_P Parameter: Organism Value: Zea mays
  misc_feature: MA Experiment 108528 PARAMETER Experiment Name: Zm_Imbibed_Seeds_P Parameter: Plant Line Value: 35A19
  misc_feature: MA Experiment 108528 PARAMETER Experiment Name: Zm_Imbibed_Seeds_P Parameter: Tissue Value: Aerial vs. Embryo
  misc_feature: MA Experiment ID: 108529 Result: Up-regulated in Transcription
  misc_feature: MA Experiment 108529 PARAMETER Experiment Name: Zm_Imbibed_Seeds_P Parameter: Age (day) Value: 5 vs. 2
  misc_feature: MA Experiment 108529 PARAMETER Experiment Name: Zm_Imbibed_Seeds_P Parameter: Organism Value: Zea mays
  misc_feature: MA Experiment 108529 PARAMETER Experiment Name: Zm_Imbibed_Seeds_P Parameter: Plant Line Value: 35A19
  misc_feature: MA Experiment 108529 PARAMETER Experiment Name: Zm_Imbibed_Seeds_P Parameter: Tissue Value: Roots vs. Embryo
atcgctctctcctttgcacccctagctagctagtactactgctgctcctccgacttgctcttcgcgcagcaggacggagaaacaagaaccatccctccccctaccggctaccgctgctactcatggtcgcgcgcactgcctcctggtgccgccgcgtatgatccagacatgaatagggcgcacagcagcagctccaagctcatcaacgagaagctcgtggaacaccggatctccactgcgaagcactgcccccactgcggcgagaaaatcgacagcaaaccggattgggtggggctgccggcaggcgtcaagttcgatccaactgaccaggagctgatcgagcacctcgaggcgaaagtgaaggatgaaggctcgagatctcaccctctcatcgacgagttcatacccacaatagatggggaggacggcatatgttacacccaccccgagaaacttccaggtgtgacaagggatggcctaagcaagcacttcttccaccggccgtccaaggcctacacgacgggcacgaggaagaggaggaagatacagacggagtgcgacgtccacaagggggagacgaggtggcacaagaccggcaagacgcggccggtgatggtgaacggccgtcagaaggggtgcaagaagatattggtgctgtacaccaacttcggcaagcaccgcaagccggagaagacgaactgggtcatgcaccagtaccacctcggcgacctagaagaggagaaggagggggagctggtggtgtgcaagatcttctaccagacgcaacccaggcagtgcagctggtcctccgaccggggcgccgccgccactgccttggcagcaacggcggcggcagcggcggcggcggcgcaggagcagcataggagggatagtggcagtggcagctgctcgtctagggaccacgaggtgtcagccacatcgttcccagccggatacacagtcaccacggcggtcgatatgcagcagcatatgaagcagcctgcggaccatttcagcttcgcgcctttcaggaaaaccttcgatcaggaggttggtataggtggtgatcaggtgccatctaatcagcttggacgttcagagccgcatcatgccggcctggggcagcagccacacggcccggtgctcgcgacgaagacggctgtgcctgctacagctttcctgatcagtaggccatcgaaccctgtctcgactatggtgccacctgcaatgcagcacgcatcagttgttctcgatcatgatcagttccatgtgccagcaatccttctccatcaccatgacaaatttcagcaacagcaccaacagtcacagccacaacaaaagcttgaccgcagatctgccggcttggaagaactgataatgggctgcacgtcgtccacaagcacaaaaggagatgcttccattgctcacccccaagagacagaatggccttacccgtactggccacctgacaaccaagatcatcatggatagtagcaacagggacctggtaaatagtggcgatgatgtgaatgctgaaggaacactaaccgcaaccactttcactggaatggtttttgtctgcttgaatatgcagcgttgctttcttggagaatgtacacctacaatagtggggaaagaacagagaaaaaacatatctctgtagatctccctcaataaagaaatgaggataaaactagttaacagtgtgagctctccaagacagaagagacaaaatggccaacgaaaagagaagggggaaagaccgacgggaggaaaggtactgtgtgtgctgacattgaagggatcatgtgtggaccgttagatgtattagagcaccttaatcaagtataactataatcagtttacagtttaccacagtttttttattcgtactacctgttttccaattgtaaaaactagtggcattgtttgcatgtacattaacccttttaatttctttcagtttctaaactg

SEQ ID NO: 13722 - protein, 440 aa, Zea mays subsp. mays
  peptide (1)..(440): Ceres Seq. ID no. 12419181
  misc_feature (55)..(186): Pfam Name: No apical meristem (NAM) protein Pfam Description: No apical meristem (NAM) protein
  misc_feature (1)..(425): Homolog of NCBI NO: 34906416 NR Description: P0710E05.22 [Oryza sativa (japonica
  misc_feature (2)..(249): Homolog of NCBI NO: 15233497 NR Description: putative protein; protein id: At4g29230.1
  misc_feature (6)..(275): Homolog of NCBI NO: 15241889 NR Description: putative protein; protein id: At5g56620.1 thaliana] >gi|10176766|dbj|BAB09880.1|
  misc_feature (21)..(222): Homolog of NCBI NO: 15235314 NR Description: similar to NAM protein, putative; protein id:
  misc_feature (4)..(245): Homolog of NCBI NO: 34911014 NR Description: OJ1125_C04.12 [Oryza sativa (japonica
  misc_feature (27)..(210): Homolog of NCBI NO: 18396807 NR Description: NAM protein, putative; protein id: At1g28470.1,
  misc_feature (27)..(210): Homolog of NCBI NO: 21554371 NR Description: NAM protein, putative [Arabidopsis thaliana]
  misc_feature (32)..(210): Homolog of NCBI NO: 6560767 NR Description: F3M18.9 [Arabidopsis thaliana]
  misc_feature (1)..(209): Homolog of NCBI NO: 12320749 NR Description: unknown protein [Arabidopsis thaliana]
  misc_feature (1)..(209): Homolog of NCBI NO: 30689293 NR Description: No apical meristem (NAM) protein family
MNRAHSSSSKLINEKLVEHRISTAKHCPHCGEKIDSKPDWVGLPAGVKFDPTDQELIEHLEAKVKDEGSRSHPLIDEFIPTIDGEDGICYTHPEKLPGVTRDGLSKHFFHRPSKAYTTGTRKRRKIQTECDVHKGETRWHKTGKTRPVMVNGRQKGCKKILVLYTNFGKHRKPEKTNWVMHQYHLGDLEEEKEGELVVCKIFYQTQPRQCSWSSDRGAAATALAATAAAAAAAAQEQHRRDSGSGSCSSRDHEVSATSFPAGYTVTTAVDMQQHMKQPADHFSFAPFRKTFDQEVGIGGDQVPSNQLGRSEPHHAGLGQQPHGPVLATKTAVPATAFLISRPSNPVSTMVPPAMQHASVVLDHDQFHVPAILLHHHDKFQQQHQQSQPQQKLDRRSAGLEELIMGCTSSTSTKGDASIAHPQETEWPYPYWPPDNQDHHG

SEQ ID NO: 13723 - protein, 292 aa, Zea mays subsp. mays
  peptide (1)..(292): Ceres Seq. ID no. 12419182
  misc_feature (1)..(277): Homolog of NCBI NO: 34906416 NR Description: P0710E05.22 [Oryza sativa (japonica
  misc_feature (1)..(101): Homolog of NCBI NO: 15233497 NR Description: putative protein; protein id: At4g29230.1
  misc_feature (1)..(127): Homolog of NCBI NO: 15241889 NR Description: putative protein; protein id: At5g56620.1 thaliana] >gi|10176766|dbj|BAB09880.1|
  misc_feature (1)..(74): Homolog of NCBI NO: 15235314 NR Description: similar to NAM protein, putative; protein id:
  misc_feature (1)..(97): Homolog of NCBI NO: 34911014 NR Description: OJ1125_C04.12 [Oryza sativa (japonica
  misc_feature (1)..(62): Homolog of NCBI NO: 18396807 NR Description: NAM protein, putative; protein id: At1g28470.1,
  misc_feature (1)..(62): Homolog of NCBI NO: 21554371 NR Description: NAM protein, putative [Arabidopsis thaliana]
  misc_feature (1)..(62): Homolog of NCBI NO: 6560767 NR Description: F3M18.9 [Arabidopsis thaliana]
  misc_feature (1)..(61): Homolog of NCBI NO: 12320749 NR Description: unknown protein [Arabidopsis thaliana]
  misc_feature (1)..(61): Homolog of NCBI NO: 30689293 NR Description: No apical meristem (NAM) protein family
MVNGRQKGCKKILVLYTNFGKHRKPEKTNWVMHQYHLGDLEEEKEGELVVCKIFYQTQPRQCSWSSDRGAAATALAATAAAAAAAAQEQHRRDSGSGSCSSRDHEVSATSFPAGYTVTTAVDMQQHMKQPADHFSFAPFRKTFDQEVGIGGDQVPSNQLGRSEPHHAGLGQQPHGPVLATKTAVPATAFLISRPSNPVSTMVPPAMQHASVVLDHDQFHVPAILLHHHDKFQQQHQQSQPQQKLDRRSAGLEELIMGCTSSTSTKGDASIAHPQETEWPYPYWPPDNQDHHG

SEQ ID NO: 13724 - protein, 261 aa, Zea mays subsp. mays
  peptide (1)..(261): Ceres Seq. ID no. 12419183
  misc_feature (1)..(246): Homolog of NCBI NO: 34906416 NR Description: P0710E05.22 [Oryza sativa (japonica
  misc_feature (1)..(70): Homolog of NCBI NO: 15233497 NR Description: putative protein; protein id: At4g29230.1
  misc_feature (1)..(96): Homolog of NCBI NO: 15241889 NR Description: putative protein; protein id: At5g56620.1 thaliana] >gi|10176766|dbj|BAB09880.1|
  misc_feature (1)..(43): Homolog of NCBI NO: 15235314 NR Description: similar to NAM protein, putative; protein id:
  misc_feature (1)..(66): Homolog of NCBI NO: 34911014 NR Description: OJ1125_C04.12 [Oryza sativa (japonica
  misc_feature (1)..(31): Homolog of NCBI NO: 18396807 NR Description: NAM protein, putative; protein id: At1g28470.1,
  misc_feature (1)..(31): Homolog of NCBI NO: 21554371 NR Description: NAM protein, putative [Arabidopsis thaliana]
  misc_feature (1)..(31): Homolog of NCBI NO: 6560767 NR Description: F3M18.9 [Arabidopsis thaliana]
  misc_feature (1)..(30): Homolog of NCBI NO: 12320749 NR Description: unknown protein [Arabidopsis thaliana]
  misc_feature (1)..(30): Homolog of NCBI NO: 30689293 NR Description: No apical meristem (NAM) protein family
MHQYHLGDLEEEKEGELVVCKIFYQTQPRQCSWSSDRGAAATALAATAAAAAAAAQEQHRRDSGSGSCSSRDHEVSATSFPAGYTVTTAVDMQQHMKQPADHFSFAPFRKTFDQEVGIGGDQVPSNQLGRSEPHHAGLGQQPHGPVLATKTAVPATAFLISRPSNPVSTMVPPAMQHASVVLDHDQFHVPAILLHHHDKFQQQHQQSQPQQKLDRRSAGLEELIMGCTSSTSTKGDASIAHPQETEWPYPYWPPDNQDHHG

SEQ ID NO: 13725 - DNA, 1444 bp, Zea mays subsp. mays
  misc_feature (1)..(1444): Ceres Seq. ID no. 12455051
  misc_feature: MA Experiment ID: 108504 Result: Up-regulated in Transcription
  misc_feature: MA Experiment 108504 PARAMETER Experiment Name: Zm_Drought_P Parameter: Age (day) Value: 8
  misc_feature: MA Experiment 108504 PARAMETER Experiment Name: Zm_Drought_P Parameter: Organism Value: Zea mays
  misc_feature: MA Experiment 108504 PARAMETER Experiment Name: Zm_Drought_P Parameter: Plant Line Value: 35A19
  misc_feature: MA Experiment 108504 PARAMETER Experiment Name: Zm_Drought_P Parameter: Timepoint (hr) Value: 12
  misc_feature: MA Experiment 108504 PARAMETER Experiment Name: Zm_Drought_P Parameter: Tissue Value: Aerial
  misc_feature: MA Experiment 108504 PARAMETER Experiment Name: Zm_Drought_P Parameter: Treatment Value: Drought vs. No Drought
  misc_feature: MA Experiment ID: 108522 Result: Up-regulated in Transcription
  misc_feature: MA Experiment 108522 PARAMETER Experiment Name: Zm_42deg_Heat_P Parameter: Age (day) Value: 8
  misc_feature: MA Experiment 108522 PARAMETER Experiment Name: Zm_42deg_Heat_P Parameter: Organism Value: Zea mays
  misc_feature: MA Experiment 108522 PARAMETER Experiment Name: Zm_42deg_Heat_P Parameter: Plant Line Value: 35A19
  misc_feature: MA Experiment 108522 PARAMETER Experiment Name: Zm_42deg_Heat_P Parameter: Temperature (deg C) Value: 42 vs. 22
  misc_feature: MA Experiment 108522 PARAMETER Experiment Name: Zm_42deg_Heat_P Parameter: Timepoint (hr) Value: 1
  misc_feature: MA Experiment 108522 PARAMETER Experiment Name: Zm_42deg_Heat_P Parameter: Tissue Value: Aerial
  misc_feature: MA Experiment ID: 108523 Result: Up-regulated in Transcription
  misc_feature: MA Experiment 108523 PARAMETER Experiment Name: Zm_42deg_Heat_P Parameter: Age (day) Value: 8
  misc_feature: MA Experiment 108523 PARAMETER Experiment Name: Zm_42deg_Heat_P Parameter: Organism Value: Zea mays
  misc_feature: MA Experiment 108523 PARAMETER Experiment Name: Zm_42deg_Heat_P Parameter: Plant Line Value: 35A19
  misc_feature: MA Experiment 108523 PARAMETER Experiment Name: Zm_42deg_Heat_P Parameter: Temperature (deg C) Value: 42 vs. 22
  misc_feature: MA Experiment 108523 PARAMETER Experiment Name: Zm_42deg_Heat_P Parameter: Timepoint (hr) Value: 6
  misc_feature: MA Experiment 108523 PARAMETER Experiment Name: Zm_42deg_Heat_P Parameter: Tissue Value: Aerial
  misc_feature: MA Experiment ID: 108527 Result: Up-regulated in Transcription
  misc_feature: MA Experiment 108527 PARAMETER Experiment Name: Zm_5mM_NO_P Parameter: Age (day) Value: 8
  misc_feature: MA Experiment 108527 PARAMETER Experiment Name: Zm_5mM_NO_P Parameter: Organism Value: Zea mays
  misc_feature: MA Experiment 108527 PARAMETER Experiment Name: Zm_5mM_NO_P Parameter: Plant Line Value: 35A19
  misc_feature: MA Experiment 108527 PARAMETER Experiment Name: Zm_5mM_NO_P Parameter: Timepoint (hr) Value: 6
  misc_feature: MA Experiment 108527 PARAMETER Experiment Name: Zm_5mM_NO_P Parameter: Tissue Value: Aerial
  misc_feature: MA Experiment 108527 PARAMETER Experiment Name: Zm_5mM_NO_P Parameter: Treatment Value: 5mM NO vs. No Treatment
  misc_feature: MA Experiment ID: 108540 Result: Up-regulated in Transcription
  misc_feature: MA Experiment 108540 PARAMETER Experiment Name: Zm_20percent_PEG_P Parameter: Age (day) Value: 8
  misc_feature: MA Experiment 108540 PARAMETER Experiment Name: Zm_20percent_PEG_P Parameter: Organism Value: Zea mays
  misc_feature: MA Experiment 108540 PARAMETER Experiment Name: Zm_20percent_PEG_P Parameter: Plant Line Value: 35A19
  misc_feature: MA Experiment 108540 PARAMETER Experiment Name: Zm_20percent_PEG_P Parameter: Timepoint (hr) Value: 6
  misc_feature: MA Experiment 108540 PARAMETER Experiment Name: Zm_20percent_PEG_P Parameter: Tissue Value: Aerial
  misc_feature: MA Experiment 108540 PARAMETER Experiment Name: Zm_20percent_PEG_P Parameter: Treatment Value: 20percent PEG vs. No Treatment
  misc_feature: MA Experiment ID: 108556 Result: Up-regulated in Transcription
  misc_feature: MA Experiment 108556 PARAMETER Experiment Name: Zm_Drought_P Parameter: Age (day) Value: 9
  misc_feature: MA Experiment 108556 PARAMETER Experiment Name: Zm_Drought_P Parameter: Organism Value: Zea mays
  misc_feature: MA Experiment 108556 PARAMETER Experiment Name: Zm_Drought_P Parameter: Plant Line Value: 35A19
  misc_feature: MA Experiment 108556 PARAMETER Experiment Name: Zm_Drought_P Parameter: Timepoint (hr) Value: 24
  misc_feature: MA Experiment 108556 PARAMETER Experiment Name: Zm_Drought_P Parameter: Tissue Value: Aerial
  misc_feature: MA Experiment 108556 PARAMETER Experiment Name: Zm_Drought_P Parameter: Treatment Value: Drought vs. No Drought
  misc_feature: MA Experiment ID: 108559 Result: Up-regulated in Transcription
  misc_feature: MA Experiment 108559 PARAMETER Experiment Name: Zm_5mM_NO_P Parameter: Age (day) Value: 8
  misc_feature: MA Experiment 108559 PARAMETER Experiment Name: Zm_5mM_NO_P Parameter: Organism Value: Zea mays
  misc_feature: MA Experiment 108559 PARAMETER Experiment Name: Zm_5mM_NO_P Parameter: Plant Line Value: 35A19
  misc_feature: MA Experiment 108559 PARAMETER Experiment Name: Zm_5mM_NO_P Parameter: Timepoint (hr) Value: 12
  misc_feature: MA Experiment 108559 PARAMETER Experiment Name: Zm_5mM_NO_P Parameter: Tissue Value: Aerial
  misc_feature: MA Experiment 108559 PARAMETER Experiment Name: Zm_5mM_NO_P Parameter: Treatment Value: 5mM NO vs. No Treatment
  misc_feature: MA Experiment ID: 108689 Result: Up-regulated in Transcription
  misc_feature: MA Experiment 108689 PARAMETER Experiment Name: Zm_Drought_Roots_P Parameter: Age (day) Value: 9
  misc_feature: MA Experiment 108689 PARAMETER Experiment Name: Zm_Drought_Roots_P Parameter: Organism Value: Zea mays
  misc_feature: MA Experiment 108689 PARAMETER Experiment Name: Zm_Drought_Roots_P Parameter: Plant Line Value: 35A19
  misc_feature: MA Experiment 108689 PARAMETER Experiment Name: Zm_Drought_Roots_P Parameter: Timepoint (hr) Value: 24
  misc_feature: MA Experiment 108689 PARAMETER Experiment Name: Zm_Drought_Roots_P Parameter: Tissue Value: Roots
  misc_feature: MA Experiment 108689 PARAMETER Experiment Name: Zm_Drought_Roots_P Parameter: Treatment Value: Drought vs. No Drought
  misc_feature: MA Experiment ID: 20000477 Result: Up-regulated in Transcription
  misc_feature: MA Experiment 20000477 PARAMETER Experiment Name: Zm_5mM_SA_P Parameter: Age (day) Value: 10
  misc_feature: MA Experiment 20000477 PARAMETER Experiment Name: Zm_5mM_SA_P Parameter: Organism Value: Zea mays
  misc_feature: MA Experiment 20000477 PARAMETER Experiment Name: Zm_5mM_SA_P Parameter: Plant Line Value: 35A19
  misc_feature: MA Experiment 20000477 PARAMETER Experiment Name: Zm_5mM_SA_P Parameter: Timepoint (hr) Value: 48
  misc_feature: MA Experiment 20000477 PARAMETER Experiment Name: Zm_5mM_SA_P Parameter: Tissue Value: Aerial
  misc_feature: MA Experiment 20000477 PARAMETER Experiment Name: Zm_5mM_SA_P Parameter: Treatment Value: 5mM SA vs. No Treatment
  misc_feature: MA Experiment ID: 20000479 Result: Up-regulated in Transcription
  misc_feature: MA Experiment 20000479 PARAMETER Experiment Name: Zm_Drought_P Parameter: Age (day) Value: 10
  misc_feature: MA Experiment 20000479 PARAMETER Experiment Name: Zm_Drought_P Parameter: Organism Value: Zea mays
  misc_feature: MA Experiment 20000479 PARAMETER Experiment Name: Zm_Drought_P Parameter: Plant Line Value: 35A19
  misc_feature: MA Experiment 20000479 PARAMETER Experiment Name: Zm_Drought_P Parameter: Timepoint (hr) Value: 48
  misc_feature: MA Experiment 20000479 PARAMETER Experiment Name: Zm_Drought_P Parameter: Tissue Value: Aerial
  misc_feature: MA Experiment 20000479 PARAMETER Experiment Name: Zm_Drought_P Parameter: Treatment Value: Drought vs. No Drought
  misc_feature: MA Experiment ID: 20000480 Result: Up-regulated in Transcription
  misc_feature: MA Experiment 20000480 PARAMETER Experiment Name: Zm_Drought_P Parameter: Age (day) Value: 11
  misc_feature: MA Experiment 20000480 PARAMETER Experiment Name: Zm_Drought_P Parameter: Organism Value: Zea mays
  misc_feature: MA Experiment 20000480 PARAMETER Experiment Name: Zm_Drought_P Parameter: Plant Line Value: 35A19
  misc_feature: MA Experiment 20000480 PARAMETER Experiment Name: Zm_Drought_P Parameter: Timepoint (hr) Value: 72
  misc_feature: MA Experiment 20000480 PARAMETER Experiment Name: Zm_Drought_P Parameter: Tissue Value: Aerial
  misc_feature: MA Experiment 20000480 PARAMETER Experiment Name: Zm_Drought_P Parameter: Treatment Value: Drought vs. No Drought
  misc_feature: MA Experiment ID: 20001608 Result: Down-regulated in Transcription
  misc_feature: MA Experiment 20001608 PARAMETER Experiment Name: Zm_50ppm_KNO3_L-to-H_P Parameter: Age (day) Value: 21
  misc_feature: MA Experiment 20001608 PARAMETER Experiment Name: Zm_50ppm_KNO3_L-to-H_P Parameter: Organism Value: Zea mays
  misc_feature: MA Experiment 20001608 PARAMETER Experiment Name: Zm_50ppm_KNO3_L-to-H_P Parameter: Plant Line Value: 35A19
  misc_feature: MA Experiment 20001608 PARAMETER Experiment Name: Zm_50ppm_KNO3_L-to-H_P Parameter: Timepoint (hr) Value: 48
  misc_feature: MA Experiment 20001608 PARAMETER Experiment Name: Zm_50ppm_KNO3_L-to-H_P Parameter: Tissue Value: Shoots
  misc_feature: MA Experiment 20001608 PARAMETER Experiment Name: Zm_50ppm_KNO3_L-to-H_P Parameter: Treatment Value: 50ppm KNO3 vs. 50ppm KCl
gtggattggggcgagtatcatgcaaatacaaacgatcgagaggttgaaactgcaaaatgacgcgtcgcatcgctgtcatcgtggtggcatcggtcttgtcggcaatggcggtcatgggcatagcgttcatctggacaaggatgaggtccagatcaagggacgatctcctccgtgcagacatgggcgacgacgggtcgtccggcgagatgatccgcgccatcgcggcgtcgcagctgagcttcaagtaccaggagctgcgcgcggcgacggacgagttcagccagacgaacaagctcgggcagggaggctacggctccgtgtacaggggcgtgctggcggacgggcgggaggtggcggtgaagcggctcttcttcaacacgcggcagtgggcggagcagttcttcaacgaggtgaagctggtgagccaggtgcagcacaagaacctggtcaagctgctgggctgcagcgtggaggggcccgagagcctgctcgtctacgagtacctctgcaacaccagcctcgaccactacctcttcgacgcgttcaagaagaacgcgctggactgggagcggaggttcgagatcgtgctgggcacggcggagggcctctcctacctgcacagcgcctcggaggtccggatcatacaccgcgacatcaaggccagcaacgtcctgctggacgacaggttcaggccgaagatcgccgacttcggcctcgccaggaacttcatggacgaccagagccacctcagcaccggcctcgccggaacttttgggtacatggctccggagtacatcgtccacgggcagctcaccgagaaggccgacatctacagctacggcgtgctggtcctcgagatcgtcaccggccggaagagccacaactcggtggcgtcatctgcagaaggcctctcactcatggcactgatatggagacactacaccgcgggcaccctgacggagctgctggacccgaacctccgcgagcagtgctcggaggaggacgccctccgggtgttccacgtcggcctgctgtgcgcccaggcgtcgccgaaccttcggccgcccatgtggaaggtggtggagatgctgagcggcagggatcacaaggcggtggcgcttccccggcccacccagcctcccttcatcaacgtcaaggggtccagcggcaagagcgacagctccggcgggtcggcgtccaactccgacaagtcgcccttctcgctgaaccagctgtcagtcagtggggtgcaggccaggtaaaagctagctagctagctgcggatatcatgtgtttgggctagcggcattttttttcaagttttgtaagtcgtggcgtggatatatcataggtttgacttcgattttctggcttcgttgatctggtaacatactctgattattgctagtatgtgcaagtctttggaagaaagattcatgtttgc

SEQ ID NO: 13726 - protein, 423 aa, Zea mays subsp. mays
  peptide (1)..(423): Ceres Seq. ID no. 12455052
WIGASIMQIQTIERLKLQNDASHRCHRGGIGLVGNGGHGHSVHLDKDEVQIKGRSPPCRHGRRRVVRRDDPRHRGVAAELQVPGAARGDGRVQPDEQARAGRLRLRVQGRAGGRAGGGGEAALLQHAAVGGAVLQRGEAGEPGAAQEPGQAAGLQRGGAREPARLRVPLQHQPRPLPLRRVQEERAGLGAEVRDRAGHGGGPLLPAQRLGGPDHTPRHQGQQRPAGRQVQAEDRRLRPRQELHGRPEPPQHRPRRNFWVHGSGVHRPRAAHREGRHLQLRRAGPRDRHRPEEPQLGGVICRRPLTHGTDMETLHRGHPDGAAGPEPPRAVLGGGRPPGVPRRPAVRPGVAEPSAAHVEGGGDAERQGSQGGGASPAHPASLHQRQGVQRQERQLRRVGVQLRQVALLAEPAVSQWGAGQVKAS

SEQ ID NO: 13727 - protein, 417 aa, Zea mays subsp. mays
  peptide (1)..(417): Ceres Seq. ID no. 12455053
MQIQTIERLKLQNDASHRCHRGGIGLVGNGGHGHSVHLDKDEVQIKGRSPPCRHGRRRVVRRDDPRHRGVAAELQVPGAARGDGRVQPDEQARAGRLRLRVQGRAGGRAGGGGEAALLQHAAVGGAVLQRGEAGEPGAAQEPGQAAGLQRGGAREPARLRVPLQHQPRPLPLRRVQEERAGLGAEVRDRAGHGGGPLLPAQRLGGPDHTPRHQGQQRPAGRQVQAEDRRLRPRQELHGRPEPPQHRPRRNFWVHGSGVHRPRAAHREGRHLQLRRAGPRDRHRPEEPQLGGVICRRPLTHGTDMETLHRGHPDGAAGPEPPRAVLGGGRPPGVPRRPAVRPGVAEPSAAHVEGGGDAERQGSQGGGASPAHPASLHQRQGVQRQERQLRRVGVQLRQVALLAEPAVSQWGAGQVKAS

SEQ ID NO: 13728 - protein, 401 aa, Zea mays subsp. mays
  peptide (1)..(401): Ceres Seq. ID no. 12455054
  misc_feature (2)..(380): Homolog of NCBI NO: 15223169 NR Description: putative protein kinase; protein id: At1g70520.1
  misc_feature (5)..(393): Homolog of NCBI NO: 10178148 NR Description: receptor-like serine/threonine kinase
  misc_feature (58)..(393): Homolog of NCBI NO: 15242677 NR Description: receptor-like protein kinase; protein id:
  misc_feature (8)..(401): Homolog of NCBI NO: 34913832 NR Description: putative protein kinase [Oryza sativa (japonica group)] >gi|20161899|dbj|BAB90811.1| putative protein kinase
  misc_feature (49)..(365): Homolog of NCBI NO: 15223170 NR Description: putative protein kinase; protein id: At1g70530.1
  misc_feature (53)..(365): Homolog of NCBI NO: 2465925 NR Description: receptor-like serine/threonine kinase
  misc_feature (53)..(365): Homolog of NCBI NO: 8778283 NR Description: F14D16.24 [Arabidopsis thaliana]
  misc_feature (1)..(375): Homolog of NCBI NO: 34393282 NR Description: putative serine/threonine kinase receptor
  misc_feature (5)..(401): Homolog of NCBI NO: 15233389 NR Description: serine/threonine kinase-like protein; protein id:
  misc_feature (5)..(397): Homolog of NCBI NO: 38345599 NR Description: OSJNBa0093O08.1 [Oryza sativa (japonica
MTRRIAVIVVASVLSAMAVMGIAFIWTRMRSRSRDDLLRADMGDDGSSGEMIRAIAASQLSFKYQELRAATDEFSQTNKLGQGGYGSVYRGVLADGREVAVKRLFFNTRQWAEQFFNEVKLVSQVQHKNLVKLLGCSVEGPESLLVYEYLCNTSLDHYLFDAFKKNALDWERRFEIVLGTAEGLSYLHSASEVRIIHRDIKASNVLLDDRFRPKIADFGLARNFMDDQSHLSTGLAGTFGYMAPEYIVHGQLTEKADIYSYGVLVLEIVTGRKSHNSVASSAEGLSLMALIWRHYTAGTLTELLDPNLREQCSEEDALRVFHVGLLCAQASPNLRPPMWKVVEMLSGRDHKAVALPRPTQPPFINVKGSSGKSDSSGGSASNSDKSPFSLNQLSVSGVQAR

SEQ ID NO: 13729 - DNA, 1019 bp, Zea mays subsp. mays
  misc_feature (1)..(1019): Ceres Seq. ID no. 13503150
  misc_feature: MA Experiment ID: 108523 Result: Down-regulated in Transcription
  misc_feature: MA Experiment 108523 PARAMETER Experiment Name: Zm_42deg_Heat_P Parameter: Age (day) Value: 8
  misc_feature: MA Experiment 108523 PARAMETER Experiment Name: Zm_42deg_Heat_P Parameter: Organism Value: Zea mays
  misc_feature: MA Experiment 108523 PARAMETER Experiment Name: Zm_42deg_Heat_P Parameter: Plant Line Value: 35A19
  misc_feature: MA Experiment 108523 PARAMETER Experiment Name: Zm_42deg_Heat_P Parameter: Temperature (deg C) Value: 42 vs. 22
  misc_feature: MA Experiment 108523 PARAMETER Experiment Name: Zm_42deg_Heat_P Parameter: Timepoint (hr) Value: 6
  misc_feature: MA Experiment 108523 PARAMETER Experiment Name: Zm_42deg_Heat_P Parameter: Tissue Value: Aerial
  misc_feature: MA Experiment ID: 108535 Result: Down-regulated in Transcription
  misc_feature: MA Experiment 108535 PARAMETER Experiment Name: Zm_Meristem_P Parameter: Age (day) Value: 8
  misc_feature: MA Experiment 108535 PARAMETER Experiment Name: Zm_Meristem_P Parameter: Organism Value: Zea mays
  misc_feature: MA Experiment 108535 PARAMETER Experiment Name: Zm_Meristem_P Parameter: Plant Line Value: 35A19
  misc_feature: MA Experiment 108535 PARAMETER Experiment Name: Zm_Meristem_P Parameter: Tissue Value: Root Meristem vs. Above Root Meristem
  misc_feature: MA Experiment ID: 108544 Result: Down-regulated in Transcription
  misc_feature: MA Experiment ID: 108556 Result: Down-regulated in Transcription
  misc_feature: MA Experiment 108556 PARAMETER Experiment Name: Zm_Drought_P Parameter: Age (day) Value: 9
  misc_feature: MA Experiment 108556 PARAMETER Experiment Name: Zm_Drought_P Parameter: Organism Value: Zea mays
  misc_feature: MA Experiment 108556 PARAMETER Experiment Name: Zm_Drought_P Parameter: Plant Line Value: 35A19
  misc_feature: MA Experiment 108556 PARAMETER Experiment Name: Zm_Drought_P Parameter: Timepoint (hr) Value: 24
  misc_feature: MA Experiment 108556 PARAMETER Experiment Name: Zm_Drought_P Parameter: Tissue Value: Aerial
  misc_feature: MA Experiment 108556 PARAMETER Experiment Name: Zm_Drought_P Parameter: Treatment Value: Drought vs. No Drought
  misc_feature: MA Experiment ID: 108597 Result: Down-regulated in Transcription
  misc_feature: MA Experiment 108597 PARAMETER Experiment Name: Zm_100uM_ABA_P Parameter: Age (day) Value: 9
  misc_feature: MA Experiment 108597 PARAMETER Experiment Name: Zm_100uM_ABA_P Parameter: Organism Value: Zea mays
  misc_feature: MA Experiment 108597 PARAMETER Experiment Name: Zm_100uM_ABA_P Parameter: Plant Line Value: 35A19
  misc_feature: MA Experiment 108597 PARAMETER Experiment Name: Zm_100uM_ABA_P Parameter: Timepoint (hr) Value: 24
  misc_feature: MA Experiment 108597 PARAMETER Experiment Name: Zm_100uM_ABA_P Parameter: Tissue Value: Aerial
  misc_feature: MA Experiment 108597 PARAMETER Experiment Name: Zm_100uM_ABA_P Parameter: Treatment Value: 100uM ABA vs. No Treatment
  misc_feature: MA Experiment ID: 20000477 Result: Down-regulated in Transcription
  misc_feature: MA Experiment 20000477 PARAMETER Experiment Name: Zm_5mM_SA_P Parameter: Age (day) Value: 10
  misc_feature: MA Experiment 20000477 PARAMETER Experiment Name: Zm_5mM_SA_P Parameter: Organism Value: Zea mays
  misc_feature: MA Experiment 20000477 PARAMETER Experiment Name: Zm_5mM_SA_P Parameter: Plant Line Value: 35A19
  misc_feature: MA Experiment 20000477 PARAMETER Experiment Name: Zm_5mM_SA_P Parameter: Timepoint (hr) Value: 48
  misc_feature: MA Experiment 20000477 PARAMETER Experiment Name: Zm_5mM_SA_P Parameter: Tissue Value: Aerial
  misc_feature: MA Experiment 20000477 PARAMETER Experiment Name: Zm_5mM_SA_P Parameter: Treatment Value: 5mM SA vs. No Treatment
  misc_feature: MA Experiment ID: 20000478 Result: Down-regulated in Transcription
  misc_feature: MA Experiment 20000478 PARAMETER Experiment Name: Zm_5mM_SA_P Parameter: Age (day) Value: 11
  misc_feature: MA Experiment 20000478 PARAMETER Experiment Name: Zm_5mM_SA_P Parameter: Organism Value: Zea mays
  misc_feature: MA Experiment 20000478 PARAMETER Experiment Name: Zm_5mM_SA_P Parameter: Plant Line Value: 35A19
  misc_feature: MA Experiment 20000478 PARAMETER Experiment Name: Zm_5mM_SA_P Parameter: Timepoint (hr) Value: 72
  misc_feature: MA Experiment 20000478 PARAMETER Experiment Name: Zm_5mM_SA_P Parameter: Tissue Value: Aerial
  misc_feature: MA Experiment 20000478 PARAMETER Experiment Name: Zm_5mM_SA_P Parameter: Treatment Value: 5mM SA vs. No Treatment
  misc_feature: MA Experiment ID: 20000479 Result: Down-regulated in Transcription
  misc_feature: MA Experiment 20000479 PARAMETER Experiment Name: Zm_Drought_P Parameter: Age (day) Value: 10
  misc_feature: MA Experiment 20000479 PARAMETER Experiment Name: Zm_Drought_P Parameter: Organism Value: Zea mays
  misc_feature: MA Experiment 20000479 PARAMETER Experiment Name: Zm_Drought_P Parameter: Plant Line Value: 35A19
  misc_feature: MA Experiment 20000479 PARAMETER Experiment Name: Zm_Drought_P Parameter: Timepoint (hr) Value: 48
  misc_feature: MA Experiment 20000479 PARAMETER Experiment Name: Zm_Drought_P Parameter: Tissue Value: Aerial
  misc_feature: MA Experiment 20000479 PARAMETER Experiment Name: Zm_Drought_P Parameter: Treatment Value: Drought vs. No Drought
  misc_feature: MA Experiment ID: 20000480 Result: Down-regulated in Transcription
  misc_feature: MA Experiment 20000480 PARAMETER Experiment Name: Zm_Drought_P Parameter: Age (day) Value: 11
  misc_feature: MA Experiment 20000480 PARAMETER Experiment Name: Zm_Drought_P Parameter: Organism Value: Zea mays
  misc_feature: MA Experiment 20000480 PARAMETER Experiment Name: Zm_Drought_P Parameter: Plant Line Value: 35A19
  misc_feature: MA Experiment 20000480 PARAMETER Experiment Name: Zm_Drought_P Parameter: Timepoint (hr) Value: 72
  misc_feature: MA Experiment 20000480 PARAMETER Experiment Name: Zm_Drought_P Parameter: Tissue Value: Aerial
  misc_feature: MA Experiment 20000480 PARAMETER Experiment Name: Zm_Drought_P Parameter: Treatment Value: Drought vs. No Drought
  misc_feature: MA Experiment ID: 20000533 Result: Down-regulated in Transcription
  misc_feature: MA Experiment 20000533 PARAMETER Experiment Name: Zm_0.001percent_MeJA_P Parameter: Age (day) Value: 11
  misc_feature: MA Experiment 20000533 PARAMETER Experiment Name: Zm_0.001percent_MeJA_P Parameter: Organism Value: Zea mays
  misc_feature: MA Experiment 20000533 PARAMETER Experiment Name: Zm_0.001percent_MeJA_P Parameter: Plant Line Value: 35A19
  misc_feature: MA Experiment 20000533 PARAMETER Experiment Name: Zm_0.001percent_MeJA_P Parameter: Timepoint (hr) Value: 72
  misc_feature: MA Experiment 20000533 PARAMETER Experiment Name: Zm_0.001percent_MeJA_P Parameter: Tissue Value: Aerial
  misc_feature: MA Experiment 20000533 PARAMETER Experiment Name: Zm_0.001percent_MeJA_P Parameter: Treatment Value: 0.001percent MeJA vs. No Treatment
  misc_feature: MA Experiment ID: 20000534 Result: Down-regulated in Transcription
  misc_feature: MA Experiment 20000534 PARAMETER Experiment Name: Zm_Hybrid_Pollen_P Parameter: Age (day) Value: 8
  misc_feature: MA Experiment 20000534 PARAMETER Experiment Name: Zm_Hybrid_Pollen_P Parameter: Organism Value: Zea mays
  misc_feature: MA Experiment 20000534 PARAMETER Experiment Name: Zm_Hybrid_Pollen_P Parameter: Plant Line Value: 35A19
  misc_feature: MA Experiment 20000534 PARAMETER Experiment Name: Zm_Hybrid_Pollen_P Parameter: Tissue Value: Pollen vs. Aerial
aaaaaacaaaacatatctatatatctgcaacgtcaaatcaacacaggctgttgtttgcttcttttggtaaaggctttagctgcggcagatccaccggcggcgccccgagaatcgaagatgccggtgaaggtgttcggatcgccgacgtcggcggaggtcgcccgcgtcctggcctgcctgttcgagaaggacgtcgagttccagctcatccgcgtcgactccttccgcggcaccaagcgcctgccccagtacctcaagctccagccgcacggcgaggcgctcaccttcgaggacggcaacgtcaccctcgtcgagtcgaggaagatcctgcgccacatcgccgacaagtacaagaaccaggggtacagggacctgttcggcccgggcgcgctggagcgggcctccatcgagcagtggctgcagacggaggcgcagagcttcgacgtccccagcgccgacatggtctacagcctcgcctacctgccgcccgacatgcagctcgacggcaggggcgtcggcggcctcccggcggcgacggggacgatgaacccggcgcaccggcagaaggtggaggagatgctgcagctgttcgagaagagccgcaggcagctgggcaagctgctggacatctacgagcagcgccttggcgaggaggccttcctggccggaggcaagttcacgctcgccgacctgtcccacctgcccaacgccgaccgcctcgccggcgacccgcggtccgcacgcctcatggagtcgcgcaggaacgtcagcaagtggtgggacaccgtatcccgccgcgactcttgggtcagggtcaaggagttgcagcgcccgccgtccgcggaggcgcccttctgatgtcgatcgatcgcaaattaaggcggtggcctttgctcaagcctacgtgttcggtttctgcataattttttaataaataaacgccactggcccctctacgtcattggcgattgttcattgtgtaataaatcgttcaagagcatatgatgcttcttgccgtg

SEQ ID NO: 13730 - protein, 306 aa, Zea mays subsp. mays
  peptide (1)..(306): Ceres Seq. ID no. 13503151
  misc_feature (169)..(221): Pfam Name: Collagen triple helix repeat (20 copies) Pfam Description: Collagen triple helix repeat (20 copies)
  misc_feature (112)..(279): Homolog of NCBI NO: 11385473 NR Description: glutathione S-transferase GST 11 [Zea mays]
  misc_feature (128)..(264): Homolog of NCBI NO: 11385473 NR Description: glutathione S-transferase GST 11 [Zea mays]
  misc_feature (35)..(296): Homolog of NCBI NO: 23018055 NR Description: hypothetical protein [Thermobifida fusca]
KTKHIYISATSNQHRLLFASFGKGFSCGRSTGGAPRIEDAGEGVRIADVGGGRPRPGLPVREGRRVPAHPRRLLPRHQAPAPVPQAPAARRGAHLRGRQRHPRRVEEDPAPHRRQVQEPGVQGPVRPGRAGAGLHRAVAADGGAELRRPQRRHGLQPRLPAARHAARRQGRRRPPGGDGDDEPGAPAEGGGDAAAVREEPQAAGQAAGHLRAAPWRGGLPGRRQVHARRPVPPAQRRPPRRRPAVRTPHGVAQERQQVVGHRIPPRLLGQGQGVAAPAVRGGALLMSIDRKLRRWPLLKPTCSVSA

SEQ ID NO: 13731 - protein, 285 aa, Zea mays subsp. mays
  peptide (1)..(285): Ceres Seq. ID no. 13503152
  misc_feature (40)..(285): Homolog of NCBI NO: 11385479 NR Description: glutathione S-transferase GST 14 [Zea mays]
  misc_feature (40)..(162): Homolog of NCBI NO: 37536564 NR Description: putative glutathione S-transferase [Oryza sativa
  misc_feature (169)..(285): Homolog of NCBI NO: 37536564 NR Description: putative glutathione S-transferase [Oryza sativa
  misc_feature (42)..(173): Homolog of NCBI NO: 22758271 NR Description: Putative glutathione S-transferase [Oryza sativa
  misc_feature (174)..(281): Homolog of NCBI NO: 22758271 NR Description: Putative glutathione S-transferase [Oryza sativa
  misc_feature (42)..(121): Homolog of NCBI NO: 11385473 NR Description: glutathione S-transferase GST 11 [Zea mays]
  misc_feature (42)..(199): Homolog of NCBI NO: 11385469 NR Description: glutathione S-transferase GST 9 [Zea mays]
  misc_feature (203)..(281): Homolog of NCBI NO: 11385469 NR Description: glutathione S-transferase GST 9 [Zea mays]
  misc_feature (42)..(162): Homolog of NCBI NO: 11385475 NR Description: glutathione S-transferase GST 12 [Zea mays]
  misc_feature (42)..(162): Homolog of NCBI NO: 11385477 NR Description: glutathione S-transferase GST 13 [Zea mays]
KKQNISIYLQRQINTGCCLLLLVKALAAADPPAAPRESKMPVKVFGSPTSAEVARVLACLFEKDVEFQLIRVDSFRGTKRLPQYLKLQPHGEALTFEDGNVTLVESRKILRHIADKYKNQGYRDLFGPGALERASIEQWLQTEAQSFDVPSADMVYSLAYLPPDMQLDGRGVGGLPAATGTMNPAHRQKVEEMLQLFEKSRRQLGKLLDIYEQRLGEEAFLAGGKFTLADLSHLPNADRLAGDPRSARLMESRRNVSKWWDTVSRRDSWVRVKELQRPPSAEAPF

SEQ ID NO: 13732 - protein, 246 aa, Zea mays subsp. mays
  peptide (1)..(246): Ceres Seq. ID no. 13503153
  misc_feature (1)..(246): Homolog of NCBI NO: 11385479 NR Description: glutathione S-transferase GST 14 [Zea mays]
  misc_feature (1)..(123): Homolog of NCBI NO: 37536564 NR Description: putative glutathione S-transferase [Oryza sativa
  misc_feature (130)..(246): Homolog of NCBI NO: 37536564 NR Description: putative glutathione S-transferase [Oryza sativa
  misc_feature (3)..(134): Homolog of NCBI NO: 22758271 NR Description: Putative glutathione S-transferase [Oryza sativa
  misc_feature (135)..(242): Homolog of NCBI NO: 22758271 NR Description: Putative glutathione S-transferase [Oryza sativa
  misc_feature (3)..(82): Homolog of NCBI NO: 11385473 NR Description: glutathione S-transferase GST 11 [Zea mays]
  misc_feature (3)..(160): Homolog of NCBI NO: 11385469 NR Description: glutathione S-transferase GST 9 [Zea mays]
  misc_feature (164)..(242): Homolog of NCBI NO: 11385469 NR Description: glutathione S-transferase GST 9 [Zea mays]
  misc_feature (3)..(123): Homolog of NCBI NO: 11385475 NR Description: glutathione S-transferase GST 12 [Zea mays]
  misc_feature (3)..(123): Homolog of NCBI NO: 11385477 NR Description: glutathione S-transferase GST 13 [Zea mays]
MPVKVFGSPTSAEVARVLACLFEKDVEFQLIRVDSFRGTKRLPQYLKLQPHGEALTFEDGNVTLVESRKILRHIADKYKNQGYRDLFGPGALERASIEQWLQTEAQSFDVPSADMVYSLAYLPPDMQLDGRGVGGLPAATGTMNPAHRQKVEEMLQLFEKSRRQLGKLLDIYEQRLGEEAFLAGGKFTLADLSHLPNADRLAGDPRSARLMESRRNVSKWWDTVSRRDSWVRVKELQRPPSAEAPF

SEQ ID NO: 13733 - DNA, 582 bp, Zea mays subsp. mays
  misc_feature (1)..(582): Ceres Seq. ID no. 13570601
  misc_feature: MA Experiment ID: 108523 Result: Up-regulated in Transcription
  misc_feature: MA Experiment 108523 PARAMETER Experiment Name: Zm_42deg_Heat_P Parameter: Age (day) Value: 8
  misc_feature: MA Experiment 108523 PARAMETER Experiment Name: Zm_42deg_Heat_P Parameter: Organism Value: Zea mays
  misc_feature: MA Experiment 108523 PARAMETER Experiment Name: Zm_42deg_Heat_P Parameter: Plant Line Value: 35A19
  misc_feature: MA Experiment 108523 PARAMETER Experiment Name: Zm_42deg_Heat_P Parameter: Temperature (deg C) Value: 42 vs. 22
  misc_feature: MA Experiment 108523 PARAMETER Experiment Name: Zm_42deg_Heat_P Parameter: Timepoint (hr) Value: 6
  misc_feature: MA Experiment 108523 PARAMETER Experiment Name: Zm_42deg_Heat_P Parameter: Tissue Value: Aerial
  misc_feature: MA Experiment ID: 108527 Result: Up-regulated in Transcription
  misc_feature: MA Experiment 108527 PARAMETER Experiment Name: Zm_5mM_NO_P Parameter: Age (day) Value: 8
  misc_feature: MA Experiment 108527 PARAMETER Experiment Name: Zm_5mM_NO_P Parameter: Organism Value: Zea mays
  misc_feature: MA Experiment 108527 PARAMETER Experiment Name: Zm_5mM_NO_P Parameter: Plant Line Value: 35A19
  misc_feature: MA Experiment 108527 PARAMETER Experiment Name: Zm_5mM_NO_P Parameter: Timepoint (hr) Value: 6
  misc_feature: MA Experiment 108527 PARAMETER Experiment Name: Zm_5mM_NO_P Parameter: Tissue Value: Aerial
  misc_feature: MA Experiment 108527 PARAMETER Experiment Name: Zm_5mM_NO_P Parameter: Treatment Value: 5mM NO vs. No Treatment
attcacgcacctagggttttcgcgccgccgccgccgccgccgctggggccgcgccgcagcccatcgtgttgaaggtcgacttgcattgcgccggctgcgccaacaaggtccgcaaggccatcaagcgcgcaccaggcgtggagtcggtgacgccggacatggcggcgggcaaggtggtcgtgaccggtccggcggacgcggtgcagctcaaggagcgcatcgaggctagggccaagaagcccgtgcagatcgtctccgccggcgccggttcgcccaagaaggacaaggagaagaaagctgacggcggcgagaaaaatgcggccaaagagaagggcggccgatgcagagaagaagaaggccgacaagaagaagggaggcggtgatggaggagagaaaaatgccgacaagaagaagggcggcggcggcggcgataagaaggccgacaaggagaagggcactggcaaacccaaggaggaagaggaggaggaggagamgcccaaggaacccaaggaggagacggktacgctcaagatccaactgcactgsgacggstgcatggaccgcatcaagcgccgcatntgc

SEQ ID NO: 13734 - protein, 89 aa, Zea mays subsp. mays
  peptide (1)..(89): Ceres Seq. ID no. 13570602
  misc_feature (16)..(52): Homolog of NCBI NO: 37534752 NR Description: putative metal-binding protein [Oryza sativa
  misc_feature (1)..(88): Homolog of NCBI NO: 29367499 NR Description: unknown [Oryza sativa (japonica cultivar-group)]
  misc_feature (1)..(87): Homolog of NCBI NO: 37534752 NR Description: putative metal-binding protein [Oryza sativa
  misc_feature (60)..(60): Xaa is any aa, unknown or other
  misc_feature (69)..(69): Xaa is any aa, unknown or other
  misc_feature (77)..(77): Xaa is any aa, unknown or other
  misc_feature (79)..(79): Xaa is any aa, unknown or other
  misc_feature (88)..(88): Xaa is any aa, unknown or other
MRPKRRAADAEKKKADKKKGGGDGGEKNADKKKGGGGGDKKADKEKGTGKPKEEEEEEEXPKEPKEETXTLKIQLHXDXCMDRIKRRXC

SEQ ID NO: 13735 - protein, 79 aa, Zea mays subsp. mays
  peptide (1)..(79): Ceres Seq. ID no. 13570603
  misc_feature (1)..(51): Pfam Name: HlyD family secretion protein Pfam Description: HlyD family secretion protein
  misc_feature (1)..(66): Homolog of NCBI NO: 28972568 NR Description: mKIAA1019 protein [Mus musculus]
  misc_feature (1)..(66): Homolog of NCBI NO: 26333861 NR Description: unnamed protein product [Mus musculus]
  misc_feature (1)..(66): Homolog of NCBI NO: 338290 NR Description: son3 protein
  misc_feature (1)..(66): Homolog of NCBI NO: 9910308 NR Description: Son cell proliferation protein; truncated SON [Mus musculus] >gi|6671178|gb|AAF23121.1|AF193607_1 truncated SON
  misc_feature (1)..(66): Homolog of NCBI NO: 30488 NR Description: DBP-5 protein [Homo sapiens]
  misc_feature (1)..(66): Homolog of NCBI NO: 284068 NR Description: DNA-binding protein 5 - human
  misc_feature (1)..(66): Homolog of NCBI NO: 36546 NR Description: son-a [Homo sapiens]
  misc_feature (1)..(66): Homolog of NCBI NO: 17046381 NR Description: SON DNA binding protein isoform E [Homo sapiens]
  misc_feature (1)..(66): Homolog of NCBI NO: 21040318 NR Description: SON DNA-binding protein isoform E; NRE-binding
  misc_feature (1)..(66): Homolog of NCBI NO: 17046373 NR Description: SON DNA binding protein isoform A [Homo sapiens]
  misc_feature (52)..(52): Xaa is any aa, unknown or other
  misc_feature (61)..(61): Xaa is any aa, unknown or other
  misc_feature (69)..(69): Xaa is any aa, unknown or other
  misc_feature (71)..(71): Xaa is any aa, unknown or other
MQRRRRPTRRREAVMEERKMPTRRRAAAAAIRRPTRRRALANPRRKRRRRRXPRNPRRRRXRSRSNCTXTXAWTASSAA

SEQ ID NO: 13736 - protein, 75 aa, Zea mays subsp. mays
  peptide (1)..(75): Ceres Seq. ID no. 13570604
  misc_feature (8)..(75): Pfam Name: HlyD family secretion protein Pfam Description: HlyD family secretion protein
  misc_feature (7)..(75): Homolog of NCBI NO: 28972568 NR Description: mKIAA1019 protein [Mus musculus]
  misc_feature (7)..(75): Homolog of NCBI NO: 26333861 NR Description: unnamed protein product [Mus musculus]
  misc_feature (7)..(75): Homolog of NCBI NO: 338290 NR Description: son3 protein
  misc_feature (7)..(75): Homolog of NCBI NO: 9910308 NR Description: Son cell proliferation protein; truncated SON [Mus musculus] >gi|6671178|gb|AAF23121.1|AF193607_1 truncated SON
  misc_feature (7)..(75): Homolog of NCBI NO: 30488 NR Description: DBP-5 protein [Homo sapiens]
  misc_feature (7)..(75): Homolog of NCBI NO: 284068 NR Description: DNA-binding protein 5 - human
  misc_feature (7)..(75): Homolog of NCBI NO: 36546 NR Description: son-a [Homo sapiens]
  misc_feature (7)..(75): Homolog of NCBI NO: 17046381 NR Description: SON DNA binding protein isoform E [Homo sapiens]
  misc_feature (7)..(75): Homolog of NCBI NO: 21040318 NR Description: SON DNA-binding protein isoform E; NRE-binding
  misc_feature (7)..(75): Homolog of NCBI NO: 17046373 NR Description: SON DNA binding protein isoform A [Homo sapiens]
FTHLGFSRRRRRRRWGRAAAHRVEGRLALRRLRQQGPQGHQARTRRGVGDAGHGGGQGGRDRSGGRGAAQGAHRG

SEQ ID NO: 13737 - DNA, 2974 bp, Zea mays subsp. mays
  misc_feature (1)..(2974): Ceres Seq. ID no. 13569654
  misc_feature: MA Experiment ID: 20000492 Result: Down-regulated in Transcription
  misc_feature: MA Experiment 20000492 PARAMETER Experiment Name: Zm_Hybrid_Seed_Dev_P Parameter: DAP Value: 12
  misc_feature: MA Experiment 20000492 PARAMETER Experiment Name: Zm_Hybrid_Seed_Dev_P Parameter: Organism Value: Zea mays
  misc_feature: MA Experiment 20000492 PARAMETER Experiment Name: Zm_Hybrid_Seed_Dev_P Parameter: Plant Line Value: 35A19
  misc_feature: MA Experiment 20000492 PARAMETER Experiment Name: Zm_Hybrid_Seed_Dev_P Parameter: Tissue Value: Fert Kernel vs. Unfert Floret
  misc_feature (2612)..(2612): n is a, c, t, g, unknown, or other
  misc_feature (2654)..(2654): n is a, c, t, g, unknown, or other
  misc_feature (2680)..(2680): n is a, c, t, g, unknown, or other
  misc_feature (2697)..(2697): n is a, c, t, g, unknown, or other
  misc_feature (2703)..(2703): n is a, c, t, g, unknown, or other
  misc_feature (2717)..(2717): n is a, c, t, g, unknown, or other
  misc_feature (2731)..(2731): n is a, c, t, g, unknown, or other
  misc_feature (2761)..(2761): n is a, c, t, g, unknown, or other
  misc_feature (2762)..(2762): n is a, c, t, g, unknown, or other
  misc_feature (2770)..(2770): n is a, c, t, g, unknown, or other
  misc_feature (2771)..(2771): n is a, c, t, g, unknown, or other
  misc_feature (2823)..(2823): n is a, c, t, g, unknown, or other
  misc_feature (2856)..(2856): n is a, c, t, g, unknown, or other
  misc_feature (2872)..(2872): n is a, c, t, g, unknown, or other
  misc_feature (2873)..(2873): n is a, c, t, g, unknown, or other
  misc_feature (2914)..(2914): n is a, c, t, g, unknown, or other
  misc_feature (2917)..(2917): n is a, c, t, g, unknown, or other
  misc_feature (2929)..(2929): n is a, c, t, g, unknown, or other
  misc_feature (2962)..(2962): n is a, c, t, g, unknown, or other
tcctaatcaaaaaaactaaaaaaaaagccaaaatggcggggggaggtcgtcgtctcccctccctgcgatcccctccatccgcgacgccatctcggccacttcatgatcactagggtttcgctcttctacccataagccctcgtcccgatgcgctggtggaagcgctcctcctccccctcctgccccgcctcctcatcctcagcatcgacccccgcttcccccgcccgcgcctccaccccccgtctcatcggcggttggggtagcggccctagctcacgccgcgatggcagcggggccagcaacgatccgcagccgcggctgatcagagcgcggcggatgcgctacgtcgtcgatgacctcgaggtcggggtctccgcgctcggcgtggactctccggcgaggagggacgcggcggcgggggtttgcgcttgagacagtgagctccgcgccgatctcgtggtctccgagcaacatggaggtggcgccggcgagatcctcgtcgacccccgtgctgctgccgcatccgctgccccttccaggcgagggggaatcgccgtgccgcgggccggggaggccgcttccgccaccggtgccaaggatgctcgacggggaggggaaagggcctgcagcggacgctcccggtgttttagagactgggagccaaaggatgacgccgttactcgcacggagagtggcggtccaaactctaccaaaggctcatgagcacaacgactttcggttaaatgggactacctgttgtcagcggagaaaggcttttaaagagaagttccaggataagaactgtgatgaaactttgaacttcagattgaacattcctgctaaaagtgctccaagcagtgggttttcaagccctgtacaaagtcctcgaagactgagtaatgtagatttctcatctgctgcaatctctatccaagataccaatgtatggtcagcacgatctctctggtcttctgatgcgatgggatcttcacctccttgtgattcacctgacaagtttgcaggtggtcaggagcgttctcctctctctagtccactgagaagtccagttttaaaatcaagaaacccaagtgcacctccatcaccaatgcatccaaagttgttcccggagaaccatgtttctcgccctgatggcaatggaagtgctagttttcacccattaccgctccctcctgcttctgtaagcccaaagcagacaaatgctagccaccagttagttccaaaagctgagatgccttcggtggctggtcaatggcagaaaggaaaactcttgggtagtggcacctttggatgcgtgtatgaggccaccaataggcacactggagctctttgtgccatgaaagaggtgaatataattccagatgatgctaaatcagtcgagtctctgaagcaattggaacaggaaattaagtttcttagtcaatttaagcatgaaaatattgtgcagtactatggcagtgaaactatcgaagatagattctacatatacctggagtatgttcatcctggttcaatccataagtatgttcatcaacactgtggatcgctgacagaagcagtcatccgtaacttcacacgtcatattctcaagggtcttgcttttttacatagccaaaagattatgcatagggatatcaaaggggcaaatttgttagttgatattaacggtgtagtgaaattggctgacttcggaatggcaaagcatttgagtactgcagctcctaatctttcattgaagggaacaccatactggatggctcctgaggttgttcgggctacactcgataaaagtgcaggttatgatcttctgttgatatttggagccttggctgcacaatcattgagatgtttacaggaaagccaccttggagtggtcttgaagggccggctgcaatgtttaaggtgttgcgcacggacccaccaattccagataacctgtcccctgaagggaaggattttctgagatgctgcttcaagagaaaccctactgagcgaccaacagcaaacaagttgctcgaacacccatttatccaaactttgaaccactacagcccacatagcgttgtacattcattttcgggaattaaatctccagatactgtgcacagcagtgcaagagataaagtaccctggaaaagtgattcatatatgagagggaaacatgcaaatggtgaaacaagcagtgctcggtcgtcagagtcattggcttatcggttgatgacacccctacccaacttgggaaccaatagtttgtcacctccacctttgagttcggcctccagttctggctctgcagcacatacaccgaacagtatgcatttttcagtcccataccatcagcctagtcctttgccaaagcctaacgggaaggaagcaataaatttggtttcccattgaataacagcatgccacctatcacaacatctgggcaaagtccacataaacagcgcaagtgtatccgtccctagcgtctgacccttgtactgccagtaatagctaacaattttctgggtcgtgtaaaaataatttccatgtaagggcttgttcggttattcctaatacacatggattggatgggattggaaaaaattganaagaagtttgacttgtttgggattcaaacccatccaatcccnctcaatccacatggattaagagctanccgaacaagccctaaanagatcnccgtgatatgatcncagggaaatgctgntaaatgagggagctttgtgaaatctgttgnnccgtttgnnttctgggaaactgattggattgcccatgtaacatatttttattagggtgtanctgtaggtgaaactaatggtcaagattgtgccnacaaataggacattanngttgtagctgtagcgtgttgttgatgctgtgtaatgatcanacntgatgtaatcantattgatttttttttggggaaggtaataatgcncgtcaattggcg

SEQ ID NO: 13738 - protein, 542 aa, Zea mays subsp. mays
  peptide (1)..(542): Ceres Seq. ID no. 13569655
  misc_feature (307)..(457): Pfam Name: Protein kinase domain Pfam Description: Protein kinase domain
  misc_feature (227)..(480): Homolog of NCBI NO: 38345839 NR Description: OSJNBa0084K11.3 [Oryza sativa (japonica
  misc_feature (23)..(457): Homolog of NCBI NO: 17027283 NR Description: putative protein kinase [Oryza sativa (japonica
  misc_feature (30)..(491): Homolog of NCBI NO: 33146554 NR Description: putative MAP3K protein kinase(Mitogen-activated
  misc_feature (18)..(505): Homolog of NCBI NO: 15982852 NR Description: AT5g66850/MUD21_11 [Arabidopsis thaliana]
  misc_feature (306)..(505): Homolog of NCBI NO: 25387031 NR Description: mitogen-activated protein kinase MAP3K [imported] Arabidopsis thaliana (fragment) >gi|2315153|emb|CAA74696.1| MAP3K
  misc_feature (306)..(505): Homolog of NCBI NO: 9758135 NR Description: MAP protein kinase [Arabidopsis thaliana]
  misc_feature (18)..(505): Homolog of NCBI NO: 18425121 NR Description: MAP protein kinase [Arabidopsis thaliana] putative MAP protein kinase [Arabidopsis thaliana]
  misc_feature (30)..(491): Homolog of NCBI NO: 34915394 NR Description: putative MAP3K protein kinase(Mitogen-activated
  misc_feature (458)..(491): Homolog of NCBI NO: 17027283 NR Description: putative protein kinase [Oryza sativa (japonica
  misc_feature (174)..(479): Homolog of NCBI NO: 30695537 NR Description: mitogen-activated protein kinase kinase kinase putative (MAP3Ka) [Arabidopsis thaliana] >gi|25405646|pir||G96575
MTSRSGSPRSAWTLRRGGTRRRGFALETVSSAPISWSPSNMEVAPARSSSTPVLLPHPLPLPGEGESPCRGPGRPLPPPVPRMLDGEGKGPAADAPGVLETGSQRMTPLLARRVAVQTLPKAHEHNDFRLNGTTCCQRRKAFKEKFQDKNCDETLNFRLNIPAKSAPSSGFSSPVQSPRRLSNVDFSSAAISIQDTNVWSARSLWSSDAMGSSPPCDSPDKFAGGQERSPLSSPLRSPVLKSRNPSAPPSPMHPKLFPENHVSRPDGNGSASFHPLPLPPASVSPKQTNASHQLVPKAEMPSVAGQWQKGKLLGSGTFGCVYEATNRHTGALCAMKEVNIIPDDAKSVESLKQLEQEIKFLSQFKHENIVQYYGSETIEDRFYIYLEYVHPGSIHKYVHQHCGSLTEAVIRNFTRHILKGLAFLHSQKIMHRDIKGANLLVDINGVVKLADFGMAKHLSTAAPNLSLKGTPYWMAPEVVRATLDKSAGYDLLLIFGALAAQSLRCLQESHLGVVLKGRLQCLRCCARTHQFQITCPLKGRIF

SEQ ID NO: 13739 - protein, 502 aa, Zea mays subsp. mays
  peptide (1)..(502): Ceres Seq. ID no. 13569656
  misc_feature (267)..(417): Pfam Name: Protein kinase domain Pfam Description: Protein kinase domain
  misc_feature (1)..(417): Homolog of NCBI NO: 17027283 NR Description: putative protein kinase [Oryza sativa (japonica
  misc_feature (418)..(451): Homolog of NCBI NO: 17027283 NR Description: putative protein kinase [Oryza sativa (japonica
  misc_feature (1)..(451): Homolog of NCBI NO: 33146554 NR Description: putative MAP3K protein kinase(Mitogen-activated
  misc_feature (1)..(451): Homolog of NCBI NO: 34915394 NR Description: putative MAP3K protein kinase(Mitogen-activated
  misc_feature (1)..(465): Homolog of NCBI NO: 15982852 NR Description: AT5g66850/MUD21_11 [Arabidopsis thaliana]
  misc_feature (1)..(465): Homolog of NCBI NO: 18425121 NR Description: MAP protein kinase [Arabidopsis thaliana] putative MAP protein kinase [Arabidopsis thaliana]
  misc_feature (266)..(465): Homolog of NCBI NO: 25387031 NR Description: mitogen-activated protein kinase MAP3K [imported] Arabidopsis thaliana (fragment) >gi|2315153|emb|CAA74696.1| MAP3K
  misc_feature (266)..(465): Homolog of NCBI NO: 9758135 NR Description: MAP protein kinase [Arabidopsis thaliana]
  misc_feature (187)..(440): Homolog of NCBI NO: 38345839 NR Description: OSJNBa0084K11.3 [Oryza sativa (japonica
  misc_feature (134)..(439): Homolog of NCBI NO: 30695537 NR Description: mitogen-activated protein kinase kinase kinase putative (MAP3Ka) [Arabidopsis thaliana] >gi|25405646|pir||G96575
MEVAPARSSSTPVLLPHPLPLPGEGESPCRGPGRPLPPPVPRMLDGEGKGPAADAPGVLETGSQRMTPLLARRVAVQTLPKAHEHNDFRLNGTTCCQRRKAFKEKFQDKNCDETLNFRLNIPAKSAPSSGFSSPVQSPRRLSNVDFSSAAISIQDTNVWSARSLWSSDAMGSSPPCDSPDKFAGGQERSPLSSPLRSPVLKSRNPSAPPSPMHPKLFPENHVSRPDGNGSASFHPLPLPPASVSPKQTNASHQLVPKAEMPSVAGQWQKGKLLGSGTFGCVYEATNRHTGALCAMKEVNIIPDDAKSVESLKQLEQEIKFLSQFKHENIVQYYGSETIEDRFYIYLEYVHPGSIHKYVHQHCGSLTEAVIRNFTRHILKGLAFLHSQKIMHRDIKGANLLVDINGVVKLADFGMAKHLSTAAPNLSLKGTPYWMAPEVVRATLDKSAGYDLLLIFGALAAQSLRCLQESHLGVVLKGRLQCLRCCARTHQFQITCPLKGRIF

SEQ ID NO: 13740 - protein, 460 aa, Zea mays subsp. mays
  peptide (1)..(460): Ceres Seq. ID no. 13569657
  misc_feature (225)..(375): Pfam Name: Protein kinase domain Pfam Description: Protein kinase domain
  misc_feature (1)..(375): Homolog of NCBI NO: 17027283 NR Description: putative protein kinase [Oryza sativa (japonica
  misc_feature (376)..(409): Homolog of NCBI NO: 17027283 NR Description: putative protein kinase [Oryza sativa (japonica
  misc_feature (1)..(409): Homolog of NCBI NO: 33146554 NR Description: putative MAP3K protein kinase(Mitogen-activated
  misc_feature (1)..(409): Homolog of NCBI NO: 34915394 NR Description: putative MAP3K protein kinase(Mitogen-activated
  misc_feature (1)..(423): Homolog of NCBI NO: 15982852 NR Description: AT5g66850/MUD21_11 [Arabidopsis thaliana]
  misc_feature (1)..(423): Homolog of NCBI NO: 18425121 NR Description: MAP protein kinase [Arabidopsis thaliana] putative MAP protein kinase [Arabidopsis thaliana]
  misc_feature (224)..(423): Homolog of NCBI NO: 25387031 NR Description: mitogen-activated protein kinase MAP3K [imported] Arabidopsis thaliana (fragment) >gi|2315153|emb|CAA74696.1| MAP3K
  misc_feature (224)..(423): Homolog of NCBI NO: 9758135 NR Description: MAP protein kinase [Arabidopsis thaliana]
  misc_feature (145)..(398): Homolog of NCBI NO: 38345839 NR Description: OSJNBa0084K11.3 [Oryza sativa (japonica
  misc_feature (92)..(397): Homolog of NCBI NO: 30695537 NR Description: mitogen-activated protein kinase kinase kinase putative (MAP3Ka) [Arabidopsis thaliana] >gi|25405646|pir||G96575
MLDGEGKGPAADAPGVLETGSQRMTPLLARRVAVQTLPKAHEHNDFRLNGTTCCQRRKAFKEKFQDKNCDETLNFRLNIPAKSAPSSGFSSPVQSPRRLSNVDFSSAAISIQDTNVWSARSLWSSDAMGSSPPCDSPDKFAGGQERSPLSSPLRSPVLKSRNPSAPPSPMHPKLFPENHVSRPDGNGSASFHPLPLPPASVSPKQTNASHQLVPKAEMPSVAGQWQKGKLLGSGTFGCVYEATNRHTGALCAMKEVNIIPDDAKSVESLKQLEQEIKFLSQFKHENIVQYYGSETIEDRFYIYLEYVHPGSIHKYVHQHCGSLTEAVIRNFTRHILKGLAFLHSQKIMHRDIKGANLLVDINGVVKLADFGMAKHLSTAAPNLSLKGTPYWMAPEVVRATLDKSAGYDLLLIFGALAAQSLRCLQESHLGVVLKGRLQCLRCCARTHQFQITCPLKGRIF

SEQ ID NO: 13741 - DNA, 453 bp, Zea mays subsp. mays
  misc_feature (1)..(453): Ceres Seq. ID no. 11030669
  misc_feature: MA Experiment ID: 108528 Result: Up-regulated in Transcription
  misc_feature: MA Experiment 108528 PARAMETER Experiment Name: Zm_Imbibed_Seeds_P Parameter: Age (day) Value: 5 vs. 2
  misc_feature: MA Experiment 108528 PARAMETER Experiment Name: Zm_Imbibed_Seeds_P Parameter: Organism Value: Zea mays
  misc_feature: MA Experiment 108528 PARAMETER Experiment Name: Zm_Imbibed_Seeds_P Parameter: Plant Line Value: 35A19
  misc_feature: MA Experiment 108528 PARAMETER Experiment Name: Zm_Imbibed_Seeds_P Parameter: Tissue Value: Aerial vs. Embryo
  misc_feature: MA Experiment ID: 108530 Result: Up-regulated in Transcription
  misc_feature: MA Experiment 108530 PARAMETER Experiment Name: Zm_Imbibed_Seeds_P Parameter: Age (day) Value: 6 vs. 2
  misc_feature: MA Experiment 108530 PARAMETER Experiment Name: Zm_Imbibed_Seeds_P Parameter: Organism Value: Zea mays
  misc_feature: MA Experiment 108530 PARAMETER Experiment Name: Zm_Imbibed_Seeds_P Parameter: Plant Line Value: 35A19
  misc_feature: MA Experiment 108530 PARAMETER Experiment Name: Zm_Imbibed_Seeds_P Parameter: Tissue Value: Aerial vs. Embryo
  misc_feature: MA Experiment ID: 108545 Result: Up-regulated in Transcription
  misc_feature: MA Experiment 108545 PARAMETER Experiment Name: Zm_Imbibed_Seeds_P Parameter: Age (day) Value: 3 vs. 2
  misc_feature: MA Experiment 108545 PARAMETER Experiment Name: Zm_Imbibed_Seeds_P Parameter: Organism Value: Zea mays
  misc_feature: MA Experiment 108545 PARAMETER Experiment Name: Zm_Imbibed_Seeds_P Parameter: Plant Line Value: 35A19
  misc_feature: MA Experiment 108545 PARAMETER Experiment Name: Zm_Imbibed_Seeds_P Parameter: Tissue Value: Aerial vs. Embryo
  misc_feature: MA Experiment ID: 108546 Result: Down-regulated in Transcription
  misc_feature: MA Experiment 108546 PARAMETER Experiment Name: Zm_Imbibed_Seeds_P Parameter: Age (day) Value: 3 vs. 2
  misc_feature: MA Experiment 108546 PARAMETER Experiment Name: Zm_Imbibed_Seeds_P Parameter: Organism Value: Zea mays
  misc_feature: MA Experiment 108546 PARAMETER Experiment Name: Zm_Imbibed_Seeds_P Parameter: Plant Line Value: 35A19
  misc_feature: MA Experiment 108546 PARAMETER Experiment Name: Zm_Imbibed_Seeds_P Parameter: Tissue Value: Roots vs. Embryo
  misc_feature: MA Experiment ID: 108547 Result: Up-regulated in Transcription
  misc_feature: MA Experiment 108547 PARAMETER Experiment Name: Zm_Imbibed_Seeds_P Parameter: Age (day) Value: 4 vs. 2
  misc_feature: MA Experiment 108547 PARAMETER Experiment Name: Zm_Imbibed_Seeds_P Parameter: Organism Value: Zea mays
  misc_feature: MA Experiment 108547 PARAMETER Experiment Name: Zm_Imbibed_Seeds_P Parameter: Plant Line Value: 35A19
  misc_feature: MA Experiment 108547 PARAMETER Experiment Name: Zm_Imbibed_Seeds_P Parameter: Tissue Value: Aerial vs. Embryo
  misc_feature: MA Experiment ID: 20000479 Result: Down-regulated in Transcription
  misc_feature: MA Experiment 20000479 PARAMETER Experiment Name: Zm_Drought_P Parameter: Age (day) Value: 10
  misc_feature: MA Experiment 20000479 PARAMETER Experiment Name: Zm_Drought_P Parameter: Organism Value: Zea mays
  misc_feature: MA Experiment 20000479 PARAMETER Experiment Name: Zm_Drought_P Parameter: Plant Line Value: 35A19
  misc_feature: MA Experiment 20000479 PARAMETER Experiment Name: Zm_Drought_P Parameter: Timepoint (hr) Value: 48
  misc_feature: MA Experiment 20000479 PARAMETER Experiment Name: Zm_Drought_P Parameter: Tissue Value: Aerial
  misc_feature: MA Experiment 20000479 PARAMETER Experiment Name: Zm_Drought_P Parameter: Treatment Value: Drought vs. No Drought
  misc_feature: MA Experiment ID: 20000535 Result: Up-regulated in Transcription
  misc_feature: MA Experiment 20000535 PARAMETER Experiment Name: Zm_Hybrid_Seed_Dev_P Parameter: DAP Value: 30 vs. 12
  misc_feature: MA Experiment 20000535 PARAMETER Experiment Name: Zm_Hybrid_Seed_Dev_P Parameter: Organism Value: Zea mays
  misc_feature: MA Experiment 20000535 PARAMETER Experiment Name: Zm_Hybrid_Seed_Dev_P Parameter: Plant Line Value: 35A19
  misc_feature: MA Experiment 20000535 PARAMETER Experiment Name: Zm_Hybrid_Seed_Dev_P Parameter: Tissue Value: Embryo vs. Unfert Floret
  misc_feature: MA Experiment ID: 20000632 Result: Down-regulated in Transcription
  misc_feature: MA Experiment 20000632 PARAMETER Experiment Name: Zm_Herbicide-Treatments_P Parameter: Timepoint (hr) Value: 4
  misc_feature: MA Experiment 20000632 PARAMETER Experiment Name: Zm_Herbicide-Treatments_P Parameter: Tissue Value: Aerial
  misc_feature: MA Experiment 20000632 PARAMETER Experiment Name: Zm_Herbicide-Treatments_P Parameter: Treatment Value: Glean vs. No Treatment
caagggatttgatggtgttgaagatgttattgcagatacgaaggcacacaaggtggtcgttaaggggaaaaaggcagctgctgacccaatgaaggtggtggaacgggtgcagaagaagacaggccgcaaggtagagcttctctcaccaatgccaccaccgaaagaagagaagaaggaagaggagaaaaaggaagaacctgagccaccaaaaaccgagaagaaagaggaggcaacggtgctcgctgtggtgctcaaggtgcatatgcattgtgaggcttgcacacaagtgatcaagaagagaatcctcaagatgaaaggcgtgcaatctgtagaggcagacctcaaggcttctcaagtcactgtgaagggtgtgttcgaggaggccaagctgtctgattatgtgtataggcgcactggtaagcacgctgctatcgtcaagtctgagccggttgc

SEQ ID NO: 13742 - protein, 150 aa, Zea mays subsp. mays
  peptide (1)..(150): Ceres Seq. ID no. 11030670
  misc_feature (1)..(149): Homolog of NCBI NO: 38344582 NR Description: OSJNBa0053B21.14 [Oryza sativa (japonica
  misc_feature (1)..(149): Homolog of NCBI NO: 9758294 NR Description: contains similarity to ATFP3~gene_id:MLE2.16
  misc_feature (1)..(149): Homolog of NCBI NO: 18424719 NR Description: copper chaperone (CCH)-related; protein id: supported by cDNA: gi_13430829, supported by cDNA: gi_15810596 thaliana] >gi|13430830|gb|AAK26037.1|AF360327_1 unknown protein
  misc_feature (1)..(149): Homolog of NCBI NO: 4097547 NR Description: ATFP3 [Arabidopsis thaliana]
  misc_feature (3)..(146): Homolog of NCBI NO: 37532382 NR Description: putative ATFP3 [Oryza sativa (japonica
  misc_feature (1)..(107): Homolog of NCBI NO: 15241256 NR Description: copper chaperone (CCH)-related; protein id: [Arabidopsis thaliana] >gi|8777397|dbj|BAA96987.1| contains
  misc_feature (4)..(149): Homolog of NCBI NO: 34394290 NR Description: putative heavy-metal-associated domain-containing
  misc_feature (1)..(145): Homolog of NCBI NO: 15233023 NR Description: hypothetical protein; protein id: At3g02960.1 thaliana] >gi|6728965|gb|AAF26963.1|AC018363_8 hypothetical
  misc_feature (5)..(149): Homolog of NCBI NO: 21594005 NR Description: unknown [Arabidopsis thaliana]
  misc_feature (5)..(145): Homolog of NCBI NO: 18420811 NR Description: expressed protein; protein id: At5g24580.1, by cDNA: 6393., supported by cDNA: gi_18175600 [Arabidopsis >gi|10177858|dbj|BAB11210.1| gene_id:K18P6.11~unknown protein
KGFDGVEDVIADTKAHKVVVKGKKAAADPMKVVERVQKKTGRKVELLSPMPPPKEEKKEEEKKEEPEPPKTEKKEEATVLAVVLKVHMHCEACTQVIKKRILKMKGVQSVEADLKASQVTVKGVFEEAKLSDYVYRRTGKHAAIVKSEPV

SEQ ID NO: 13743 - protein, 121 aa, Zea mays subsp. mays
  peptide (1)..(121): Ceres Seq. ID no. 11030671
  misc_feature (1)..(120): Homolog of NCBI NO: 38344582 NR Description: OSJNBa0053B21.14 [Oryza sativa (japonica
  misc_feature (1)..(120): Homolog of NCBI NO: 9758294 NR Description: contains similarity to ATFP3~gene_id:MLE2.16
  misc_feature (1)..(120): Homolog of NCBI NO: 18424719 NR Description: copper chaperone (CCH)-related; protein id: supported by cDNA: gi_13430829, supported by cDNA: gi_15810596 thaliana] >gi|13430830|gb|AAK26037.1|AF360327_1 unknown protein
  misc_feature (1)..(120): Homolog of NCBI NO: 4097547 NR Description: ATFP3 [Arabidopsis thaliana]
  misc_feature (1)..(117): Homolog of NCBI NO: 37532382 NR Description: putative ATFP3 [Oryza sativa (japonica
  misc_feature (1)..(78): Homolog of NCBI NO: 15241256 NR Description: copper chaperone (CCH)-related; protein id: [Arabidopsis thaliana] >gi|8777397|dbj|BAA96987.1| contains
  misc_feature (1)..(120): Homolog of NCBI NO: 34394290 NR Description: putative heavy-metal-associated domain-containing
  misc_feature (1)..(116): Homolog of NCBI NO: 15233023 NR Description: hypothetical protein; protein id: At3g02960.1 thaliana] >gi|6728965|gb|AAF26963.1|AC018363_8 hypothetical
  misc_feature (1)..(120): Homolog of NCBI NO: 21594005 NR Description: unknown [Arabidopsis thaliana]
  misc_feature (1)..(116): Homolog of NCBI NO: 18420811 NR Description: expressed protein; protein id: At5g24580.1, by cDNA: 6393., supported by cDNA: gi_18175600 [Arabidopsis >gi|10177858|dbj|BAB11210.1| gene_id:K18P6.11~unknown protein
MKVVERVQKKTGRKVELLSPMPPPKEEKKEEEKKEEPEPPKTEKKEEATVLAVVLKVHMHCEACTQVIKKRILKMKGVQSVEADLKASQVTVKGVFEEAKLSDYVYRRTGKHAAIVKSEPV

SEQ ID NO: 13744 - protein, 101 aa, Zea mays subsp. mays
  peptide (1)..(101): Ceres Seq. ID no. 11030672
  misc_feature (1)..(100): Homolog of NCBI NO: 38344582 NR Description: OSJNBa0053B21.14 [Oryza sativa (japonica
  misc_feature (1)..(100): Homolog of NCBI NO: 9758294 NR Description: contains similarity to ATFP3~gene_id:MLE2.16
  misc_feature (1)..(100): Homolog of NCBI NO: 18424719 NR Description: copper chaperone (CCH)-related; protein id: supported by cDNA: gi_13430829, supported by cDNA: gi_15810596 thaliana] >gi|13430830|gb|AAK26037.1|AF360327_1 unknown protein
  misc_feature (1)..(100): Homolog of NCBI NO: 4097547 NR Description: ATFP3 [Arabidopsis thaliana]
  misc_feature (1)..(97): Homolog of NCBI NO: 37532382 NR Description: putative ATFP3 [Oryza sativa (japonica
  misc_feature (1)..(58): Homolog of NCBI NO: 15241256 NR Description: copper chaperone (CCH)-related; protein id: [Arabidopsis thaliana] >gi|8777397|dbj|BAA96987.1| contains
  misc_feature (1)..(100): Homolog of NCBI NO: 34394290 NR Description: putative heavy-metal-associated domain-containing
  misc_feature (1)..(96): Homolog of NCBI NO: 15233023 NR Description: hypothetical protein; protein id: At3g02960.1 thaliana] >gi|6728965|gb|AAF26963.1|AC018363_8 hypothetical
  misc_feature (1)..(100): Homolog of NCBI NO: 21594005 NR Description: unknown [Arabidopsis thaliana]
  misc_feature (1)..(96): Homolog of NCBI NO: 18420811 NR Description: expressed protein; protein id: At5g24580.1, by cDNA: 6393., supported by cDNA: gi_18175600 [Arabidopsis >gi|10177858|dbj|BAB11210.1| gene_id:K18P6.11~unknown protein
MPPPKEEKKEEEKKEEPEPPKTEKKEEATVLAVVLKVHMHCEACTQVIKKRILKMKGVQSVEADLKASQVTVKGVFEEAKLSDYVYRRTGKHAAIVKSEPV

SEQ ID NO: 13745 - DNA, 2270 bp, Zea mays subsp. mays
  misc_feature (1)..(2270): Ceres Seq. ID no. 12454959
  misc_feature: MA Experiment ID: 108504 Result: Down-regulated in Transcription
  misc_feature: MA Experiment 108504 PARAMETER Experiment Name: Zm_Drought_P Parameter: Age (day) Value: 8
  misc_feature: MA Experiment 108504 PARAMETER Experiment Name: Zm_Drought_P Parameter: Organism Value: Zea mays
  misc_feature: MA Experiment 108504 PARAMETER Experiment Name: Zm_Drought_P Parameter: Plant Line Value: 35A19
  misc_feature: MA Experiment 108504 PARAMETER Experiment Name: Zm_Drought_P Parameter: Timepoint (hr) Value: 12
  misc_feature: MA Experiment 108504 PARAMETER Experiment Name: Zm_Drought_P Parameter: Tissue Value: Aerial
  misc_feature: MA Experiment 108504 PARAMETER Experiment Name: Zm_Drought_P Parameter: Treatment Value: Drought vs. No Drought
  misc_feature: MA Experiment ID: 108515 Result: Down-regulated in Transcription
  misc_feature: MA Experiment 108515 PARAMETER Experiment Name: Zm_2mM_SA_P Parameter: Age (day) Value: 8
  misc_feature: MA Experiment 108515 PARAMETER Experiment Name: Zm_2mM_SA_P Parameter: Organism Value: Zea mays
  misc_feature: MA Experiment 108515 PARAMETER Experiment Name: Zm_2mM_SA_P Parameter: Plant Line Value: 35A19
  misc_feature: MA Experiment 108515 PARAMETER Experiment Name: Zm_2mM_SA_P Parameter: Timepoint (hr) Value: 12
  misc_feature: MA Experiment 108515 PARAMETER Experiment Name: Zm_2mM_SA_P Parameter: Tissue Value: Aerial
  misc_feature: MA Experiment 108515 PARAMETER Experiment Name: Zm_2mM_SA_P Parameter: Treatment Value: 2mM SA vs. No Treatment
  misc_feature: MA Experiment ID: 108523 Result: Down-regulated in Transcription
  misc_feature: MA Experiment 108523 PARAMETER Experiment Name: Zm_42deg_Heat_P Parameter: Age (day) Value: 8
  misc_feature: MA Experiment 108523 PARAMETER Experiment Name: Zm_42deg_Heat_P Parameter: Organism Value: Zea mays
  misc_feature: MA Experiment 108523 PARAMETER Experiment Name: Zm_42deg_Heat_P Parameter: Plant Line Value: 35A19
  misc_feature: MA Experiment 108523 PARAMETER Experiment Name: Zm_42deg_Heat_P Parameter: Temperature (deg C) Value: 42 vs. 22
  misc_feature: MA Experiment 108523 PARAMETER Experiment Name: Zm_42deg_Heat_P Parameter: Timepoint (hr) Value: 6
  misc_feature: MA Experiment 108523 PARAMETER Experiment Name: Zm_42deg_Heat_P Parameter: Tissue Value: Aerial
  misc_feature: MA Experiment ID: 108527 Result: Down-regulated in Transcription
  misc_feature: MA Experiment 108527 PARAMETER Experiment Name: Zm_5mM_NO_P Parameter: Age (day) Value: 8
  misc_feature: MA Experiment 108527 PARAMETER Experiment Name: Zm_5mM_NO_P Parameter: Organism Value: Zea mays
  misc_feature: MA Experiment 108527 PARAMETER Experiment Name: Zm_5mM_NO_P Parameter: Plant Line Value: 35A19
  misc_feature: MA Experiment 108527 PARAMETER Experiment Name: Zm_5mM_NO_P Parameter: Timepoint (hr) Value: 6
  misc_feature: MA Experiment 108527 PARAMETER Experiment Name: Zm_5mM_NO_P Parameter: Tissue Value: Aerial
  misc_feature: MA Experiment 108527 PARAMETER Experiment Name: Zm_5mM_NO_P Parameter: Treatment Value: 5mM NO vs. No Treatment
  misc_feature: MA Experiment ID: 108528 Result: Up-regulated in Transcription
  misc_feature: MA Experiment 108528 PARAMETER Experiment Name: Zm_Imbibed_Seeds_P Parameter: Age (day) Value: 5 vs. 2
  misc_feature: MA Experiment 108528 PARAMETER Experiment Name: Zm_Imbibed_Seeds_P Parameter: Organism Value: Zea mays
  misc_feature: MA Experiment 108528 PARAMETER Experiment Name: Zm_Imbibed_Seeds_P Parameter: Plant Line Value: 35A19
  misc_feature: MA Experiment 108528 PARAMETER Experiment Name: Zm_Imbibed_Seeds_P Parameter: Tissue Value: Aerial vs. Embryo
  misc_feature: MA Experiment ID: 108529 Result: Up-regulated in Transcription
  misc_feature: MA Experiment 108529 PARAMETER Experiment Name: Zm_Imbibed_Seeds_P Parameter: Age (day) Value: 5 vs. 2
  misc_feature: MA Experiment 108529 PARAMETER Experiment Name: Zm_Imbibed_Seeds_P Parameter: Organism Value: Zea mays
  misc_feature: MA Experiment 108529 PARAMETER Experiment Name: Zm_Imbibed_Seeds_P Parameter: Plant Line Value: 35A19
  misc_feature: MA Experiment 108529 PARAMETER Experiment Name: Zm_Imbibed_Seeds_P Parameter: Tissue Value: Roots vs. Embryo
  misc_feature: MA Experiment ID: 108530 Result: Up-regulated in Transcription
  misc_feature: MA Experiment 108530 PARAMETER Experiment Name: Zm_Imbibed_Seeds_P Parameter: Age (day) Value: 6 vs. 2
  misc_feature: MA Experiment 108530 PARAMETER Experiment Name: Zm_Imbibed_Seeds_P Parameter: Organism Value: Zea mays
  misc_feature: MA Experiment 108530 PARAMETER Experiment Name: Zm_Imbibed_Seeds_P Parameter: Plant Line Value: 35A19
  misc_feature: MA Experiment 108530 PARAMETER Experiment Name: Zm_Imbibed_Seeds_P Parameter: Tissue Value: Aerial vs. Embryo
  misc_feature: MA Experiment ID: 108535 Result: Down-regulated in Transcription
  misc_feature: MA Experiment 108535 PARAMETER Experiment Name: Zm_Meristem_P Parameter: Age (day) Value: 8
  misc_feature: MA Experiment 108535 PARAMETER Experiment Name: Zm_Meristem_P Parameter: Organism Value: Zea mays
  misc_feature: MA Experiment 108535 PARAMETER Experiment Name: Zm_Meristem_P Parameter: Plant Line Value: 35A19
  misc_feature: MA Experiment 108535 PARAMETER Experiment Name: Zm_Meristem_P Parameter: Tissue Value: Root Meristem vs. Above Root Meristem
  misc_feature: MA Experiment ID: 108536 Result: Down-regulated in Transcription
  misc_feature: MA Experiment 108536 PARAMETER Experiment Name: Zm_Meristem_P Parameter: Age (day) Value: 8
  misc_feature: MA Experiment 108536 PARAMETER Experiment Name: Zm_Meristem_P Parameter: Organism Value: Zea mays
  misc_feature: MA Experiment 108536 PARAMETER Experiment Name: Zm_Meristem_P Parameter: Plant Line Value: 35A19
  misc_feature: MA Experiment 108536 PARAMETER Experiment Name: Zm_Meristem_P Parameter: Tissue Value: Shoot Meristem vs. Above Shoot Meristem
  misc_feature: MA Experiment ID: 108543 Result: Up-regulated in Transcription
  misc_feature: MA Experiment ID: 108545 Result: Up-regulated in Transcription
  misc_feature: MA Experiment 108545 PARAMETER Experiment Name: Zm_Imbibed_Seeds_P Parameter: Age (day) Value: 3 vs. 2
  misc_feature: MA Experiment 108545 PARAMETER Experiment Name: Zm_Imbibed_Seeds_P Parameter: Organism Value: Zea mays
  misc_feature: MA Experiment 108545 PARAMETER Experiment Name: Zm_Imbibed_Seeds_P Parameter: Plant Line Value: 35A19
  misc_feature: MA Experiment 108545 PARAMETER Experiment Name: Zm_Imbibed_Seeds_P Parameter: Tissue Value: Aerial vs. Embryo
  misc_feature: MA Experiment ID: 108547 Result: Up-regulated in Transcription
  misc_feature: MA Experiment 108547 PARAMETER Experiment Name: Zm_Imbibed_Seeds_P Parameter: Age (day) Value: 4 vs. 2
  misc_feature: MA Experiment 108547 PARAMETER Experiment Name: Zm_Imbibed_Seeds_P Parameter: Organism Value: Zea mays
  misc_feature: MA Experiment 108547 PARAMETER Experiment Name: Zm_Imbibed_Seeds_P Parameter: Plant Line Value: 35A19
  misc_feature: MA Experiment 108547 PARAMETER Experiment Name: Zm_Imbibed_Seeds_P Parameter: Tissue Value: Aerial vs. Embryo
  misc_feature: MA Experiment ID: 108556 Result: Down-regulated in Transcription
  misc_feature: MA Experiment 108556 PARAMETER Experiment Name: Zm_Drought_P Parameter: Age (day) Value: 9
  misc_feature: MA Experiment 108556 PARAMETER Experiment Name: Zm_Drought_P Parameter: Organism Value: Zea mays
  misc_feature: MA Experiment 108556 PARAMETER Experiment Name: Zm_Drought_P Parameter: Plant Line Value: 35A19
  misc_feature: MA Experiment 108556 PARAMETER Experiment Name: Zm_Drought_P Parameter: Timepoint (hr) Value: 24
  misc_feature: MA Experiment 108556 PARAMETER Experiment Name: Zm_Drought_P Parameter: Tissue Value: Aerial
  misc_feature: MA Experiment 108556 PARAMETER Experiment Name: Zm_Drought_P Parameter: Treatment Value: Drought vs. No Drought
  misc_feature: MA Experiment ID: 108597 Result: Down-regulated in Transcription
  misc_feature: MA Experiment 108597 PARAMETER Experiment Name: Zm_100uM_ABA_P Parameter: Age (day) Value: 9
  misc_feature: MA Experiment 108597 PARAMETER Experiment Name: Zm_100uM_ABA_P Parameter: Organism Value: Zea mays
  misc_feature: MA Experiment 108597 PARAMETER Experiment Name: Zm_100uM_ABA_P Parameter: Plant Line Value: 35A19
  misc_feature: MA Experiment 108597 PARAMETER Experiment Name: Zm_100uM_ABA_P Parameter: Timepoint (hr) Value: 24
  misc_feature: MA Experiment 108597 PARAMETER Experiment Name: Zm_100uM_ABA_P Parameter: Tissue Value: Aerial
  misc_feature: MA Experiment 108597 PARAMETER Experiment Name: Zm_100uM_ABA_P Parameter: Treatment Value: 100uM ABA vs. No Treatment
  misc_feature: MA Experiment ID: 108687 Result: Down-regulated in Transcription
  misc_feature: MA Experiment 108687 PARAMETER Experiment Name: Zm_Embryos-Flowers__P Parameter: Tissue Value: Embryo vs. Aerial+
  misc_feature: MA Experiment ID: 20000478 Result: Down-regulated in Transcription
  misc_feature: MA Experiment 20000478 PARAMETER Experiment Name: Zm_5mM_SA_P Parameter: Age (day) Value: 11
  misc_feature: MA Experiment 20000478 PARAMETER Experiment Name: Zm_5mM_SA_P Parameter: Organism Value: Zea mays
  misc_feature: MA Experiment 20000478 PARAMETER Experiment Name: Zm_5mM_SA_P Parameter: Plant Line Value: 35A19
  misc_feature: MA Experiment 20000478 PARAMETER Experiment Name: Zm_5mM_SA_P Parameter: Timepoint (hr) Value: 72
  misc_feature: MA Experiment 20000478 PARAMETER Experiment Name: Zm_5mM_SA_P Parameter: Tissue Value: Aerial
  misc_feature: MA Experiment 20000478 PARAMETER Experiment Name: Zm_5mM_SA_P Parameter: Treatment Value: 5mM SA vs. No Treatment
  misc_feature: MA Experiment ID: 20000480 Result: Down-regulated in Transcription
  misc_feature: MA Experiment 20000480 PARAMETER Experiment Name: Zm_Drought_P Parameter: Age (day) Value: 11
  misc_feature: MA Experiment 20000480 PARAMETER Experiment Name: Zm_Drought_P Parameter: Organism Value: Zea mays
  misc_feature: MA Experiment 20000480 PARAMETER Experiment Name: Zm_Drought_P Parameter: Plant Line Value: 35A19
  misc_feature: MA Experiment 20000480 PARAMETER Experiment Name: Zm_Drought_P Parameter: Timepoint (hr) Value: 72
  misc_feature: MA Experiment 20000480 PARAMETER Experiment Name: Zm_Drought_P Parameter: Tissue Value: Aerial
  misc_feature: MA Experiment 20000480 PARAMETER Experiment Name: Zm_Drought_P Parameter: Treatment Value: Drought vs. No Drought
  misc_feature: MA Experiment ID: 20000535 Result: Down-regulated in Transcription
  misc_feature: MA Experiment 20000535 PARAMETER Experiment Name: Zm_Hybrid_Seed_Dev_P Parameter: DAP Value: 30 vs. 12
  misc_feature: MA Experiment 20000535 PARAMETER Experiment Name: Zm_Hybrid_Seed_Dev_P Parameter: Organism Value: Zea mays
  misc_feature: MA Experiment 20000535 PARAMETER Experiment Name: Zm_Hybrid_Seed_Dev_P Parameter: Plant Line Value: 35A19
  misc_feature: MA Experiment 20000535 PARAMETER Experiment Name: Zm_Hybrid_Seed_Dev_P Parameter: Tissue Value: Embryo vs. Unfert Floret
ccatcgccagggcgtcggatcggagcgagctcattctcaactcgactcaagagctctgcctcctccatctccccttctctggcctccggagccacgctgagagatggaggcgaatcccaagaacaccttcacgatcaaagtggaggacgggaagcccgggaaggacggccggctggcggtcggaccggtgttccggagcgttctggccaaggatgggttcccgcagcttgagcctgacatgaagacatcatgggacgtgttcagggtagcagcagtcaagtatgccgacaaccggatgctcggatggcgtccgttcaaagatggagtgccagggccctacttgtggaaatcatacaaggagatctacgacgaggtgctgcaagcaggctctgcgttgcagaagctgggagtgcagccaggttcccgggtggggatctacggagcgaactgtcctcagtggatagtggcaatgcaggcttgcaatggctatagtctagtctgtgtcccactgtacgatactttaggtgcgggagctgtcgactacatcatcgatcatgccgagatcgatgttgtcttcatacaggacaagaaaataaaagagatactgtccccaaactgcaagtctgccaagagactgaaagcattggtggcgttcacttcggcgacaactgaacagaacaaagaagcggatcaaattgggatcaaaatgtatgcctgggacgatttcttgaaagtggggaaggataatcctcgtcaaccttgccctccgcaagcaagtgacatctgcactgtcatgtacacgagtgggacaagcggacagcccaaaggtgtgatgctgacccatgaaagccacgccatgtatgtgaaaggggtggacctcttcatggaccagtttgatgataagatgacaacagatgatgtcttcctgtcgtttctcccgcttgctcacatccttgaccgcatgatcgaagagtatttctttcacaaaggggcctcaattggctactaccacggagatctgaatgccttgagggacgacattgtggagctgaagccgactttactggttggggtgccccgagtgtacgaaaggatttatgaaggtatcttgaaggccattgcggaactcagacctctaagaagggtcatctttaatgctttgtacaaccgcaaactggcaagcatgaaagcaggctactcgcacaaaaccgcttcacctttcgcggacatgctggtttttcgcaaggtcaaggcaaggcttggaggtcgtcttcgcttactgatttcaggaggggctccgttgagtaatgagatcgaggagttcatgagagtgaccacctgtgcatacttcatccaaggctatggtttaacagaaacactgggacctagcactgtctgctacatcgacgacatggccctggtcggaagcgctggtgtgcctgccacctacaccgaaattcggctggaagaagtgcccgagatgggctatgatccactcggcgtcccttcgcgtggtgaaatctgcatccgggggaaatccctcttcgctgggtactacaaaagtccagaactcacaaacgaagccatcgttgatgggtggtttcatacaggtgacattggagagatgaccccagacgggatcttgaaggtttgacagaaaaaagaacatatttaagctgtcacaaggggagtatgttgcggttgagtacctggagaaagtatatggcttccctccactcgttgaagatatctgggtatacggggacagtttcagatcaagtttagttgcagtagtcaatccacaccaagaaaacacaatgaagtgggcagagtccaatggctacaagggttcttttgatgaaatctgcaaacttgaaggactcaaagagtacatcctgaaagagctggcagccgttgcgcagaagaacaagctacgaggcttcgagtacatcaaaggcgtagtgttggatcctgtgccttttgacatcgagagggatttggtgactgcaacaatgaagaagaagagaaagaatatgctgaactattaccagtctgagattgacacaatatacaaaaagctggaggcgcagaagagtgctgccagagctaagtgaagagatgtgccctattcgaccatcagctgaaaacaagggaaacgacaccgttgtaaatttcacattaatattgcgaagtaacaactcagggctatgagtaaggaataaaatgtatattgtgcctttgtctatagtatcggatgattcccaaatctc

SEQ ID NO: 13746 - protein, 516 aa, Zea mays subsp. mays
  peptide (1)..(516): Ceres Seq. ID no. 12454960
  misc_feature (8)..(516): Homolog of NCBI NO: 15226536 NR Description: putative acyl-CoA synthetase; protein id: supported by cDNA: gi_15912204, supported by cDNA: gi_20805862
  misc_feature (9)..(516): Homolog of NCBI NO: 15236634 NR Description: acyl-CoA synthetase - like protein; protein id: supported by cDNA: gi_15146195, supported by cDNA: gi_20805868
  misc_feature (9)..(516): Homolog of NCBI NO: 7437845 NR Description: probable long-chain-fatty-acid-CoA ligase (EC
  misc_feature (9)..(516): Homolog of NCBI NO: 15217631 NR Description: acyl-CoA synthetase, putative; protein id: supported by cDNA: gi_14532621, supported by cDNA: gi_19310628,
  misc_feature (9)..(516): Homolog of NCBI NO: 15237023 NR Description: putative acyl-CoA synthetase; protein id: supported by cDNA: gi_20805870 [Arabidopsis thaliana]
  misc_feature (9)..(516): Homolog of NCBI NO: 20805871 NR Description: long chain acyl-CoA synthetase 5 [Arabidopsis
  misc_feature (13)..(516): Homolog of NCBI NO: 22330132 NR Description: acyl CoA synthetase, putative; protein id: supported by cDNA: gi_17529275, supported by cDNA: gi_20453101, by cDNA: gi_20805864 [Arabidopsis thaliana]
  misc_feature (13)..(516): Homolog of NCBI NO: 7437844 NR Description: probable long-chain-fatty-acid-CoA ligase (EC
  misc_feature (254)..(516): Homolog of NCBI NO: 7437841 NR Description: probable long-chain-fatty-acid-CoA ligase (EC
  misc_feature (9)..(149): Homolog of NCBI NO: 7437841 NR Description: probable long-chain-fatty-acid-CoA ligase (EC
MEANPKNTFTIKVEDGKPGKDGRLAVGPVFRSVLAKDGFPQLEPDMKTSWDVFRVAAVKYADNRMLGWRPFKDGVPGPYLWKSYKEIYDEVLQAGSALQKLGVQPGSRVGIYGANCPQWIVAMQACNGYSLVCVPLYDTLGAGAVDYIIDHAEIDVVFIQDKKIKEILSPNCKSAKRLKALVAFTSATTEQNKEADQIGIKMYAWDDFLKVGKDNPRQPCPPQASDICTVMYTSGTSGQPKGVMLTHESHAMYVKGVDLFMDQFDDKMTTDDVFLSFLPLAHILDRMIEEYFFHKGASIGYYHGDLNALRDDIVELKPTLLVGVPRVYERIYEGILKAIAELRPLRRVIFNALYNRKLASMKAGYSHKTASPFADMLVFRKVKARLGGRLRLLISGGAPLSNEIEEFMRVTTCAYFIQGYGLTETLGPSTVCYIDDMALVGSAGVPATYTEIRLEEVPEMGYDPLGVPSRGEICIRGKSLFAGYYKSPELTNEAIVDGWFHTGDIGEMTPDGILKV

SEQ ID NO: 13747 - protein, 471 aa, Zea mays subsp. mays
  peptide (1)..(471): Ceres Seq. ID no. 12454961
  misc_feature (1)..(471): Homolog of NCBI NO: 15226536 NR Description: putative acyl-CoA synthetase; protein id: supported by cDNA: gi_15912204, supported by cDNA: gi_20805862
  misc_feature (1)..(471): Homolog of NCBI NO: 15236634 NR Description: acyl-CoA synthetase - like protein; protein id: supported by cDNA: gi_15146195, supported by cDNA: gi_20805868
  misc_feature (1)..(471): Homolog of NCBI NO: 7437845 NR Description: probable long-chain-fatty-acid-CoA ligase (EC
  misc_feature (1)..(471): Homolog of NCBI NO: 15217631 NR Description: acyl-CoA synthetase, putative; protein id: supported by cDNA: gi_14532621, supported by cDNA: gi_19310628,
  misc_feature (1)..(471): Homolog of NCBI NO: 15237023 NR Description: putative acyl-CoA synthetase; protein id: supported by cDNA: gi_20805870 [Arabidopsis thaliana]
  misc_feature (1)..(471): Homolog of NCBI NO: 20805871 NR Description: long chain acyl-CoA synthetase 5 [Arabidopsis
  misc_feature (1)..(471): Homolog of NCBI NO: 22330132 NR Description: acyl CoA synthetase, putative; protein id: supported by cDNA: gi_17529275, supported by cDNA: gi_20453101, by cDNA: gi_20805864 [Arabidopsis thaliana]
  misc_feature (1)..(471): Homolog of NCBI NO: 7437844 NR Description: probable long-chain-fatty-acid-CoA ligase (EC
  misc_feature (209)..(471): Homolog of NCBI NO: 7437841 NR Description: probable long-chain-fatty-acid-CoA ligase (EC
  misc_feature (1)..(104): Homolog of NCBI NO: 7437841 NR Description: probable long-chain-fatty-acid-CoA ligase (EC
MKTSWDVFRVAAVKYADNRMLGWRPFKDGVPGPYLWKSYKEIYDEVLQAGSALQKLGVQPGSRVGIYGANCPQWIVAMQACNGYSLVCVPLYDTLGAGAVDYIIDHAEIDVVFIQDKKIKEILSPNCKSAKRLKALVAFTSATTEQNKEADQIGIKMYAWDDFLKVGKDNPRQPCPPQASDICTVMYTSGTSGQPKGVMLTHESHAMYVKGVDLFMDQFDDKMTTDDVFLSFLPLAHILDRMIEEYFFHKGASIGYYHGDLNALRDDIVELKPTLLVGVPRVYERIYEGILKAIAELRPLRRVIFNALYNRKLASMKAGYSHKTASPFADMLVFRKVKARLGGRLRLLISGGAPLSNEIEEFMRVTTCAYFIQGYGLTETLGPSTVCYIDDMALVGSAGVPATYTEIRLEEVPEMGYDPLGVPSRGEICIRGKSLFAGYYKSPELTNEAIVDGWFHTGDIGEMTPDGILKV

SEQ ID NO: 13748 - protein, 452 aa, Zea mays subsp. mays
  peptide (1)..(452): Ceres Seq. ID no. 12454962
  misc_feature (1)..(452): Homolog of NCBI NO: 15226536 NR Description: putative acyl-CoA synthetase; protein id: supported by cDNA: gi_15912204, supported by cDNA: gi_20805862
  misc_feature (1)..(452): Homolog of NCBI NO: 15236634 NR Description: acyl-CoA synthetase - like protein; protein id: supported by cDNA: gi_15146195, supported by cDNA: gi_20805868
  misc_feature (1)..(452): Homolog of NCBI NO: 7437845 NR Description: probable long-chain-fatty-acid-CoA ligase (EC
  misc_feature (1)..(452): Homolog of NCBI NO: 15217631 NR Description: acyl-CoA synthetase, putative; protein id: supported by cDNA: gi_14532621, supported by cDNA: gi_19310628,
  misc_feature (1)..(452): Homolog of NCBI NO: 15237023 NR Description: putative acyl-CoA synthetase; protein id: supported by cDNA: gi_20805870 [Arabidopsis thaliana]
  misc_feature (1)..(452): Homolog of NCBI NO: 20805871 NR Description: long chain acyl-CoA synthetase 5 [Arabidopsis
  misc_feature (1)..(452): Homolog of NCBI NO: 22330132 NR Description: acyl CoA synthetase, putative; protein id: supported by cDNA: gi_17529275, supported by cDNA: gi_20453101, by cDNA: gi_20805864 [Arabidopsis thaliana]
  misc_feature (1)..(452): Homolog of NCBI NO: 7437844 NR Description: probable long-chain-fatty-acid-CoA ligase (EC
  misc_feature (190)..(452): Homolog of NCBI NO: 7437841 NR Description: probable long-chain-fatty-acid-CoA ligase (EC
  misc_feature (1)..(85): Homolog of NCBI NO: 7437841 NR Description: probable long-chain-fatty-acid-CoA ligase (EC
MLGWRPFKDGVPGPYLWKSYKEIYDEVLQAGSALQKLGVQPGSRVGIYGANCPQWIVAMQACNGYSLVCVPLYDTLGAGAVDYIIDHAEIDVVFIQDKKIKEILSPNCKSAKRLKALVAFTSATTEQNKEADQIGIKMYAWDDFLKVGKDNPRQPCPPQASDICTVMYTSGTSGQPKGVMLTHESHAMYVKGVDLFMDQFDDKMTTDDVFLSFLPLAHILDRMIEEYFFHKGASIGYYHGDLNALRDDIVELKPTLLVGVPRVYERIYEGILKAIAELRPLRRVIFNALYNRKLASMKAGYSHKTASPFADMLVFRKVKARLGGRLRLLISGGAPLSNEIEEFMRVTTCAYFIQGYGLTETLGPSTVCYIDDMALVGSAGVPATYTEIRLEEVPEMGYDPLGVPSRGEICIRGKSLFAGYYKSPELTNEAIVDGWFHTGDIGEMTPDGILKV

SEQ ID NO: 13749 - DNA, 1698 bp, Zea mays subsp. mays
  misc_feature (1)..(1698): Ceres Seq. ID no. 13494587
  misc_feature: MA Experiment ID: 108556 Result: Up-regulated in Transcription
  misc_feature: MA Experiment 108556 PARAMETER Experiment Name: Zm_Drought_P Parameter: Age (day) Value: 9
  misc_feature: MA Experiment 108556 PARAMETER Experiment Name: Zm_Drought_P Parameter: Organism Value: Zea mays
  misc_feature: MA Experiment 108556 PARAMETER Experiment Name: Zm_Drought_P Parameter: Plant Line Value: 35A19
  misc_feature: MA Experiment 108556 PARAMETER Experiment Name: Zm_Drought_P Parameter: Timepoint (hr) Value: 24
  misc_feature: MA Experiment 108556 PARAMETER Experiment Name: Zm_Drought_P Parameter: Tissue Value: Aerial
  misc_feature: MA Experiment 108556 PARAMETER Experiment Name: Zm_Drought_P Parameter: Treatment Value: Drought vs. No Drought
  misc_feature: MA Experiment ID: 20001606 Result: Down-regulated in Transcription
  misc_feature: MA Experiment 20001606 PARAMETER Experiment Name: Zm_50ppm_KNO3_L-to-H_P Parameter: Age (day) Value: 19
  misc_feature: MA Experiment 20001606 PARAMETER Experiment Name: Zm_50ppm_KNO3_L-to-H_P Parameter: Organism Value: Zea mays
  misc_feature: MA Experiment 20001606 PARAMETER Experiment Name: Zm_50ppm_KNO3_L-to-H_P Parameter: Plant Line Value: 35A19
  misc_feature: MA Experiment 20001606 PARAMETER Experiment Name: Zm_50ppm_KNO3_L-to-H_P Parameter: Timepoint (hr) Value: 8
  misc_feature: MA Experiment 20001606 PARAMETER Experiment Name: Zm_50ppm_KNO3_L-to-H_P Parameter: Tissue Value: Shoots
  misc_feature: MA Experiment 20001606 PARAMETER Experiment Name: Zm_50ppm_KNO3_L-to-H_P Parameter: Treatment Value: 50ppm KNO3 vs. 50ppm KCl
cctttttccccttcacagccccgtactactatccccgctaccgctagccgccgcgctgctcatctggtggcggctcgcctccctccccccatccgccgccgccggctcctcctctagctccctccttaccccgagctttaagctcgtgctacctgcctacctatccgtagggagagagagagagaggggagaaggttcggtcggtcggtcgggggctctcggatctcgccgctgcctccccgtttcttcgttgggatctcgctcgcttcgcgcccatggccgccgtcgcgacgccaccggcccccgcgcccgccgctccggcaccggcaccggcaccggctgctgctccggctcccgtcaccgtcgcccctgccgcggaccaaaccacggatctgctgcagaagttgtcgctggattcgcagcccaaggcggcgggtgcgacagagcctgctgctgctgccgctgccgccaaggagggtgctgtgacaaaccagccgctgagtgtggccatcccgccagagcggtctatcacgccggtgcttcaggactttatggatcccaacctgttctatctaccagcgtattactatggaggctacgacagttccatgagcgagtgggatgattatccaagatatctaaattcagatggagtggagattgccccagcagtgtatggagatatttatggatatgggtatgctccttacggggcatactctccggccacttccccagttccaacggttgatggtcagatgtttggcgcacagcattaccagtatccaaccacgtattttcagcctcctacaccaattccttctaccactcaaagcaacctccagtcttccaacaatcctgaaaagccagcagctaaagcagatcctgccaaggcaaccgctaatggtgttccaaatggtactggtcacactcacagttacagtggaactgtaccaagccaacaaagttcagcactgacgcctgatggaacttatagggcgcccttgctaggtggagttccttctgctggttacctagacacgacatattatgggtatgacagcacaggggcacaatttgcatggtatgatggctctgcttatgcaaatggacagcaaagaacaaccacaactaatcgttttccatcctcgtcattcagtggtaatggttcatctgcaatatatcagaacaagagctccaccacgcagcagatgggtatgcagaatagaagacctacaactacatcagcagctcctacctatcccaataggatgtaccctagcccccgaccgtacaccccagtatgggaattcagtaaaaactggtcttccctacgggagtaacggttatgattccaggatatatggtcgatgtggtcttggtaatggtatggataacaggtacaggcccagggcatgtagtggatactatggttatggcaatgagagtcaggatggaacaattgagttaaacagaggtcctagatctggccggttcaagaaccagaaattgtacggtcatactgtcactattgctgtgaaagggcagtctctcccttctagtgaaagcaagaatgatagtgctgtgcctgatagagcaaagtacaatagagatgacttccctgttcagtacgatgctgcaaagttctttgtcattaaatcgtacagcgaggatgacatccacaagagcgtaaagtac

SEQ ID NO: 13750 - protein, 355 aa, Zea mays subsp. mays
  peptide (1)..(355): Ceres Seq. ID no. 13494588
  misc_feature (1)..(81): Pfam Name: Assemblin (Peptidase family S21) Pfam Description: Assemblin (Peptidase family S21)
  misc_feature (1)..(341): Homolog of NCBI NO: 22773231 NR Description: Putative RNA-binding protein [Oryza sativa
  misc_feature (34)..(340): Homolog of NCBI NO: 18087662 NR Description: putative RNA-binding protein [Oryza sativa]
  misc_feature (29)..(334): Homolog of NCBI NO: 30682679 NR Description: expressed protein [Arabidopsis thaliana] gb|AAD10646.1~gene_id:MRP15.12~strong similarity to unknown [Arabidopsis thaliana] >gi|21703124|gb|AAM74503.1|
  misc_feature (29)..(334): Homolog of NCBI NO: 25084169 NR Description: Unknown protein [Arabidopsis thaliana]
  misc_feature (29)..(334): Homolog of NCBI NO: 30682683 NR Description: expressed protein [Arabidopsis thaliana]
  misc_feature (82)..(336): Homolog of NCBI NO: 18405397 NR Description: expressed protein [Arabidopsis thaliana] At1g55500/T5A14_10 [Arabidopsis thaliana]
  misc_feature (29)..(204): Homolog of NCBI NO: 25372787 NR Description: Rubisco subunit binding-protein beta subunit - Arabidopsis thaliana >gi|4204265|gb|AAD10646.1| Hypothetical
  misc_feature (80)..(243): Homolog of NCBI NO: 34395023 NR Description: high-glucose-regulated protein 8-like [Oryza
  misc_feature (30)..(191): Homolog of NCBI NO: 30682433 NR Description: expressed protein [Arabidopsis thaliana]
  misc_feature (30)..(191): Homolog of NCBI NO: 30682438 NR Description: expressed protein [Arabidopsis thaliana]
MAAVATPPAPAPAAPAPAPAPAAAPAPVTVAPAADQTTDLLQKLSLDSQPKAAGATEPAAAAAAAKEGAVTNQPLSVAIPPERSITPVLQDFMDPNLFYLPAYYYGGYDSSMSEWDDYPRYLNSDGVEIAPAVYGDIYGYGYAPYGAYSPATSPVPTVDGQMFGAQHYQYPTTYFQPPTPIPSTTQSNLQSSNNPEKPAAKADPAKATANGVPNGTGHTHSYSGTVPSQQSSALTPDGTYRAPLLGGVPSAGYLDTTYYGYDSTGAQFAWYDGSAYANGQQRTTTTNRFPSSSFSGNGSSAIYQNKSSTTQQMGMQNRRPTTTSAAPTYPNRMYPSPRPYTPVWEFSKNWSSLRE

SEQ ID NO: 13751 - protein, 263 aa, Zea mays subsp. mays
  peptide (1)..(263): Ceres Seq. ID no. 13494589
  misc_feature (1)..(249): Homolog of NCBI NO: 22773231 NR Description: Putative RNA-binding protein [Oryza sativa
  misc_feature (1)..(248): Homolog of NCBI NO: 18087662 NR Description: putative RNA-binding protein [Oryza sativa]
  misc_feature (1)..(242): Homolog of NCBI NO: 30682679 NR Description: expressed protein [Arabidopsis thaliana] gb|AAD10646.1~gene_id:MRP15.12~strong similarity to unknown [Arabidopsis thaliana] >gi|21703124|gb|AAM74503.1|
  misc_feature (1)..(242): Homolog of NCBI NO: 25084169 NR Description: Unknown protein [Arabidopsis thaliana]
  misc_feature (1)..(242): Homolog of NCBI NO: 30682683 NR Description: expressed protein [Arabidopsis thaliana]
  misc_feature (1)..(244): Homolog of NCBI NO: 18405397 NR Description: expressed protein [Arabidopsis thaliana] At1g55500/T5A14_10 [Arabidopsis thaliana]
  misc_feature (1)..(112): Homolog of NCBI NO: 25372787 NR Description: Rubisco subunit binding-protein beta subunit - Arabidopsis thaliana >gi|4204265|gb|AAD10646.1| Hypothetical
  misc_feature (1)..(151): Homolog of NCBI NO: 34395023 NR Description: high-glucose-regulated protein 8-like [Oryza
  misc_feature (1)..(99): Homolog of NCBI NO: 30682433 NR Description: expressed protein [Arabidopsis thaliana]
  misc_feature (1)..(99): Homolog of NCBI NO: 30682438 NR Description: expressed protein [Arabidopsis thaliana]
MDPNLFYLPAYYYGGYDSSMSEWDDYPRYLNSDGVEIAPAVYGDIYGYGYAPYGAYSPATSPVPTVDGQMFGAQHYQYPTTYFQPPTPIPSTTQSNLQSSNNPEKPAAKADPAKATANGVPNGTGHTHSYSGTVPSQQSSALTPDGTYRAPLLGGVPSAGYLDTTYYGYDSTGAQFAWYDGSAYANGQQRTTTTNRFPSSSFSGNGSSAIYQNKSSTTQQMGMQNRRPTTTSAAPTYPNRMYPSPRPYTPVWEFSKNWSSLRE

SEQ ID NO: 13752 - protein, 244 aa, Zea mays subsp. mays
  peptide (1)..(244): Ceres Seq. ID no. 13494590
  misc_feature (1)..(223): Homolog of NCBI NO: 30682679 NR Description: expressed protein [Arabidopsis thaliana] gb|AAD10646.1~gene_id:MRP15.12~strong similarity to unknown [Arabidopsis thaliana] >gi|21703124|gb|AAM74503.1|
  misc_feature (1)..(223): Homolog of NCBI NO: 25084169 NR Description: Unknown protein [Arabidopsis thaliana]
  misc_feature (1)..(223): Homolog of NCBI NO: 30682683 NR Description: expressed protein [Arabidopsis thaliana]
  misc_feature (1)..(225): Homolog of NCBI NO: 18405397 NR Description: expressed protein [Arabidopsis thaliana] At1g55500/T5A14_10 [Arabidopsis thaliana]
  misc_feature (1)..(93): Homolog of NCBI NO: 25372787 NR Description: Rubisco subunit binding-protein beta subunit - Arabidopsis thaliana >gi|4204265|gb|AAD10646.1| Hypothetical
  misc_feature (1)..(132): Homolog of NCBI NO: 34395023 NR Description: high-glucose-regulated protein 8-like [Oryza
  misc_feature (1)..(80): Homolog of NCBI NO: 30682433 NR Description: expressed protein [Arabidopsis thaliana]
  misc_feature (1)..(80): Homolog of NCBI NO: 30682438 NR Description: expressed protein [Arabidopsis thaliana]
  misc_feature (1)..(230): Homolog of NCBI NO: 22773231 NR Description: Putative RNA-binding protein [Oryza sativa
  misc_feature (1)..(229): Homolog of NCBI NO: 18087662 NR Description: putative RNA-binding protein [Oryza sativa]
MSEWDDYPRYLNSDGVEIAPAVYGDIYGYGYAPYGAYSPATSPVPTVDGQMFGAQHYQYPTTYFQPPTPIPSTTQSNLQSSNNPEKPAAKADPAKATANGVPNGTGHTHSYSGTVPSQQSSALTPDGTYRAPLLGGVPSAGYLDTTYYGYDSTGAQFAWYDGSAYANGQQRTTTTNRFPSSSFSGNGSSAIYQNKSSTTQQMGMQNRRPTTTSAAPTYPNRMYPSPRPYTPVWEFSKNWSSLRE

SEQ ID NO: 13753 - DNA, 2052 bp, Zea mays subsp. mays
  misc_feature (1)..(2052): Ceres Seq. ID no. 12391582
  misc_feature: MA Experiment ID: 108535 Result: Up-regulated in Transcription
  misc_feature: MA Experiment 108535 PARAMETER Experiment Name: Zm_Meristem_P Parameter: Age (day) Value: 8
  misc_feature: MA Experiment 108535 PARAMETER Experiment Name: Zm_Meristem_P Parameter: Organism Value: Zea mays
  misc_feature: MA Experiment 108535 PARAMETER Experiment Name: Zm_Meristem_P Parameter: Plant Line Value: 35A19
  misc_feature: MA Experiment 108535 PARAMETER Experiment Name: Zm_Meristem_P Parameter: Tissue Value: Root Meristem vs. Above Root Meristem
  misc_feature: MA Experiment ID: 20000478 Result: Down-regulated in Transcription
  misc_feature: MA Experiment 20000478 PARAMETER Experiment Name: Zm_5mM_SA_P Parameter: Age (day) Value: 11
  misc_feature: MA Experiment 20000478 PARAMETER Experiment Name: Zm_5mM_SA_P Parameter: Organism Value: Zea mays
  misc_feature: MA Experiment 20000478 PARAMETER Experiment Name: Zm_5mM_SA_P Parameter: Plant Line Value: 35A19
  misc_feature: MA Experiment 20000478 PARAMETER Experiment Name: Zm_5mM_SA_P Parameter: Timepoint (hr) Value: 72
  misc_feature: MA Experiment 20000478 PARAMETER Experiment Name: Zm_5mM_SA_P Parameter: Tissue Value: Aerial
  misc_feature: MA Experiment 20000478 PARAMETER Experiment Name: Zm_5mM_SA_P Parameter: Treatment Value: 5mM SA vs. No Treatment
aaatgagctcgctctcctgctcctacaggctgcagttgcgctgtgcctgtgcttccagttccatcgctttcccctcctccccagtccccactcccagatgcgatttccctctccaccgccacagcgcctagcttagccagccagccggcggccatcgccgccgcaatggcgaccgcgtcggaggacgaggccgcctcggaccgctgcagcggcagctacagccccagcgccgacgtcagcgagtccgaaacctccagtgactgctccgcgcccaccacgcgccgcttcgcctcctcctcctcggcctccgccaccgtctcccgcctcgcgtcctcctcctcgtcgctccccaccccggcatcggccaccgccttctacctctccaagccaacccccgacctctccgagatcgacatgatgaaggagcgcttcgcgaagctcctgctcggcgaggacatgtcgggcagcgggaagggcgtctgcaccgcgctcgccatctccaatgccatcaccaacctctccgccaccgtgttcggcgagctgtggaggctggagccgctcgcgacggcgaggaaggcgatgtggacgcgggagatggagtggctgctctccgtcgctgactccatcgtcgagctcaccccctccatccaggagctccccgaaggcggcggccagttcgaggtcatggtcccgcgcccgcgcagcgacctctacatgaacctccccgcgctcaagaagctcgacgccatgctcctcgcgatgattgacgggttcaaggatacggagttctggtacgtggacagaggggttatggtcgaggatagcgggggtccgttcccgtcctcatcctcgtcgtcttgtggccggccgtcagtgcggcaggaggacaagtggtggttgccctgcccaagagtgccgcccaaggggctgtccgtggacgcgaggaggaagctgcagcaaagcagggattgtgcaaaccagatactcaaggcggccatggcgattaacagcgatgtgctcgccgagatggaaatccccgaagtgtacctggagacactgcccaagaacggtaaatcttgcttgggtgagataatttatcgatacataacagctgagcagttctcaccagaatgtctcctagattgcttggatctatcatctgagcaccacacacttgaagtggcaaacagaatagaaggtgccatccatgtttggaaactgaaaggccaaaaaaagtcgacgcctcaagccaaatcaaagatatcttggggtggaaaagtgaagggtcttgttggagataaggagaagaaccacactttgtctgaaagagctgatggtctattgcagagcttaaggttgagatatccaggcctgccacaaacttcccttgacatgaacaagatacagtataacaaggatgtcgggcagtccatacttgaaagctactcaagggttctggagagcttggcatttaacataattgcaagaattgatgatgtgatctatgttgatgacgctacaaacagatcagctgctgccgagtctgtttcgatcttcaatcgtggcacaggcgtgccagttcagaagagaatctctccaagcccattctctattcagaattcgccgtatggctctccgttcgcaacacccactttctgctcctccaccccagttacaggcagtcctggaagggtacagcccccattaaacaaaaatattctaggaactcaagaaatcaaggtcgaaaagctcttttctggtgatctagagaaggtctggacatatgcaggaaacttgagcgctaggaaagacgctggagatgctcctgagagagactgaagggcgatggaggaaggtagacatgtaccgacagccgacagatcctgtaattgctagtagctagatcttcctgtacagaagcagcatgagtttttttttgttctttttgtagcgagccgatcattgtgtgctctgcttacaatgaatggatgtcacctgatctgaacagagaaacttgtagtttcagctgtagtttttttgtctggattggtt

SEQ ID NO: 13754 - protein, 557 aa, Zea mays subsp. mays
  peptide (1)..(557): Ceres Seq. ID no. 12391583
  misc_feature (10)..(455): Pfam Name: Domain of unknown function (DUF315) Pfam Description: Domain of unknown function (DUF315)
  misc_feature (1)..(557): Homolog of NCBI NO: 15233845 NR Description: putative protein; protein id: At4g38430.1, by cDNA: gi_15810308, supported by cDNA: gi_15912194 [Arabidopsis >gi|18421309|ref|NP_568515.1| Expressed protein [Arabidopsis
  misc_feature (1)..(556): Homolog of NCBI NO: 15810309 NR Description: unknown protein [Arabidopsis thaliana]
  misc_feature (16)..(518): Homolog of NCBI NO: 15241663 NR Description: putative protein; protein id: At5g02010.1
  misc_feature (36)..(512): Homolog of NCBI NO: 15239292 NR Description: putative protein; protein id: At5g05940.1 thaliana] >gi|10177567|dbj|BAB10799.1|
  misc_feature (5)..(514): Homolog of NCBI NO: 34908302 NR Description: P0005H10.23 [Oryza sativa (japonica
  misc_feature (1)..(515): Homolog of NCBI NO: 15228166 NR Description: putative protein; protein id: At3g55660.1
  misc_feature (1)..(454): Homolog of NCBI NO: 37536670 NR Description: hypothetical protein [Oryza sativa (japonica group)] >gi|10140653|gb|AAG13489.1| hypothetical protein [Oryza
  misc_feature (1)..(449): Homolog of NCBI NO: 15236138 NR Description: putative protein; protein id: At4g00460.1
  misc_feature (81)..(454): Homolog of NCBI NO: 38345761 NR Description: OSJNBa0065O17.14 [Oryza sativa (japonica
  misc_feature (2)..(449): Homolog of NCBI NO: 15223455 NR Description: hypothetical protein; protein id: At1g01700.1
MATASEDEAASDRCSGSYSPSADVSESETSSDCSAPTTRRFASSSSASATVSRLASSSSSLPTPASATAFYLSKPTPDLSEIDMMKERFAKLLLGEDMSGSGKGVCTALAISNAITNLSATVFGELWRLEPLATARKAMWTREMEWLLSVADSIVELTPSIQELPEGGGQFEVMVPRPRSDLYMNLPALKKLDAMLLAMIDGFKDTEFWYVDRGVMVEDSGGPFPSSSSSSCGRPSVRQEDKWWLPCPRVPPKGLSVDARRKLQQSRDCANQILKAAMAINSDVLAEMEIPEVYLETLPKNGKSCLGEIIYRYITAEQFSPECLLDCLDLSSEHHTLEVANRIEGAIHVWKLKGQKKSTPQAKSKISWGGKVKGLVGDKEKNHTLSERADGLLQSLRLRYPGLPQTSLDMNKIQYNKDVGQSILESYSRVLESLAFNIIARIDDVIYVDDATNRSAAAESVSIFNRGTGVPVQKRISPSPFSIQNSPYGSPFATPTFCSSTPVTGSPGRVQPPLNKNILGTQEIKVEKLFSGDLEKVWTYAGNLSARKDAGDAPERD

SEQ ID NO: 13755 - protein, 474 aa, Zea mays subsp. mays
  peptide (1)..(474): Ceres Seq. ID no. 12391584
  misc_feature (1)..(372): Pfam Name: Domain of unknown function (DUF315) Pfam Description: Domain of unknown function (DUF315)
  misc_feature (1)..(474): Homolog of NCBI NO: 15233845 NR Description: putative protein; protein id: At4g38430.1, by cDNA: gi_15810308, supported by cDNA: gi_15912194 [Arabidopsis >gi|18421309|ref|NP_568515.1| Expressed protein [Arabidopsis
  misc_feature (1)..(473): Homolog of NCBI NO: 15810309 NR Description: unknown protein [Arabidopsis thaliana]
  misc_feature (1)..(435): Homolog of NCBI NO: 15241663 NR Description: putative protein; protein id: At5g02010.1
  misc_feature (1)..(429): Homolog of NCBI NO: 15239292 NR Description: putative protein; protein id: At5g05940.1 thaliana] >gi|10177567|dbj|BAB10799.1|
  misc_feature (1)..(431): Homolog of NCBI NO: 34908302 NR Description: P0005H10.23 [Oryza sativa (japonica
  misc_feature (1)..(432): Homolog of NCBI NO: 15228166 NR Description: putative protein; protein id: At3g55660.1
  misc_feature (1)..(371): Homolog of NCBI NO: 37536670 NR Description: hypothetical protein [Oryza sativa (japonica group)] >gi|10140653|gb|AAG13489.1| hypothetical protein [Oryza
  misc_feature (1)..(366): Homolog of NCBI NO: 15236138 NR Description: putative protein; protein id: At4g00460.1
  misc_feature (1)..(371): Homolog of NCBI NO: 38345761 NR Description: OSJNBa0065O17.14 [Oryza sativa (japonica
  misc_feature (1)..(366): Homolog of NCBI NO: 15223455 NR Description: hypothetical protein; protein id: At1g01700.1
MMKERFAKLLLGEDMSGSGKGVCTALAISNAITNLSATVFGELWRLEPLATARKAMWTREMEWLLSVADSIVELTPSIQELPEGGGQFEVMVPRPRSDLYMNLPALKKLDAMLLAMIDGFKDTEFWYVDRGVMVEDSGGPFPSSSSSSCGRPSVRQEDKWWLPCPRVPPKGLSVDARRKLQQSRDCANQILKAAMAINSDVLAEMEIPEVYLETLPKNGKSCLGEIIYRYITAEQFSPECLLDCLDLSSEHHTLEVANRIEGAIHVWKLKGQKKSTPQAKSKISWGGKVKGLVGDKEKNHTLSERADGLLQSLRLRYPGLPQTSLDMNKIQYNKDVGQSILESYSRVLESLAFNIIARIDDVIYVDDATNRSAAAESVSIFNRGTGVPVQKRISPSPFSIQNSPYGSPFATPTFCSSTPVTGSPGRVQPPLNKNILGTQEIKVEKLFSGDLEKVWTYAGNLSARKDAGDAPERD

SEQ ID NO: 13756 - protein, 473 aa, Zea mays subsp. mays
  peptide (1)..(473): Ceres Seq. ID no. 12391585
  misc_feature (1)..(371): Pfam Name: Domain of unknown function (DUF315) Pfam Description: Domain of unknown function (DUF315)
  misc_feature (1)..(473): Homolog of NCBI NO: 15233845 NR Description: putative protein; protein id: At4g38430.1, by cDNA: gi_15810308, supported by cDNA: gi_15912194 [Arabidopsis >gi|18421309|ref|NP_568515.1| Expressed protein [Arabidopsis
  misc_feature (1)..(472): Homolog of NCBI NO: 15810309 NR Description: unknown protein [Arabidopsis thaliana]
  misc_feature (1)..(434): Homolog of NCBI NO: 15241663 NR Description: putative protein; protein id: At5g02010.1
  misc_feature (1)..(428): Homolog of NCBI NO: 15239292 NR Description: putative protein; protein id: At5g05940.1 thaliana] >gi|10177567|dbj|BAB10799.1|
  misc_feature (1)..(430): Homolog of NCBI NO: 34908302 NR Description: P0005H10.23 [Oryza sativa (japonica
  misc_feature (1)..(431): Homolog of NCBI NO: 15228166 NR Description: putative protein; protein id: At3g55660.1
  misc_feature (1)..(370): Homolog of NCBI NO: 37536670 NR Description: hypothetical protein [Oryza sativa (japonica group)] >gi|10140653|gb|AAG13489.1| hypothetical protein [Oryza
  misc_feature (1)..(365): Homolog of NCBI NO: 15236138 NR Description: putative protein; protein id: At4g00460.1
  misc_feature (1)..(370): Homolog of NCBI NO: 38345761 NR Description: OSJNBa0065O17.14 [Oryza sativa (japonica
  misc_feature (1)..(365): Homolog of NCBI NO: 15223455 NR Description: hypothetical protein; protein id: At1g01700.1
MKERFAKLLLGEDMSGSGKGVCTALAISNAITNLSATVFGELWRLEPLATARKAMWTREMEWLLSVADSIVELTPSIQELPEGGGQFEVMVPRPRSDLYMNLPALKKLDAMLLAMIDGFKDTEFWYVDRGVMVEDSGGPFPSSSSSSCGRPSVRQEDKWWLPCPRVPPKGLSVDARRKLQQSRDCANQILKAAMAINSDVLAEMEIPEVYLETLPKNGKSCLGEIIYRYITAEQFSPECLLDCLDLSSEHHTLEVANRIEGAIHVWKLKGQKKSTPQAKSKISWGGKVKGLVGDKEKNHTLSERADGLLQSLRLRYPGLPQTSLDMNKIQYNKDVGQSILESYSRVLESLAFNIIARIDDVIYVDDATNRSAAAESVSIFNRGTGVPVQKRISPSPFSIQNSPYGSPFATPTFCSSTPVTGSPGRVQPPLNKNILGTQEIKVEKLFSGDLEKVWTYAGNLSARKDAGDAPERD

SEQ ID NO: 13757 - DNA, 1131 bp, Zea mays subsp. mays
  misc_feature (1)..(1131): Ceres Seq. ID no. 12419222
  misc_feature: MA Experiment ID: 108527 Result: Up-regulated in Transcription
  misc_feature: MA Experiment 108527 PARAMETER Experiment Name: Zm_5mM_NO_P Parameter: Age (day) Value: 8
  misc_feature: MA Experiment 108527 PARAMETER Experiment Name: Zm_5mM_NO_P Parameter: Organism Value: Zea mays
  misc_feature: MA Experiment 108527 PARAMETER Experiment Name: Zm_5mM_NO_P Parameter: Plant Line Value: 35A19
  misc_feature: MA Experiment 108527 PARAMETER Experiment Name: Zm_5mM_NO_P Parameter: Timepoint (hr) Value: 6
  misc_feature: MA Experiment 108527 PARAMETER Experiment Name: Zm_5mM_NO_P Parameter: Tissue Value: Aerial
  misc_feature: MA Experiment 108527 PARAMETER Experiment Name: Zm_5mM_NO_P Parameter: Treatment Value: 5mM NO vs. No Treatment
  misc_feature: MA Experiment ID: 108559 Result: Up-regulated in Transcription
  misc_feature: MA Experiment 108559 PARAMETER Experiment Name: Zm_5mM_NO_P Parameter: Age (day) Value: 8
  misc_feature: MA Experiment 108559 PARAMETER Experiment Name: Zm_5mM_NO_P Parameter: Organism Value: Zea mays
  misc_feature: MA Experiment 108559 PARAMETER Experiment Name: Zm_5mM_NO_P Parameter: Plant Line Value: 35A19
  misc_feature: MA Experiment 108559 PARAMETER Experiment Name: Zm_5mM_NO_P Parameter: Timepoint (hr) Value: 12
  misc_feature: MA Experiment 108559 PARAMETER Experiment Name: Zm_5mM_NO_P Parameter: Tissue Value: Aerial
  misc_feature: MA Experiment 108559 PARAMETER Experiment Name: Zm_5mM_NO_P Parameter: Treatment Value: 5mM NO vs. No Treatment
aagtcgcctccgcgcctccgcatataggcagcgtcgcccctctccgctttcccgaattagcgccaccgccacctccgcctccgatcccgcctctcccgggaacgaagccgagccgcccgaatcgccctccacccatccacccacccatatagccgggccccggaccgctctccaccggctcgcgcccccgacccctccgccgtccgccgccgcatcgcgtgggagggggaggaggaggaggaggaggaggccatggccgctgccgtagcttgcaggcgcgcggcgctcctgcacgggcaccagcagtggccgcagcggtgggcggccgcgccctgcccccgctccatctcgcagctcgtcaagaccaacggccgccgcgccttcctcgtagacaccctcgccctggtcaggaagctggagtcgcagggcgtgccccaccaagcaggcggaggcgatcacctccgccatcacggaggtcctcaacgacagcctcgagagcatctccgagtccttcgtctccaaggccgagatgcagaagagtgagatgctgcaggagtccaatatctccaagttcaagtcccaagtgcagagctcgcaggaaaaccatttctctttactacagcgggagactgagaaacttcgcggagatattgataagatgaggagtgaactgaagtatgagatcgacaaggtcaccgcagaacagcgattggatctgaatcttgaaagagggcgcatacgtgatgagcttgccaagcagaatgaggaaaccactgagcttaccacaaagcttgacaaggaaatccactcactgaaggcccagttggaggcagcaaagtacgatgtcatcaagtactgcataggtaccattgtttcgatctcagccgtcggcctcgccgtcctccgcatcgtgatgtgaaggcagcaaagcaaatacgttctttggttttacccatattcgtcgcccgtccgtggaaacccgcaagaagagaataggttctaattctgttcctagtttttaaaggggacaaaacgtgctcaggggagggggacacttggtagtagggagatgttgctcaaacttgtaaaaatagattgcccgtggaagaaatgcatccgaaatgattctcc

SEQ ID NO: 13758 - protein, 129 aa, Zea mays subsp. mays
  peptide (1)..(129): Ceres Seq. ID no. 12419223
  misc_feature (1)..(129): Homolog of NCBI NO: 18398123 NR Description: expressed protein; protein id: At2g16460.1, by cDNA: 105900., supported by cDNA: gi_17529263 [Arabidopsis >gi|17529264|gb|AAL38859.1| unknown protein [Arabidopsis
  misc_feature (1)..(129): Homolog of NCBI NO: 18409266 NR Description: putative protein; protein id: At3g51090.1, by cDNA: gi_14423521, supported by cDNA: gi_20148346 [Arabidopsis >gi|14423522|gb|AAK62443.1|AF386998_1 putative protein
  misc_feature (1)..(129): Homolog of NCBI NO: 11357624 NR Description: hypothetical protein F24M12.130 - Arabidopsis >gi|6562261|emb|CAB62631.1| putative protein [Arabidopsis
  misc_feature (1)..(23): Homolog of NCBI NO: 25411710 NR Description: hypothetical protein At2g16460 [imported] -
  misc_feature (1)..(128): Homolog of NCBI NO: 14318473 NR Description: Hypothetical ORF; Yfl046wp [Saccharomyces
  misc_feature (1)..(129): Homolog of NCBI NO: 40743676 NR Description: hypothetical protein AN5773.2 [Aspergillus
  misc_feature (1)..(129): Homolog of NCBI NO: 19115424 NR Description: hypothetical conserved protein
  misc_feature (1)..(125): Homolog of NCBI NO: 19114462 NR Description: hypothetical protein; with coiled-coil region pombe] >gi|1351691|sp|Q10073|YAN8_SCHPO Hypothetical protein
  misc_feature (1)..(91): Homolog of NCBI NO: 10197624 NR Description: MDS025 [Homo sapiens] MDS011 [Homo sapiens] >gi|18088483|gb|AAH20783.1|AAH20783
  misc_feature (1)..(91): Homolog of NCBI NO: 20149663 NR Description: hypothetical protein MDS025 [Homo sapiens] CUA003 [Homo sapiens] >gi|12053095|emb|CAB66725.1| hypothetical [Homo sapiens] >gi|15778994|gb|AAH14573.1|AAH14573 hypothetical
MQKSEMLQESNISKFKSQVQSSQENHFSLLQRETEKLRGDIDKMRSELKYEIDKVTAEQRLDLNLERGRIRDELAKQNEETTELTTKLDKEIHSLKAQLEAAKYDVIKYCIGTIVSISAVGLAVLRIVM

SEQ ID NO: 13759 - protein, 124 aa, Zea mays subsp. mays
  peptide (1)..(124): Ceres Seq. ID no. 12419224
  misc_feature (1)..(124): Homolog of NCBI NO: 18398123 NR Description: expressed protein; protein id: At2g16460.1, by cDNA: 105900., supported by cDNA: gi_17529263 [Arabidopsis >gi|17529264|gb|AAL38859.1| unknown protein [Arabidopsis
  misc_feature (1)..(124): Homolog of NCBI NO: 18409266 NR Description: putative protein; protein id: At3g51090.1, by cDNA: gi_14423521, supported by cDNA: gi_20148346 [Arabidopsis >gi|14423522|gb|AAK62443.1|AF386998_1 putative protein
  misc_feature (1)..(124): Homolog of NCBI NO: 11357624 NR Description: hypothetical protein F24M12.130 - Arabidopsis >gi|6562261|emb|CAB62631.1| putative protein [Arabidopsis
  misc_feature (1)..(18): Homolog of NCBI NO: 25411710 NR Description: hypothetical protein At2g16460 [imported] -
  misc_feature (1)..(123): Homolog of NCBI NO: 14318473 NR Description: Hypothetical ORF; Yfl046wp [Saccharomyces
  misc_feature (1)..(124): Homolog of NCBI NO: 40743676 NR Description: hypothetical protein AN5773.2 [Aspergillus
  misc_feature (1)..(124): Homolog of NCBI NO: 19115424 NR Description: hypothetical conserved protein
  misc_feature (1)..(120): Homolog of NCBI NO: 19114462 NR Description: hypothetical protein; with coiled-coil region pombe] >gi|1351691|sp|Q10073|YAN8_SCHPO Hypothetical protein
  misc_feature (1)..(86): Homolog of NCBI NO: 10197624 NR Description: MDS025 [Homo sapiens] MDS011 [Homo sapiens] >gi|18088483|gb|AAH20783.1|AAH20783
  misc_feature (1)..(86): Homolog of NCBI NO: 20149663 NR Description: hypothetical protein MDS025 [Homo sapiens] CUA003 [Homo sapiens] >gi|12053095|emb|CAB66725.1| hypothetical [Homo sapiens] >gi|15778994|gb|AAH14573.1|AAH14573 hypothetical
MLQESNISKFKSQVQSSQENHFSLLQRETEKLRGDIDKMRSELKYEIDKVTAEQRLDLNLERGRIRDELAKQNEETTELTTKLDKEIHSLKAQLEAAKYDVIKYCIGTIVSISAVGLAVLRIVM

SEQ ID NO: 13760 - protein, 96 aa, Zea mays subsp. mays
  peptide (1)..(96): Ceres Seq. ID no. 12419225
  misc_feature (27)..(61): Homolog of NCBI NO: 18398123 NR Description: expressed protein; protein id: At2g16460.1, by cDNA: 105900., supported by cDNA: gi_17529263 [Arabidopsis >gi|17529264|gb|AAL38859.1| unknown protein [Arabidopsis
  misc_feature (30)..(61): Homolog of NCBI NO: 18409266 NR Description: putative protein; protein id: At3g51090.1, by cDNA: gi_14423521, supported by cDNA: gi_20148346 [Arabidopsis >gi|14423522|gb|AAK62443.1|AF386998_1 putative protein
  misc_feature (30)..(61): Homolog of NCBI NO: 11357624 NR Description: hypothetical protein F24M12.130 - Arabidopsis >gi|6562261|emb|CAB62631.1| putative protein [Arabidopsis
  misc_feature (27)..(61): Homolog of NCBI NO: 25411710 NR Description: hypothetical protein At2g16460 [imported] -
MAAAVACRRAALLHGHQQWPQRWAAAPCPRSISQLVKTNGRRAFLVDTLALVRKLESQGVPHQAGGGDHLRHHGGPQRQPREHLRVLRLQGRDAEE

SEQ ID NO: 13761 - DNA, 2328 bp, Zea mays subsp. mays
  misc_feature (1)..(2328): Ceres Seq. ID no. 12391602
  misc_feature: MA Experiment ID: 108535 Result: Up-regulated in Transcription
  misc_feature: MA Experiment 108535 PARAMETER Experiment Name: Zm_Meristem_P Parameter: Age (day) Value: 8
  misc_feature: MA Experiment 108535 PARAMETER Experiment Name: Zm_Meristem_P Parameter: Organism Value: Zea mays
  misc_feature: MA Experiment 108535 PARAMETER Experiment Name: Zm_Meristem_P Parameter: Plant Line Value: 35A19
  misc_feature: MA Experiment 108535 PARAMETER Experiment Name: Zm_Meristem_P Parameter: Tissue Value: Root Meristem vs. Above Root Meristem
  misc_feature: MA Experiment ID: 20000626 Result: Down-regulated in Transcription
  misc_feature: MA Experiment 20000626 PARAMETER Experiment Name: Zm_Herbicide-Treatments_P Parameter: Timepoint (hr) Value: 12
  misc_feature: MA Experiment 20000626 PARAMETER Experiment Name: Zm_Herbicide-Treatments_P Parameter: Tissue Value: Aerial
  misc_feature: MA Experiment 20000626 PARAMETER Experiment Name: Zm_Herbicide-Treatments_P Parameter: Treatment Value: Roundup vs. No Treatment
atcgttttccgtcctccagtccgtcaatccagtccccatccccacggcgccgacgactcgggggcttcccccccttggacttggcccgggtgggagtagcacgtcggggaagggaagcaagcgtccgcgagtaaggacagaaaaccgaagggaggagtggagaggaggagcttgcttggagcgggtggacgggtggtgtgtatatagttaagcgggcgggcgggcagccaatgccgtcgggcgcgcagggctaggagcatgggcggagggggcgcgatcgtgcacggcttccgccgctggttccaccgccggagcgaaggctccacctccaactccaaccagccgtccctcgccggcgagggggaagcggacgacggctcatccgatctcgaggtcatcgaggacccggatctcctcggcctccgcgccatccgcgtgcccaagcgcaagatgccgctgcccgtcgagagccacaggaagaactcagtagaaatggagttcttcacagagtacggagaggcaagccagtaccagatccaagaagtcattggtaaagggagctacggagtagttgctgcagctgtggacacccgcaccggtgagcgggttgctatcaagaagatcaatgatgtgtttgagcacgtctcggatgccacacgcatactgcgggagatcaagctcctccggttgcttcgtcacccagacatagtcgagattaagcacatcatgctccctccttctcggagggagttccaagacatctatgttgtttttgagctcatggagtcggatctccatcaagtgatcagggcgaatgatgacctcacccctgaacatcaccagtttttcctgtaccaacttcttcgagctctcaagtacatacatgccgctaatgtattccatcgtgatctaaagcccaagaatatactggctaactcggactgcaaactgaaaatatgtgactttggacttgcccgtgcatcattcaatgatgccccttcagctatattttggacagactatgtggcaacaaggtggtaccgggcacctgaactatgtggttcctttttctccaaatacactcctgcaattgatatttggagcattgggtgcatatttgctgaacttctcactggaaggccactatttcctgggaagaatgttgtacaccaattagatattataacagatcttcttgggactccatcatctgagaccttatcccggattcgaaatgagaaggccaggagatatttgagctgcatgcggaaaaaatatcccgtgccctttactcataaatttcgacatgctgatcctttggctcttcgtcttctagagcgtttgcttgcatttgatcctaaagaccggcctagtgcagaagaggctctagctgatccatactttgcatcccttgctaatgtagaacgtgagccatcaagacacccgatttctaaacttgagtttgaatttgaaagaaagaagctggccaaagatgatgttagagaactgatctatcgagagattttggagtatcatccacagatgctggaggagtacatgaaaggcggagaacagattagcttcctctatccaagcggagtcgaccgcttcaaactgcagttcgctcatcttgaggagcattacagcaaaggagaaagaggttccccactgcaaagaaagcatgcttccttaccaagggaaagagtggttgtatccaaggatggcaatactgaacaacaaattaatgaccaggagagaagcgcagattctgttgcccgcactaccgtgagccctccaaggtcagaggatgctgacatggatgatgtgaaacccacaagcttaagctctcggagctacctgaagagtgcaagcataagcgcttccaagtgcgtcgttgtcagaaataaacacccagagccagaggatgatggaatacctgaggagatggaaggcaccgtcgatggattgtctgaaaaggtctccaggatgcactcctaaggcaggactgtccatggcgacagcaatctcgacacaagatttctgtctggtgcactgtaatgccgacgacacactgtttggatcttgtgtacacccacagctagttcaactaagatgtagcactagttcgtccatggaggaagcagaatggacgatgaagtgtggtcagcctgtcgaccatgaggtgttttcttccaatggagtctagggtatgtttgagttctacaacggcttgtgccgtacgaagtgtcagcagtgtacgaggaggaggatatcgttgtcagtacacattttgcctgtctagaaaattatgagtactttctccgatcg

SEQ ID NO: 13762 - protein, 579 aa, Zea mays subsp. mays
  peptide (1)..(579): Ceres Seq. ID no. 12391603
  misc_feature (91)..(382): Pfam Name: Protein kinase domain Pfam Description: Protein kinase domain
  misc_feature (1)..(579): Homolog of NCBI NO: 38174819 NR Description: putative MAP kinase [Hordeum vulgare subsp.
  misc_feature (79)..(579): Homolog of NCBI NO: 5815410 NR Description: blast and wounding induced mitogen-activated
  misc_feature (79)..(579): Homolog of NCBI NO: 6689924 NR Description: MAP kinase homolog [Oryza sativa]
  misc_feature (34)..(579): Homolog of NCBI NO: 9294059 NR Description: MAP kinase [Arabidopsis thaliana]
  misc_feature (1)..(579): Homolog of NCBI NO: 15220976 NR Description: mitogen-activated protein kinase, putative; id: At1g18150.1, supported by cDNA: gi_7106541 [Arabidopsis >gi|9719729|gb|AAF97831.1|AC034107_14 Strong similarity
  misc_feature (69)..(579): Homolog of NCBI NO: 18401750 NR Description: putative MAP kinase; protein id: At3g18040.1,
  misc_feature (1)..(579): Homolog of NCBI NO: 25406284 NR Description: probable MAP kinase F25P22.9 [imported] -
  misc_feature (69)..(579): Homolog of NCBI NO: 7106544 NR Description: ATMPK9 [Arabidopsis thaliana]
  misc_feature (1)..(523): Homolog of NCBI NO: 7106542 NR Description: ATMPK8 [Arabidopsis thaliana]
  misc_feature (79)..(517): Homolog of NCBI NO: 6689926 NR Description: MAP kinase homolog [Oryza sativa]
MGGGGAIVHGFRRWFHRRSEGSTSNSNQPSLAGEGEADDGSSDLEVIEDPDLLGLRAIRVPKRKMPLPVESHRKNSVEMEFFTEYGEASQYQIQEVIGKGSYGVVAAAVDTRTGERVAIKKINDVFEHVSDATRILREIKLLRLLRHPDIVEIKHIMLPPSRREFQDIYVVFELMESDLHQVIRANDDLTPEHHQFFLYQLLRALKYIHAANVFHRDLKPKNILANSDCKLKICDFGLARASFNDAPSAIFWTDYVATRWYRAPELCGSFFSKYTPAIDIWSIGCIFAELLTGRPLFPGKNVVHQLDIITDLLGTPSSETLSRIRNEKARRYLSCMRKKYPVPFTHKFRHADPLALRLLERLLAFDPKDRPSAEEALADPYFASLANVEREPSRHPISKLEFEFERKKLAKDDVRELIYREILEYHPQMLEEYMKGGEQISFLYPSGVDRFKLQFAHLEEHYSKGERGSPLQRKHASLPRERVVVSKDGNTEQQINDQERSADSVARTTVSPPRSEDADMDDVKPTSLSSRSYLKSASISASKCVVVRNKHPEPEDDGIPEEMEGTVDGLSEKVSRMHS

SEQ ID NO: 13763 - protein, 515 aa, Zea mays subsp. mays
  peptide (1)..(515): Ceres Seq. ID no. 12391604
  misc_feature (27)..(318): Pfam Name: Protein kinase domain Pfam Description: Protein kinase domain
  misc_feature (1)..(515): Homolog of NCBI NO: 38174819 NR Description: putative MAP kinase [Hordeum vulgare subsp.
  misc_feature (15)..(515): Homolog of NCBI NO: 5815410 NR Description: blast and wounding induced mitogen-activated
  misc_feature (15)..(515): Homolog of NCBI NO: 6689924 NR Description: MAP kinase homolog [Oryza sativa]
  misc_feature (1)..(515): Homolog of NCBI NO: 9294059 NR Description: MAP kinase [Arabidopsis thaliana]
  misc_feature (1)..(515): Homolog of NCBI NO: 15220976 NR Description: mitogen-activated protein kinase, putative; id: At1g18150.1, supported by cDNA: gi_7106541 [Arabidopsis >gi|9719729|gb|AAF97831.1|AC034107_14 Strong similarity
  misc_feature (5)..(515): Homolog of NCBI NO: 18401750 NR Description: putative MAP kinase; protein id: At3g18040.1,
  misc_feature (1)..(515): Homolog of NCBI NO: 25406284 NR Description: probable MAP kinase F25P22.9 [imported] -
  misc_feature (5)..(515): Homolog of NCBI NO: 7106544 NR Description: ATMPK9 [Arabidopsis thaliana]
  misc_feature (1)..(459): Homolog of NCBI NO: 7106542 NR Description: ATMPK8 [Arabidopsis thaliana]
  misc_feature (15)..(453): Homolog of NCBI NO: 6689926 NR Description: MAP kinase homolog [Oryza sativa]
MPLPVESHRKNSVEMEFFTEYGEASQYQIQEVIGKGSYGVVAAAVDTRTGERVAIKKINDVFEHVSDATRILREIKLLRLLRHPDIVEIKHIMLPPSRREFQDIYVVFELMESDLHQVIRANDDLTPEHHQFFLYQLLRALKYIHAANVFHRDLKPKNILANSDCKLKICDFGLARASFNDAPSAIFWTDYVATRWYRAPELCGSFFSKYTPAIDIWSIGCIFAELLTGRPLFPGKNVVHQLDIITDLLGTPSSETLSRIRNEKARRYLSCMRKKYPVPFTHKFRHADPLALRLLERLLAFDPKDRPSAEEALADPYFASLANVEREPSRHPISKLEFEFERKKLAKDDVRELIYREILEYHPQMLEEYMKGGEQISFLYPSGVDRFKLQFAHLEEHYSKGERGSPLQRKHASLPRERVVVSKDGNTEQQINDQERSADSVARTTVSPPRSEDADMDDVKPTSLSSRSYLKSASISASKCVVVRNKHPEPEDDGIPEEMEGTVDGLSEKVSRMHS

SEQ ID NO: 13764 - protein, 501 aa, Zea mays subsp. mays
  peptide (1)..(501): Ceres Seq. ID no. 12391605
  misc_feature (13)..(304): Pfam Name: Protein kinase domain Pfam Description: Protein kinase domain
  misc_feature (1)..(501): Homolog of NCBI NO: 38174819 NR Description: putative MAP kinase [Hordeum vulgare subsp.
  misc_feature (1)..(501): Homolog of NCBI NO: 5815410 NR Description: blast and wounding induced mitogen-activated
  misc_feature (1)..(501): Homolog of NCBI NO: 6689924 NR Description: MAP kinase homolog [Oryza sativa]
  misc_feature (1)..(501): Homolog of NCBI NO: 9294059 NR Description: MAP kinase [Arabidopsis thaliana]
  misc_feature (1)..(501): Homolog of NCBI NO: 15220976 NR Description: mitogen-activated protein kinase, putative; id: At1g18150.1, supported by cDNA: gi_7106541 [Arabidopsis >gi|9719729|gb|AAF97831.1|AC034107_14 Strong similarity
  misc_feature (1)..(501): Homolog of NCBI NO: 18401750 NR Description: putative MAP kinase; protein id: At3g18040.1,
  misc_feature (1)..(501): Homolog of NCBI NO: 25406284 NR Description: probable MAP kinase F25P22.9 [imported] -
  misc_feature (1)..(501): Homolog of NCBI NO: 7106544 NR Description: ATMPK9 [Arabidopsis thaliana]
  misc_feature (1)..(445): Homolog of NCBI NO: 7106542 NR Description: ATMPK8 [Arabidopsis thaliana]
  misc_feature (1)..(439): Homolog of NCBI NO: 6689926 NR Description: MAP kinase homolog [Oryza sativa]
MEFFTEYGEASQYQIQEVIGKGSYGVVAAAVDTRTGERVAIKKINDVFEHVSDATRILREIKLLRLLRHPDIVEIKHIMLPPSRREFQDIYVVFELMESDLHQVIRANDDLTPEHHQFFLYQLLRALKYIHAANVFHRDLKPKNILANSDCKLKICDFGLARASFNDAPSAIFWTDYVATRWYRAPELCGSFFSKYTPAIDIWSIGCIFAELLTGRPLFPGKNVVHQLDIITDLLGTPSSETLSRIRNEKARRYLSCMRKKYPVPFTHKFRHADPLALRLLERLLAFDPKDRPSAEEALADPYFASLANVEREPSRHPISKLEFEFERKKLAKDDVRELIYREILEYHPQMLEEYMKGGEQISFLYPSGVDRFKLQFAHLEEHYSKGERGSPLQRKHASLPRERVVVSKDGNTEQQINDQERSADSVARTTVSPPRSEDADMDDVKPTSLSSRSYLKSASISASKCVVVRNKHPEPEDDGIPEEMEGTVDGLSEKVSRMHS

SEQ ID NO: 13765 - DNA, 971 bp, Zea mays subsp. mays
  misc_feature (1)..(971): Ceres Seq. ID no. 12391568
  misc_feature: MA Experiment ID: 108528 Result: Up-regulated in Transcription
  misc_feature: MA Experiment 108528 PARAMETER Experiment Name: Zm_Imbibed_Seeds_P Parameter: Age (day) Value: 5 vs. 2
  misc_feature: MA Experiment 108528 PARAMETER Experiment Name: Zm_Imbibed_Seeds_P Parameter: Organism Value: Zea mays
  misc_feature: MA Experiment 108528 PARAMETER Experiment Name: Zm_Imbibed_Seeds_P Parameter: Plant Line Value: 35A19
  misc_feature: MA Experiment 108528 PARAMETER Experiment Name: Zm_Imbibed_Seeds_P Parameter: Tissue Value: Aerial vs. Embryo
  misc_feature: MA Experiment ID: 108529 Result: Down-regulated in Transcription
  misc_feature: MA Experiment 108529 PARAMETER Experiment Name: Zm_Imbibed_Seeds_P Parameter: Age (day) Value: 5 vs. 2
  misc_feature: MA Experiment 108529 PARAMETER Experiment Name: Zm_Imbibed_Seeds_P Parameter: Organism Value: Zea mays
  misc_feature: MA Experiment 108529 PARAMETER Experiment Name: Zm_Imbibed_Seeds_P Parameter: Plant Line Value: 35A19
  misc_feature: MA Experiment 108529 PARAMETER Experiment Name: Zm_Imbibed_Seeds_P Parameter: Tissue Value: Roots vs. Embryo
  misc_feature: MA Experiment ID: 108530 Result: Up-regulated in Transcription
  misc_feature: MA Experiment 108530 PARAMETER Experiment Name: Zm_Imbibed_Seeds_P Parameter: Age (day) Value: 6 vs. 2
  misc_feature: MA Experiment 108530 PARAMETER Experiment Name: Zm_Imbibed_Seeds_P Parameter: Organism Value: Zea mays
  misc_feature: MA Experiment 108530 PARAMETER Experiment Name: Zm_Imbibed_Seeds_P Parameter: Plant Line Value: 35A19
  misc_feature: MA Experiment 108530 PARAMETER Experiment Name: Zm_Imbibed_Seeds_P Parameter: Tissue Value: Aerial vs. Embryo
  misc_feature: MA Experiment ID: 108536 Result: Down-regulated in Transcription
  misc_feature: MA Experiment 108536 PARAMETER Experiment Name: Zm_Meristem_P Parameter: Age (day) Value: 8
  misc_feature: MA Experiment 108536 PARAMETER Experiment Name: Zm_Meristem_P Parameter: Organism Value: Zea mays
  misc_feature: MA Experiment 108536 PARAMETER Experiment Name: Zm_Meristem_P Parameter: Plant Line Value: 35A19
  misc_feature: MA Experiment 108536 PARAMETER Experiment Name: Zm_Meristem_P Parameter: Tissue Value: Shoot Meristem vs. Above Shoot Meristem
  misc_feature: MA Experiment ID: 108545 Result: Up-regulated in Transcription
  misc_feature: MA Experiment 108545 PARAMETER Experiment Name: Zm_Imbibed_Seeds_P Parameter: Age (day) Value: 3 vs. 2
  misc_feature: MA Experiment 108545 PARAMETER Experiment Name: Zm_Imbibed_Seeds_P Parameter: Organism Value: Zea mays
  misc_feature: MA Experiment 108545 PARAMETER Experiment Name: Zm_Imbibed_Seeds_P Parameter: Plant Line Value: 35A19
  misc_feature: MA Experiment 108545 PARAMETER Experiment Name: Zm_Imbibed_Seeds_P Parameter: Tissue Value: Aerial vs. Embryo
  misc_feature: MA Experiment ID: 108546 Result: Down-regulated in Transcription
  misc_feature: MA Experiment 108546 PARAMETER Experiment Name: Zm_Imbibed_Seeds_P Parameter: Age (day) Value: 3 vs. 2
  misc_feature: MA Experiment 108546 PARAMETER Experiment Name: Zm_Imbibed_Seeds_P Parameter: Organism Value: Zea mays
  misc_feature: MA Experiment 108546 PARAMETER Experiment Name: Zm_Imbibed_Seeds_P Parameter: Plant Line Value: 35A19
  misc_feature: MA Experiment 108546 PARAMETER Experiment Name: Zm_Imbibed_Seeds_P Parameter: Tissue Value: Roots vs. Embryo
  misc_feature: MA Experiment ID: 108547 Result: Up-regulated in Transcription
  misc_feature: MA Experiment 108547 PARAMETER Experiment Name: Zm_Imbibed_Seeds_P Parameter: Age (day) Value: 4 vs. 2
  misc_feature: MA Experiment 108547 PARAMETER Experiment Name: Zm_Imbibed_Seeds_P Parameter: Organism Value: Zea mays
  misc_feature: MA Experiment 108547 PARAMETER Experiment Name: Zm_Imbibed_Seeds_P Parameter: Plant Line Value: 35A19
  misc_feature: MA Experiment 108547 PARAMETER Experiment Name: Zm_Imbibed_Seeds_P Parameter: Tissue Value: Aerial vs. Embryo
  misc_feature: MA Experiment ID: 108559 Result: Down-regulated in Transcription
  misc_feature: MA Experiment 108559 PARAMETER Experiment Name: Zm_5mM_NO_P Parameter: Age (day) Value: 8
  misc_feature: MA Experiment 108559 PARAMETER Experiment Name: Zm_5mM_NO_P Parameter: Organism Value: Zea mays
  misc_feature: MA Experiment 108559 PARAMETER Experiment Name: Zm_5mM_NO_P Parameter: Plant Line Value: 35A19
  misc_feature: MA Experiment 108559 PARAMETER Experiment Name: Zm_5mM_NO_P Parameter: Timepoint (hr) Value: 12
  misc_feature: MA Experiment 108559 PARAMETER Experiment Name: Zm_5mM_NO_P Parameter: Tissue Value: Aerial
  misc_feature: MA Experiment 108559 PARAMETER Experiment Name: Zm_5mM_NO_P Parameter: Treatment Value: 5mM NO vs. No Treatment
  misc_feature: MA Experiment ID: 108688 Result: Down-regulated in Transcription
  misc_feature: MA Experiment 108688 PARAMETER Experiment Name: Zm_Embryos-Flowers__P Parameter: Tissue Value: Immature Flowers vs. Aerial+
  misc_feature: MA Experiment ID: 20000477 Result: Down-regulated in Transcription
  misc_feature: MA Experiment 20000477 PARAMETER Experiment Name: Zm_5mM_SA_P Parameter: Age (day) Value: 10
  misc_feature: MA Experiment 20000477 PARAMETER Experiment Name: Zm_5mM_SA_P Parameter: Organism Value: Zea mays
  misc_feature: MA Experiment 20000477 PARAMETER Experiment Name: Zm_5mM_SA_P Parameter: Plant Line Value: 35A19
  misc_feature: MA Experiment 20000477 PARAMETER Experiment Name: Zm_5mM_SA_P Parameter: Timepoint (hr) Value: 48
  misc_feature: MA Experiment 20000477 PARAMETER Experiment Name: Zm_5mM_SA_P Parameter: Tissue Value: Aerial
  misc_feature: MA Experiment 20000477 PARAMETER Experiment Name: Zm_5mM_SA_P Parameter: Treatment Value: 5mM SA vs. No Treatment
  misc_feature: MA Experiment ID: 20000478 Result: Down-regulated in Transcription
  misc_feature: MA Experiment 20000478 PARAMETER Experiment Name: Zm_5mM_SA_P Parameter: Age (day) Value: 11
  misc_feature: MA Experiment 20000478 PARAMETER Experiment Name: Zm_5mM_SA_P Parameter: Organism Value: Zea mays
  misc_feature: MA Experiment 20000478 PARAMETER Experiment Name: Zm_5mM_SA_P Parameter: Plant Line Value: 35A19
  misc_feature: MA Experiment 20000478 PARAMETER Experiment Name: Zm_5mM_SA_P Parameter: Timepoint (hr) Value: 72
  misc_feature: MA Experiment 20000478 PARAMETER Experiment Name: Zm_5mM_SA_P Parameter: Tissue Value: Aerial
  misc_feature: MA Experiment 20000478 PARAMETER Experiment Name: Zm_5mM_SA_P Parameter: Treatment Value: 5mM SA vs. No Treatment
  misc_feature: MA Experiment ID: 20000479 Result: Down-regulated in Transcription
  misc_feature: MA Experiment 20000479 PARAMETER Experiment Name: Zm_Drought_P Parameter: Age (day) Value: 10
  misc_feature: MA Experiment 20000479 PARAMETER Experiment Name: Zm_Drought_P Parameter: Organism Value: Zea mays
  misc_feature: MA Experiment 20000479 PARAMETER Experiment Name: Zm_Drought_P Parameter: Plant Line Value: 35A19
  misc_feature: MA Experiment 20000479 PARAMETER Experiment Name: Zm_Drought_P Parameter: Timepoint (hr) Value: 48
  misc_feature: MA Experiment 20000479 PARAMETER Experiment Name: Zm_Drought_P Parameter: Tissue Value: Aerial
  misc_feature: MA Experiment 20000479 PARAMETER Experiment Name: Zm_Drought_P Parameter: Treatment Value: Drought vs. No Drought
  misc_feature: MA Experiment ID: 20000480 Result: Down-regulated in Transcription
  misc_feature: MA Experiment 20000480 PARAMETER Experiment Name: Zm_Drought_P Parameter: Age (day) Value: 11
  misc_feature: MA Experiment 20000480 PARAMETER Experiment Name: Zm_Drought_P Parameter: Organism Value: Zea mays
  misc_feature: MA Experiment 20000480 PARAMETER Experiment Name: Zm_Drought_P Parameter: Plant Line Value: 35A19
  misc_feature: MA Experiment 20000480 PARAMETER Experiment Name: Zm_Drought_P Parameter: Timepoint (hr) Value: 72
  misc_feature: MA Experiment 20000480 PARAMETER Experiment Name: Zm_Drought_P Parameter: Tissue Value: Aerial
  misc_feature: MA Experiment 20000480 PARAMETER Experiment Name: Zm_Drought_P Parameter: Treatment Value: Drought vs. No Drought
  misc_feature: MA Experiment ID: 20000626 Result: Down-regulated in Transcription
  misc_feature: MA Experiment 20000626 PARAMETER Experiment Name: Zm_Herbicide-Treatments_P Parameter: Timepoint (hr) Value: 12
  misc_feature: MA Experiment 20000626 PARAMETER Experiment Name: Zm_Herbicide-Treatments_P Parameter: Tissue Value: Aerial
  misc_feature: MA Experiment 20000626 PARAMETER Experiment Name: Zm_Herbicide-Treatments_P Parameter: Treatment Value: Roundup vs. No Treatment
acacctccttatcgcaacgcgagcagcagttgcattggaggcgaggaggagccacgccggggctcaaggaatggccgctctccgccacctcgctgccggccccacctgccaccaccaccaccacggcgtcgcggcagccaccgcctccctccggctccatcgcctccccctccccttccgcccccttcgctcccgctccggctccttcaccagggtttatgcgatctccagcaatgacatcagggtcggcaccaacgtcgaggtcgacggcgcgccatggaaagttctagagttcctccacgtcaagcctggaaaaggcgctgctttcgtcaggacaaaactgcgtaactatgtaactggcaacacggtcgagaaaaccttccgtgctggaagtacgctacaggaaccatccctttcaaaggagaccaagcaatttacatacaaggatggctcccagttcgtgttcatggatctgacaacatttgaagaaagtcggttaaatgaagcagatgtcggtgacaaacaaaaatggctgaaagaggggatggactgcaatttgttgtactggaatgggaagatcattgatttcgacctcccaatcactgtgaggctgactgtaactgatactgacccaggggcaagtgatagtgcgcaaggaggaacaaagcctgcaaccctggaaactggagctgttgtcactgtgccctcttttgtgaacgtaggcgatgatattctggtggattcaagaactgggcagtatatgaatcgagcataacgaattgaagaggatttcggatttgaggagagtactgcttttttgtttgaccattttagtcccattcacttgtacaaacgccctgggtctttggccccaggaaatttacatttctgctgcatgtgaatcctcactctgattataaccatgtacatctttggtttccagatataaggaaaattgtgttcagattttt

SEQ ID NO: 13766 - protein, 257 aa, Zea mays subsp. mays
  peptide (1)..(257): Ceres Seq. ID no. 12391569
  misc_feature (75)..(257): Pfam Name: Elongation factor P (EF-P) Pfam Description: Elongation factor P (EF-P)
  misc_feature (46)..(257): Homolog of NCBI NO: 18398225 NR Description: putative elongation factor P (EF-P); protein id: supported by cDNA: 2242., supported by cDNA: gi_17380805 thaliana] >gi|17380806|gb|AAL36090.1| putative elongation factor
  misc_feature (75)..(257): Homolog of NCBI NO: 12322730 NR Description: putative elongation factor P (EF-P); 66839-65711
  misc_feature (75)..(256): Homolog of NCBI NO: 2494275 NR Description: Elongation factor P (EF-P) >gi|7469237|pir||T30278
  misc_feature (75)..(256): Homolog of NCBI NO: 22298837 NR Description: translation elongation factor EF-P
  misc_feature (75)..(256): Homolog of NCBI NO: 33864569 NR Description: Translation elongation factor EF-P [Synechococcus
  misc_feature (75)..(256): Homolog of NCBI NO: 16331453 NR Description: elongation factor P [Synechocystis sp. PCC 6803]
  misc_feature (75)..(256): Homolog of NCBI NO: 33862304 NR Description: Elongation factor P (EF-P) [Prochlorococcus
  misc_feature (75)..(256): Homolog of NCBI NO: 33239478 NR Description: Translation elongation factor P [Prochlorococcus subsp. marinus str. CCMP1375] >gi|33237003|gb|AAP99072.1| elongation factor P [Prochlorococcus marinus subsp. marinus str.
  misc_feature (75)..(256): Homolog of NCBI NO: 23125000 NR Description: hypothetical protein [Nostoc punctiforme]
  misc_feature (75)..(256): Homolog of NCBI NO: 23042812 NR Description: hypothetical protein [Trichodesmium erythraeum
HLLIATRAAVALEARRSHAGAQGMAALRHLAAGPTCHHHHHGVAAATASLRLHRLPLPFRPLRSRSGSFTRVYAISSNDIRVGTNVEVDGAPWKVLEFLHVKPGKGAAFVRTKLRNYVTGNTVEKTFRAGSTLQEPSLSKETKQFTYKDGSQFVFMDLTTFEESRLNEADVGDKQKWLKEGMDCNLLYWNGKIIDFDLPITVRLTVTDTDPGASDSAQGGTKPATLETGAVVTVPSFVNVGDDILVDSRTGQYMNRA

SEQ ID NO: 13767 - protein, 234 aa, Zea mays subsp. mays
  peptide (1)..(234): Ceres Seq. ID no. 12391570
  misc_feature (52)..(234): Pfam Name: Elongation factor P (EF-P) Pfam Description: Elongation factor P (EF-P)
  misc_feature (52)..(234): Homolog of NCBI NO: 12322730 NR Description: putative elongation factor P (EF-P); 66839-65711
  misc_feature (52)..(233): Homolog of NCBI NO: 2494275 NR Description: Elongation factor P (EF-P) >gi|7469237|pir||T30278
  misc_feature (52)..(233): Homolog of NCBI NO: 22298837 NR Description: translation elongation factor EF-P
  misc_feature (52)..(233): Homolog of NCBI NO: 33864569 NR Description: Translation elongation factor EF-P [Synechococcus
  misc_feature (52)..(233): Homolog of NCBI NO: 16331453 NR Description: elongation factor P [Synechocystis sp. PCC 6803]
  misc_feature (23)..(234): Homolog of NCBI NO: 18398225 NR Description: putative elongation factor P (EF-P); protein id: supported by cDNA: 2242., supported by cDNA: gi_17380805 thaliana] >gi|17380806|gb|AAL36090.1| putative elongation factor
  misc_feature (52)..(233): Homolog of NCBI NO: 33862304 NR Description: Elongation factor P (EF-P) [Prochlorococcus
  misc_feature (52)..(233): Homolog of NCBI NO: 33239478 NR Description: Translation elongation factor P [Prochlorococcus subsp. marinus str. CCMP1375] >gi|33237003|gb|AAP99072.1| elongation factor P [Prochlorococcus marinus subsp. marinus str.
  misc_feature (52)..(233): Homolog of NCBI NO: 23125000 NR Description: hypothetical protein [Nostoc punctiforme]
  misc_feature (52)..(233): Homolog of NCBI NO: 23042812 NR Description: hypothetical protein [Trichodesmium erythraeum
MAALRHLAAGPTCHHHHHGVAAATASLRLHRLPLPFRPLRSRSGSFTRVYAISSNDIRVGTNVEVDGAPWKVLEFLHVKPGKGAAFVRTKLRNYVTGNTVEKTFRAGSTLQEPSLSKETKQFTYKDGSQFVFMDLTTFEESRLNEADVGDKQKWLKEGMDCNLLYWNGKIIDFDLPITVRLTVTDTDPGASDSAQGGTKPATLETGAVVTVPSFVNVGDDILVDSRTGQYMNRA

SEQ ID NO: 13768 - DNA, 1836 bp, Zea mays subsp. mays
  misc_feature (1)..(1836): Ceres Seq. ID no. 12436188
  misc_feature: MA Experiment ID: 108523 Result: Up-regulated in Transcription
  misc_feature: MA Experiment 108523 PARAMETER Experiment Name: Zm_42deg_Heat_P Parameter: Age (day) Value: 8
  misc_feature: MA Experiment 108523 PARAMETER Experiment Name: Zm_42deg_Heat_P Parameter: Organism Value: Zea mays
  misc_feature: MA Experiment 108523 PARAMETER Experiment Name: Zm_42deg_Heat_P Parameter: Plant Line Value: 35A19
  misc_feature: MA Experiment 108523 PARAMETER Experiment Name: Zm_42deg_Heat_P Parameter: Temperature (deg C) Value: 42 vs. 22
  misc_feature: MA Experiment 108523 PARAMETER Experiment Name: Zm_42deg_Heat_P Parameter: Timepoint (hr) Value: 6
  misc_feature: MA Experiment 108523 PARAMETER Experiment Name: Zm_42deg_Heat_P Parameter: Tissue Value: Aerial
  misc_feature: MA Experiment ID: 108527 Result: Down-regulated in Transcription
  misc_feature: MA Experiment 108527 PARAMETER Experiment Name: Zm_5mM_NO_P Parameter: Age (day) Value: 8
  misc_feature: MA Experiment 108527 PARAMETER Experiment Name: Zm_5mM_NO_P Parameter: Organism Value: Zea mays
  misc_feature: MA Experiment 108527 PARAMETER Experiment Name: Zm_5mM_NO_P Parameter: Plant Line Value: 35A19
  misc_feature: MA Experiment 108527 PARAMETER Experiment Name: Zm_5mM_NO_P Parameter: Timepoint (hr) Value: 6
  misc_feature: MA Experiment 108527 PARAMETER Experiment Name: Zm_5mM_NO_P Parameter: Tissue Value: Aerial
  misc_feature: MA Experiment 108527 PARAMETER Experiment Name: Zm_5mM_NO_P Parameter: Treatment Value: 5mM NO vs. No Treatment
  misc_feature: MA Experiment ID: 108534 Result: Up-regulated in Transcription
  misc_feature: MA Experiment 108534 PARAMETER Experiment Name: Zm_4deg_Cold_P Parameter: Age (hr) Value: 8
  misc_feature: MA Experiment 108534 PARAMETER Experiment Name: Zm_4deg_Cold_P Parameter: Organism Value: Zea mays
  misc_feature: MA Experiment 108534 PARAMETER Experiment Name: Zm_4deg_Cold_P Parameter: Plant Line Value: 35A19
  misc_feature: MA Experiment 108534 PARAMETER Experiment Name: Zm_4deg_Cold_P Parameter: Temperature (deg C) Value: 4 vs. 22
  misc_feature: MA Experiment 108534 PARAMETER Experiment Name: Zm_4deg_Cold_P Parameter: Timepoint (hr) Value: 6
  misc_feature: MA Experiment 108534 PARAMETER Experiment Name: Zm_4deg_Cold_P Parameter: Tissue Value: Aerial
  misc_feature: MA Experiment ID: 108543 Result: Down-regulated in Transcription
  misc_feature: MA Experiment ID: 108688 Result: Down-regulated in Transcription
  misc_feature: MA Experiment 108688 PARAMETER Experiment Name: Zm_Embryos-Flowers__P Parameter: Tissue Value: Immature Flowers vs. Aerial+
  misc_feature: MA Experiment ID: 20000535 Result: Up-regulated in Transcription
  misc_feature: MA Experiment 20000535 PARAMETER Experiment Name: Zm_Hybrid_Seed_Dev_P Parameter: DAP Value: 30 vs. 12
  misc_feature: MA Experiment 20000535 PARAMETER Experiment Name: Zm_Hybrid_Seed_Dev_P Parameter: Organism Value: Zea mays
  misc_feature: MA Experiment 20000535 PARAMETER Experiment Name: Zm_Hybrid_Seed_Dev_P Parameter: Plant Line Value: 35A19
  misc_feature: MA Experiment 20000535 PARAMETER Experiment Name: Zm_Hybrid_Seed_Dev_P Parameter: Tissue Value: Embryo vs. Unfert Floret
agcaaccaaagcacacccctcctccttgctctgccgtgctcggagttgggagttggagcaccaccaccaccactcttcccctctcctctccctcctcgctcgtcctgttggaagcagcacacacacgagagagaaagagagacacaaggagatggcgctgctgttgctcctgctggccgtgctcggcgtggtgctggcgagcagcctgctgctgcggtggaacgagctgcggtacagccgccgccggggcctgccgccgggcacaatggggtggccgctcttcggcgagaccaccgagttcctcaagcaggggcctagcttcatgaagcagaggaggctcaggtacgggagcctgttccggacgcacatcctgggctgccccacggtggtgtgcatggagcccggagctgaaccggcgggcgctggccagcgagggcgccggcttcgtcccgggctacccgcagtccatgctcgacatcctggggcccaacaacatcgccgccgtgcacggcccgctccaccgcgccatgcggggcgccatgctcgcgctcacgcggccacacatgatccgcgccgcgctcctccccaagatcgacgccttcatgcgcgcccacctccacggctgggccggacgccgcgtcgacatccaggagatgaccaaggagatggctttgctctcgggctctcaggcagatcgctggcatctctgcgggcccacactccgacgccctaaaggcagagctgtacacccttgtacttggcaccttctccctgccaatcaacgtcccaggaaccaactacagcaaagggctccaggcaaggaagaagctcgtggcaatgctgcggcagatgatcgctgaccggaggtcctctggctgcgcccgagacgacatgctggacgcgctgctcagcggcaacgagggtaccagggcgaagctcagcgacgaccagatcatcgaccttctcatcaccctcatatactctgggtacgagactgtgtcgaccacctcgatgatggcggtgaagtacctgtcggacaaccccaaagctctcggacagatcaggaaagagcaccttgacatcaggaaggctaagtcaccggaggatccccttgactggaacgactacaagtccatgaccttcaccaaagctgtcatttatgagactctaaggctagctacagtagtcaacgggctgctgaggaaaactacccatgacgtagaaatgaatgggtatgttattccaaaaggctggagaatttatgtatacacaagggagataaactacgacccgttcctgtacccggaacccatggttttcaacccatggagatggatggagacgaacctggaatcacatccgcacttcatgctgttcggaggaggtgcccgcatgtgcccagggaaggaagtaggaacagttgaaatcgcaacgttccttcactatttcgtgacgcgttacagatgggaggaggagggaaacaacacaatatcgaagttccccagagtggcggctcccaatgggctacatatccgagttcaagattactgaacttcgtgaggcgttttgtgaagtttaggtagggattcagacagatagaaataacccatgcgatgctgatgctgctggcctcttcgaaaggactagaacagccattagtgcctgtaaaatgtgtccatgccgatagtaatgttattatagggaggatataggtatcataggtttattagaaatttgatgtagaaagccaacagatgctcctgtattcttttgctccatcaaaacagaggtatcatttggcttctatgcttttgaatcgaacatggtacagaaccc

SEQ ID NO: 13769 - protein, 243 aa, Zea mays subsp. mays
  peptide (1)..(243): Ceres Seq. ID no. 12436189
  misc_feature (51)..(153): Homolog of NCBI NO: 27127269 NR Description: cytochrome P450 [Oryza sativa (japonica
  misc_feature (51)..(133): Homolog of NCBI NO: 18406372 NR Description: cytochrome p450, putative; protein id: supported by cDNA: 11278., supported by cDNA: gi_15450574, by cDNA: gi_17380629 [Arabidopsis thaliana]
  misc_feature (51)..(133): Homolog of NCBI NO: 9294419 NR Description: cytochrome P450 [Arabidopsis thaliana]
  misc_feature (51)..(133): Homolog of NCBI NO: 21536828 NR Description: cytochrome P450 homolog, putative [Arabidopsis
  misc_feature (51)..(153): Homolog of NCBI NO: 5921933 NR Description: Cytochrome P450 85 (Dwarf protein)
  misc_feature (52)..(153): Homolog of NCBI NO: 30693327 NR Description: cytochrome p450, putative [Arabidopsis thaliana]
  misc_feature (52)..(153): Homolog of NCBI NO: 30693331 NR Description: cytochrome p450, putative [Arabidopsis thaliana]
  misc_feature (55)..(134): Homolog of NCBI NO: 9587211 NR Description: cytochrome P450 [Vigna radiata]
  misc_feature (51)..(134): Homolog of NCBI NO: 20520627 NR Description: putative cytochrome P450 [Oryza sativa (japonica
  misc_feature (51)..(134): Homolog of NCBI NO: 38567920 NR Description: OSJNBa0088I22.16 [Oryza sativa (japonica
ATKAHPSSLLCRARSWELEHHHHHSSPLLSLLARPVGSSTHTREKERHKEMALLLLLLAVLGVVLASSLLLRWNELRYSRRRGLPPGTMGWPLFGETTEFLKQGPSFMKQRRLRYGSLFRTHILGCPTVVCMEPGAEPAGAGQRGRRLRPGLPAVHARHPGAQQHRRRARPAPPRHAGRHARAHAATHDPRRAPPQDRRLHARPPPRLGRTPRRHPGDDQGDGFALGLSGRSLASLRAHTPTP

SEQ ID NO: 13770 - protein, 237 aa, Zea mays subsp. mays
  peptide (1)..(237): Ceres Seq. ID no. 12436190
  misc_feature (1)..(237): Homolog of NCBI NO: 27127269 NR Description: cytochrome P450 [Oryza sativa (japonica
  misc_feature (1)..(237): Homolog of NCBI NO: 18406372 NR Description: cytochrome p450, putative; protein id: supported by cDNA: 11278., supported by cDNA: gi_15450574, by cDNA: gi_17380629 [Arabidopsis thaliana]
  misc_feature (1)..(237): Homolog of NCBI NO: 9294419 NR Description: cytochrome P450 [Arabidopsis thaliana]
  misc_feature (1)..(237): Homolog of NCBI NO: 21536828 NR Description: cytochrome P450 homolog, putative [Arabidopsis
  misc_feature (1)..(234): Homolog of NCBI NO: 5921933 NR Description: Cytochrome P450 85 (Dwarf protein)
  misc_feature (1)..(237): Homolog of NCBI NO: 30693327 NR Description: cytochrome p450, putative [Arabidopsis thaliana]
  misc_feature (1)..(167): Homolog of NCBI NO: 30693331 NR Description: cytochrome p450, putative [Arabidopsis thaliana]
  misc_feature (1)..(222): Homolog of NCBI NO: 9587211 NR Description: cytochrome P450 [Vigna radiata]
  misc_feature (1)..(234): Homolog of NCBI NO: 20520627 NR Description: putative cytochrome P450 [Oryza sativa (japonica
  misc_feature (1)..(234): Homolog of NCBI NO: 38567920 NR Description: OSJNBa0088I22.16 [Oryza sativa (japonica
MLRQMIADRRSSGCARDDMLDALLSGNEGTRAKLSDDQIIDLLITLIYSGYETVSTTSMMAVKYLSDNPKALGQIRKEHLDIRKAKSPEDPLDWNDYKSMTFTKAVIYETLRLATVVNGLLRKTTHDVEMNGYVIPKGWRIYVYTREINYDPFLYPEPMVFNPWRWMETNLESHPHFMLFGGGARMCPGKEVGTVEIATFLHYFVTRYRWEEEGNNTISKFPRVAAPNGLHIRVQDY

SEQ ID NO: 13771 - protein, 233 aa, Zea mays subsp. mays
  peptide (1)..(233): Ceres Seq. ID no. 12436191
  misc_feature (1)..(233): Homolog of NCBI NO: 27127269 NR Description: cytochrome P450 [Oryza sativa (japonica
  misc_feature (1)..(233): Homolog of NCBI NO: 18406372 NR Description: cytochrome p450, putative; protein id: supported by cDNA: 11278., supported by cDNA: gi_15450574, by cDNA: gi_17380629 [Arabidopsis thaliana]
  misc_feature (1)..(233): Homolog of NCBI NO: 9294419 NR Description: cytochrome P450 [Arabidopsis thaliana]
  misc_feature (1)..(233): Homolog of NCBI NO: 21536828 NR Description: cytochrome P450 homolog, putative [Arabidopsis
  misc_feature (1)..(230): Homolog of NCBI NO: 5921933 NR Description: Cytochrome P450 85 (Dwarf protein)
  misc_feature (1)..(233): Homolog of NCBI NO: 30693327 NR Description: cytochrome p450, putative [Arabidopsis thaliana]
  misc_feature (1)..(163): Homolog of NCBI NO: 30693331 NR Description: cytochrome p450, putative [Arabidopsis thaliana]
  misc_feature (1)..(218): Homolog of NCBI NO: 9587211 NR Description: cytochrome P450 [Vigna radiata]
  misc_feature (1)..(230): Homolog of NCBI NO: 20520627 NR Description: putative cytochrome P450 [Oryza sativa (japonica
  misc_feature (1)..(230): Homolog of NCBI NO: 38567920 NR Description: OSJNBa0088I22.16 [Oryza sativa (japonica
MIADRRSSGCARDDMLDALLSGNEGTRAKLSDDQIIDLLITLIYSGYETVSTTSMMAVKYLSDNPKALGQIRKEHLDIRKAKSPEDPLDWNDYKSMTFTKAVIYETLRLATVVNGLLRKTTHDVEMNGYVIPKGWRIYVYTREINYDPFLYPEPMVFNPWRWMETNLESHPHFMLFGGGARMCPGKEVGTVEIATFLHYFVTRYRWEEEGNNTISKFPRVAAPNGLHIRVQDY

SEQ ID NO: 13772 - protein, 193 aa, Zea mays subsp. mays
  peptide (1)..(193): Ceres Seq. ID no. 12436192
  misc_feature (1)..(103): Homolog of NCBI NO: 27127269 NR Description: cytochrome P450 [Oryza sativa (japonica
  misc_feature (1)..(83): Homolog of NCBI NO: 18406372 NR Description: cytochrome p450, putative; protein id: supported by cDNA: 11278., supported by cDNA: gi_15450574, by cDNA: gi_17380629 [Arabidopsis thaliana]
  misc_feature (1)..(83): Homolog of NCBI NO: 9294419 NR Description: cytochrome P450 [Arabidopsis thaliana]
  misc_feature (1)..(83): Homolog of NCBI NO: 21536828 NR Description: cytochrome P450 homolog, putative [Arabidopsis
  misc_feature (1)..(103): Homolog of NCBI NO: 5921933 NR Description: Cytochrome P450 85 (Dwarf protein)
  misc_feature (2)..(103): Homolog of NCBI NO: 30693327 NR Description: cytochrome p450, putative [Arabidopsis thaliana]
  misc_feature (2)..(103): Homolog of NCBI NO: 30693331 NR Description: cytochrome p450, putative [Arabidopsis thaliana]
  misc_feature (5)..(84): Homolog of NCBI NO: 9587211 NR Description: cytochrome P450 [Vigna radiata]
  misc_feature (1)..(84): Homolog of NCBI NO: 20520627 NR Description: putative cytochrome P450 [Oryza sativa (japonica
  misc_feature (1)..(84): Homolog of NCBI NO: 38567920 NR Description: OSJNBa0088I22.16 [Oryza sativa (japonica
MALLLLLLAVLGVVLASSLLLRWNELRYSRRRGLPPGTMGWPLFGETTEFLKQGPSFMKQRRLRYGSLFRTHILGCPTVVCMEPGAEPAGAGQRGRRLRPGLPAVHARHPGAQQHRRRARPAPPRHAGRHARAHAATHDPRRAPPQDRRLHARPPPRLGRTPRRHPGDDQGDGFALGLSGRSLASLRAHTPTP

SEQ ID NO: 13773 - DNA, 2082 bp, Zea mays subsp. mays
  misc_feature (1)..(2082): Ceres Seq. ID no. 12436164
  misc_feature: MA Experiment ID: 108527 Result: Down-regulated in Transcription
  misc_feature: MA Experiment 108527 PARAMETER Experiment Name: Zm_5mM_NO_P Parameter: Age (day) Value: 8
  misc_feature: MA Experiment 108527 PARAMETER Experiment Name: Zm_5mM_NO_P Parameter: Organism Value: Zea mays
  misc_feature: MA Experiment 108527 PARAMETER Experiment Name: Zm_5mM_NO_P Parameter: Plant Line Value: 35A19
  misc_feature: MA Experiment 108527 PARAMETER Experiment Name: Zm_5mM_NO_P Parameter: Timepoint (hr) Value: 6
  misc_feature: MA Experiment 108527 PARAMETER Experiment Name: Zm_5mM_NO_P Parameter: Tissue Value: Aerial
  misc_feature: MA Experiment 108527 PARAMETER Experiment Name: Zm_5mM_NO_P Parameter: Treatment Value: 5mM NO vs. No Treatment
  misc_feature: MA Experiment ID: 108535 Result: Up-regulated in Transcription
  misc_feature: MA Experiment 108535 PARAMETER Experiment Name: Zm_Meristem_P Parameter: Age (day) Value: 8
  misc_feature: MA Experiment 108535 PARAMETER Experiment Name: Zm_Meristem_P Parameter: Organism Value: Zea mays
  misc_feature: MA Experiment 108535 PARAMETER Experiment Name: Zm_Meristem_P Parameter: Plant Line Value: 35A19
  misc_feature: MA Experiment 108535 PARAMETER Experiment Name: Zm_Meristem_P Parameter: Tissue Value: Root Meristem vs. Above Root Meristem
aagggaaacttttgaaaagctttttcaaaatttggagcaaggcactgaggcgagcgcgggtggccgccggcagcgaggaaggctactgttaggatcatctcgctacaaaatcgggttcccgagatggaggggaaggcggtagccgtcggttgtggtggcgccggcgtcgatccggcggatgatctcaagtacatctccgggctgagcaccattctcgtggccaccatccaggaagtgaaggaccaggtctcccagatggagttcatcttctgcagccagctcttcccgcacatccaggccaagtcgaagcttgtccaggcgcatctcgccgacacgatgaaggccagtgaggttgagtggaggaagacggaggctggcctggtgaagcagctggaggaggtcagccgtggtaagatgctcgcggaggagagattgctgcaactgggcacctctcttgaggagatgaagaggaagcttgtggattcggagcaattggctgcgaggcatgaggcagagaagaaacagcttctggggaggttggaggatgaaacgaggaaaggtgaggtggtatgtcagctccaaagggagattgaggagaaggacgctgaggtggtcagggagagagaggcacatcagcggctgctgcaggaatttgagcaattggctgcgaggcatgaatctgagaagaaacagcttctggggaggttggaggatgagatggggaatggtgaggtggtacgtcagctccagagggagattgaggagaaggccgctgaggtggtcagggagagagaggcacaccagcggctgcagcagcaggttgacctgaaggataagaatctgcttctggagcagagcaagcggagggacttgattgaggattacactcagctgaagacaaactacaagcatttgaagtctcagtacacctttcttcttgggaagattgaccagcatgaaggctccaagcctcctgaggacattcctgcagatagaagaaacactgaaagtcctccaagtaagaggaagttcaaagatttggagcacacaaacaaggagcgcatccaaatccttcccaacacaagggacctgaagaatgactctgctccaggtgccaaagcccaagctgcccaacacgctagttcagtcaggagtccaatcagaaactcacaccttgctgtgccatctcgcccaatgaatccattggcaaatcattctgccaacaattcaaaactacaagcttcaaccagtgtcgccagcccatgtctaaattggagggagacccgtgcacgcaaagaacaaggtgttgctgatccacacgatgatttccttgatacacctctggaagctgtcaagaataccatcaggaaccctgcaactcccgaagaagcacaggcacttgccgcctctcctcaagttatggatttcgacaattcagatgatgaaacccaagatctgaatattgcaactcaagccctccggcacatccccaatatgccagttcccaagcagcaaaacacaatatcggtacatccaccaaagaaagacatcaaatatagagaatcagtgagaaagaaagctgaccgggagaacctgaaaggtgttgagtgcaagcaatgcaagaagttttatgatgctgttcttcctggtggtcgtgcagatggcgatggtgcaggctctacaagcttacgatgtgagcaccacgatggtgtgtcaaggcatcggtacaggtacgcgccgcctctgacgccggaagggttttggaacattggtttcgaatcagaaatgtagcactacatcaagtagcaggaaaccttcagtgtcctcggtcaccccaagatattgtagcaatgactacgacaagttgcatgtcgctgctcaagttgcggaaatagtcattctgtgattaaggttgatggtaggcagtagctactgtgaatatgttggagatagaatgcactgtcagctatttacctttttgtggattacatcaagttgatcattttgtagcgaaccacctttaacataccattggaaagcaattcttttttatagaaaggagacatctgaataacagcttac

SEQ ID NO: 13774 - protein, 555 aa, Zea mays subsp. mays
  peptide (1)..(555): Ceres Seq. ID no. 12436165
  misc_feature (30)..(324): Pfam Name: Myosin tail Pfam Description: Myosin tail
  misc_feature (68)..(555): Homolog of NCBI NO: 30693587 NR Description: predicted protein [Arabidopsis thaliana]
  misc_feature (68)..(555): Homolog of NCBI NO: 11357299 NR Description: gamma response I protein [imported] - Arabidopsis >gi|4049403|emb|CAA10484.1| gamma response I protein [Arabidopsis
  misc_feature (68)..(555): Homolog of NCBI NO: 11357298 NR Description: gamma response I protein - Arabidopsis thaliana
  misc_feature (20)..(282): Homolog of NCBI NO: 30693587 NR Description: predicted protein [Arabidopsis thaliana]
  misc_feature (20)..(282): Homolog of NCBI NO: 11357298 NR Description: gamma response I protein - Arabidopsis thaliana
  misc_feature (20)..(282): Homolog of NCBI NO: 11357299 NR Description: gamma response I protein [imported] - Arabidopsis >gi|4049403|emb|CAA10484.1| gamma response I protein [Arabidopsis
  misc_feature (73)..(460): Homolog of NCBI NO: 437639 NR Description: [Plasmodium falciparum 3' end.], gene product
  misc_feature (73)..(460): Homolog of NCBI NO: 23619293 NR Description: reticulocyte binding protein 2 homolog a falciparum 3D7] >gi|23615500|emb|CAD52492.1| reticulocyte binding
  misc_feature (73)..(460): Homolog of NCBI NO: 13345187 NR Description: reticulocyte binding protein 2 homolog A
  misc_feature (65)..(308): Homolog of NCBI NO: 34785442 NR Description: Unknown (protein for IMAGE:5605410) [Danio rerio]
MEGKAVAVGCGGAGVDPADDLKYISGLSTILVATIQEVKDQVSQMEFIFCSQLFPHIQAKSKLVQAHLADTMKASEVEWRKTEAGLVKQLEEVSRGKMLAEERLLQLGTSLEEMKRKLVDSEQLAARHEAEKKQLLGRLEDETRKGEVVCQLQREIEEKDAEVVREREAHQRLLQEFEQLAARHESEKKQLLGRLEDEMGNGEVVRQLQREIEEKAAEVVREREAHQRLQQQVDLKDKNLLLEQSKRRDLIEDYTQLKTNYKHLKSQYTFLLGKIDQHEGSKPPEDIPADRRNTESPPSKRKFKDLEHTNKERIQILPNTRDLKNDSAPGAKAQAAQHASSVRSPIRNSHLAVPSRPMNPLANHSANNSKLQASTSVASPCLNWRETRARKEQGVADPHDDFLDTPLEAVKNTIRNPATPEEAQALAASPQVMDFDNSDDETQDLNIATQALRHIPNMPVPKQQNTISVHPPKKDIKYRESVRKKADRENLKGVECKQCKKFYDAVLPGGRADGDGAGSTSLRCEHHDGVSRHRYRYAPPLTPEGFWNIGFESEM

SEQ ID NO: 13775 - protein, 511 aa, Zea mays subsp. mays
  peptide (1)..(511): Ceres Seq. ID no. 12436166
  misc_feature (1)..(280): Pfam Name: Myosin tail Pfam Description: Myosin tail
  misc_feature (24)..(511): Homolog of NCBI NO: 30693587 NR Description: predicted protein [Arabidopsis thaliana]
  misc_feature (24)..(511): Homolog of NCBI NO: 11357299 NR Description: gamma response I protein [imported] - Arabidopsis >gi|4049403|emb|CAA10484.1| gamma response I protein [Arabidopsis
  misc_feature (24)..(511): Homolog of NCBI NO: 11357298 NR Description: gamma response I protein - Arabidopsis thaliana
  misc_feature (1)..(238): Homolog of NCBI NO: 30693587 NR Description: predicted protein [Arabidopsis thaliana]
  misc_feature (1)..(238): Homolog of NCBI NO: 11357298 NR Description: gamma response I protein - Arabidopsis thaliana
  misc_feature (1)..(238): Homolog of NCBI NO: 11357299 NR Description: gamma response I protein [imported] - Arabidopsis >gi|4049403|emb|CAA10484.1| gamma response I protein [Arabidopsis
  misc_feature (29)..(416): Homolog of NCBI NO: 437639 NR Description: [Plasmodium falciparum 3' end.], gene product
  misc_feature (29)..(416): Homolog of NCBI NO: 23619293 NR Description: reticulocyte binding protein 2 homolog a falciparum 3D7] >gi|23615500|emb|CAD52492.1| reticulocyte binding
  misc_feature (29)..(416): Homolog of NCBI NO: 13345187 NR Description: reticulocyte binding protein 2 homolog A
  misc_feature (21)..(264): Homolog of NCBI NO: 34785442 NR Description: Unknown (protein for IMAGE:5605410) [Danio rerio]
MEFIFCSQLFPHIQAKSKLVQAHLADTMKASEVEWRKTEAGLVKQLEEVSRGKMLAEERLLQLGTSLEEMKRKLVDSEQLAARHEAEKKQLLGRLEDETRKGEVVCQLQREIEEKDAEVVREREAHQRLLQEFEQLAARHESEKKQLLGRLEDEMGNGEVVRQLQREIEEKAAEVVREREAHQRLQQQVDLKDKNLLLEQSKRRDLIEDYTQLKTNYKHLKSQYTFLLGKIDQHEGSKPPEDIPADRRNTESPPSKRKFKDLEHTNKERIQILPNTRDLKNDSAPGAKAQAAQHASSVRSPIRNSHLAVPSRPMNPLANHSANNSKLQASTSVASPCLNWRETRARKEQGVADPHDDFLDTPLEAVKNTIRNPATPEEAQALAASPQVMDFDNSDDETQDLNIATQALRHIPNMPVPKQQNTISVHPPKKDIKYRESVRKKADRENLKGVECKQCKKFYDAVLPGGRADGDGAGSTSLRCEHHDGVSRHRYRYAPPLTPEGFWNIGFESEM

SEQ ID NO: 13776 - protein, 484 aa, Zea mays subsp. mays
  peptide (1)..(484): Ceres Seq. ID no. 12436167
  misc_feature (1)..(253): Pfam Name: Myosin tail Pfam Description: Myosin tail
  misc_feature (1)..(484): Homolog of NCBI NO: 30693587 NR Description: predicted protein [Arabidopsis thaliana]
  misc_feature (1)..(484): Homolog of NCBI NO: 11357299 NR Description: gamma response I protein [imported] - Arabidopsis >gi|4049403|emb|CAA10484.1| gamma response I protein [Arabidopsis
  misc_feature (1)..(484): Homolog of NCBI NO: 11357298 NR Description: gamma response I protein - Arabidopsis thaliana
  misc_feature (1)..(211): Homolog of NCBI NO: 30693587 NR Description: predicted protein [Arabidopsis thaliana]
  misc_feature (1)..(211): Homolog of NCBI NO: 11357298 NR Description: gamma response I protein - Arabidopsis thaliana
  misc_feature (1)..(211): Homolog of NCBI NO: 11357299 NR Description: gamma response I protein [imported] - Arabidopsis >gi|4049403|emb|CAA10484.1| gamma response I protein [Arabidopsis
  misc_feature (2)..(389): Homolog of NCBI NO: 437639 NR Description: [Plasmodium falciparum 3' end.], gene product
  misc_feature (2)..(389): Homolog of NCBI NO: 23619293 NR Description: reticulocyte binding protein 2 homolog a falciparum 3D7] >gi|23615500|emb|CAD52492.1| reticulocyte binding
  misc_feature (2)..(389): Homolog of NCBI NO: 13345187 NR Description: reticulocyte binding protein 2 homolog A
  misc_feature (1)..(237): Homolog of NCBI NO: 34785442 NR Description: Unknown (protein for IMAGE:5605410) [Danio rerio]
MKASEVEWRKTEAGLVKQLEEVSRGKMLAEERLLQLGTSLEEMKRKLVDSEQLAARHEAEKKQLLGRLEDETRKGEVVCQLQREIEEKDAEVVREREAHQRLLQEFEQLAARHESEKKQLLGRLEDEMGNGEVVRQLQREIEEKAAEVVREREAHQRLQQQVDLKDKNLLLEQSKRRDLIEDYTQLKTNYKHLKSQYTFLLGKIDQHEGSKPPEDIPADRRNTESPPSKRKFKDLEHTNKERIQILPNTRDLKNDSAPGAKAQAAQHASSVRSPIRNSHLAVPSRPMNPLANHSANNSKLQASTSVASPCLNWRETRARKEQGVADPHDDFLDTPLEAVKNTIRNPATPEEAQALAASPQVMDFDNSDDETQDLNIATQALRHIPNMPVPKQQNTISVHPPKKDIKYRESVRKKADRENLKGVECKQCKKFYDAVLPGGRADGDGAGSTSLRCEHHDGVSRHRYRYAPPLTPEGFWNIGFESEM

SEQ ID NO: 13777 - DNA, 2211 bp, Zea mays subsp. mays
  misc_feature (1)..(2211): Ceres Seq. ID no. 12550712
  misc_feature: MA Experiment ID: 108535 Result: Up-regulated in Transcription
  misc_feature: MA Experiment 108535 PARAMETER Experiment Name: Zm_Meristem_P Parameter: Age (day) Value: 8
  misc_feature: MA Experiment 108535 PARAMETER Experiment Name: Zm_Meristem_P Parameter: Organism Value: Zea mays
  misc_feature: MA Experiment 108535 PARAMETER Experiment Name: Zm_Meristem_P Parameter: Plant Line Value: 35A19
  misc_feature: MA Experiment 108535 PARAMETER Experiment Name: Zm_Meristem_P Parameter: Tissue Value: Root Meristem vs. Above Root Meristem
  misc_feature: MA Experiment ID: 108544 Result: Down-regulated in Transcription
  misc_feature: MA Experiment ID: 20000487 Result: Up-regulated in Transcription
  misc_feature: MA Experiment 20000487 PARAMETER Experiment Name: Zm_50mM_NH4NO3_L_to_H_P Parameter: Organism Value: Zea mays
  misc_feature: MA Experiment 20000487 PARAMETER Experiment Name: Zm_50mM_NH4NO3_L_to_H_P Parameter: Timepoint (hr) Value: 4
  misc_feature: MA Experiment 20000487 PARAMETER Experiment Name: Zm_50mM_NH4NO3_L_to_H_P Parameter: Tissue Value: Leaves
  misc_feature: MA Experiment 20000487 PARAMETER Experiment Name: Zm_50mM_NH4NO3_L_to_H_P Parameter: Treatment Value: 50mM NH4NO3 vs. 100mM Mannitol
  misc_feature: MA Experiment ID: 20000535 Result: Up-regulated in Transcription
  misc_feature: MA Experiment 20000535 PARAMETER Experiment Name: Zm_Hybrid_Seed_Dev_P Parameter: DAP Value: 30 vs. 12
  misc_feature: MA Experiment 20000535 PARAMETER Experiment Name: Zm_Hybrid_Seed_Dev_P Parameter: Organism Value: Zea mays
  misc_feature: MA Experiment 20000535 PARAMETER Experiment Name: Zm_Hybrid_Seed_Dev_P Parameter: Plant Line Value: 35A19
  misc_feature: MA Experiment 20000535 PARAMETER Experiment Name: Zm_Hybrid_Seed_Dev_P Parameter: Tissue Value: Embryo vs. Unfert Floret
acacacaaaccgccgccgccgctaccttcaccactgcggactgcaccagctgcccgccgactactccgtttctcttcctagtacattgccgcgtcgaaggcgaggtcctcagcagcgccggcggactccgctcgcacgccatactcagcctactccgtcttcccctgtctagcagacaccctcttcccctctccactcccaatcttatcgtcgcctccctcgacgtcgctgctgcctccacttcaccatggcgcttcacgccccggtcctcgttctgaaggactcgctgaagcgggagtctggcgcgaaggttcaccaagccaacatccaggcggccaaggctgtcgctgacatcatacgcactacattgggtcccagatccatgctgaaaatgcttctggatgctagtggaggtattgtggttactaatgatggtaatgccattttgagggaaatagacattgcacaccctgctgccaagtctatgatcgaactaagtcgtacacaggatgaagaagttggtgatggcactacatctgtcattgttctagctggagagatgctacatgttgcacaggcattcatcgacaagaactaccatccaactgttatttgccgagcatataccaaagcgcttgatgatgctattgctgtacttgacaaaattgcaatggctgttgatgtgaatgatcgtggggcaatgctaggccttgtgaagagctccattggtacgaaattcactggccagtttggtgaccttattgctgaccttgctattgatgctactacaacagcaggtgttgaccttggtcagggtatgcgtgaagttgatatcaagaaatacattaaagttgaaaaggttcctggtggtcagttggaggattctagagtccttaaaggagttatgatcaataaggatgtcgtggctcctgggaaaatgaggagaaagatagtaaacccccgtatcatcctgttggactgccctgttgagtataagaaaggagaaaatcagaccaacgctgagttgatgaaggaagaagattggcaggttctgttagagatggaggaagaatacataaagaacctgtgcggtcaaattctaaaattcaagcctgatttagtcataactganaaagggctcagtgatctcgctatccattatttgagcaaggctggggttagtgcaatccgtagacttaggaaaactgacaacaacaggattgctaaagcttgtggagcagttatagtgaacaggcctgaggagctccaagaatctgatgttggaacaagagctggcctgttcgaggttaagaagataggtgatgagttcttttcctttattgttgactgtaaagatcccaaggcatgtactgttctgttgaggggagcaagcaaggatgtattgaatgaagttgagagaaacctgcaggatgccatgtccgttgcaaggaacattttgaaaaatccaaaactccttcctggaggtggcgctacagagctgactgtatcagcaacactgaagcaaaagagttcttcagttgaaggtgtggaaaagtggccctatgaagctgctgctctagcatttgaggcaattccaaggactttggcccaaaattgcggtttgaatgttattaggataatgacacaacttcaaggaaagcatgctaatggtgaaaatgcgtgggttggcattgatggaaggactggtgatattgtcgatatgaaagagcgaaagatctgggattcctacagtgttaaagcacaaacgttcaagacagcaattgaggctgcttgcatgcttttgagaatcgatgacattgtcagcggtatcaagaagaagcaggctcctggagcctcagctcccaaagcaaccccaaattgaaactgagggcgatgctgacaatgagcagatgattccagagtagaggctgtggcgaacctgcactggcaaagttatttactagtgtcaaggtagcacttcgagcagagttcattttggtggttagccttagcttaaagatgcaccttgttttatatagtttgatgagtggtacgagggttttgggatccaggttttgagtgtggttgctgctcgttttgatttggactgatgaaaaagcagtgaaactagcctttatttatggctaactttgcctgttgtatgccgcaaatctactttttttcttggcaacgtctcgtttcgcacgatcc

SEQ ID NO: 13778 - protein, 544 aa, Zea mays subsp. mays
  peptide (1)..(544): Ceres Seq. ID no. 12550713
  misc_feature (33)..(173): Pfam Name: TCP-1/cpn60 chaperonin family Pfam Description: TCP-1/cpn60 chaperonin family
  misc_feature (3)..(542): Homolog of NCBI NO: 15240317 NR Description: chaperonin gamma chain - like protein; protein At5g26360.1 [Arabidopsis thaliana] >gi|27754225|gb|AAO22566.1|
  misc_feature (152)..(542): Homolog of NCBI NO: 7441904 NR Description: probable chaperonin-containing TCP-1 complex
  misc_feature (31)..(173): Homolog of NCBI NO: 7441904 NR Description: probable chaperonin-containing TCP-1 complex
  misc_feature (3)..(538): Homolog of NCBI NO: 28881229 NR Description: probable chaperonin of the TCP1 ring complex
  misc_feature (4)..(539): Homolog of NCBI NO: 631730 NR Description: matricin - mouse >gi|347839|gb|AAA19749.1|
  misc_feature (4)..(531): Homolog of NCBI NO: 40018616 NR Description: chaperonin containing TCP1, subunit 3 (gamma) norvegicus] >gi|38969850|gb|AAH63178.1| Chaperonin containing
  misc_feature (3)..(543): Homolog of NCBI NO: 17066724 NR Description: CCT chaperonin gamma subunit [Physarum
  misc_feature (4)..(531): Homolog of NCBI NO: 6753320 NR Description: chaperonin subunit 3 (gamma) [Mus musculus]
  misc_feature (6)..(543): Homolog of NCBI NO: 1079280 NR Description: chaperonin containing TCP-1 complex gamma chain -
  misc_feature (6)..(543): Homolog of NCBI NO: 39850250 NR Description: Unknown (protein for MGC:76259) [Silurana
  misc_feature (295)..(295): Xaa is any aa, unknown or other
MALHAPVLVLKDSLKRESGAKVHQANIQAAKAVADIIRTTLGPRSMLKMLLDASGGIVVTNDGNAILREIDIAHPAAKSMIELSRTQDEEVGDGTTSVIVLAGEMLHVAQAFIDKNYHPTVICRAYTKALDDAIAVLDKIAMAVDVNDRGAMLGLVKSSIGTKFTGQFGDLIADLAIDATTTAGVDLGQGMREVDIKKYIKVEKVPGGQLEDSRVLKGVMINKDVVAPGKMRRKIVNPRIILLDCPVEYKKGENQTNAELMKEEDWQVLLEMEEEYIKNLCGQILKFKPDLVITXKGLSDLAIHYLSKAGVSAIRRLRKTDNNRIAKACGAVIVNRPEELQESDVGTRAGLFEVKKIGDEFFSFIVDCKDPKACTVLLRGASKDVLNEVERNLQDAMSVARNILKNPKLLPGGGATELTVSATLKQKSSSVEGVEKWPYEAAALAFEAIPRTLAQNCGLNVIRIMTQLQGKHANGENAWVGIDGRTGDIVDMKERKIWDSYSVKAQTFKTAIEAACMLLRIDDIVSGIKKKQAPGASAPKATPN

SEQ ID NO: 13779 - protein, 499 aa, Zea mays subsp. mays
  peptide (1)..(499): Ceres Seq. ID no. 12550714
  misc_feature (1)..(128): Pfam Name: TCP-1/cpn60 chaperonin family Pfam Description: TCP-1/cpn60 chaperonin family
  misc_feature (1)..(497): Homolog of NCBI NO: 15240317 NR Description: chaperonin gamma chain - like protein; protein At5g26360.1 [Arabidopsis thaliana] >gi|27754225|gb|AAO22566.1|
  misc_feature (107)..(497): Homolog of NCBI NO: 7441904 NR Description: probable chaperonin-containing TCP-1 complex
  misc_feature (1)..(128): Homolog of NCBI NO: 7441904 NR Description: probable chaperonin-containing TCP-1 complex
  misc_feature (1)..(493): Homolog of NCBI NO: 28881229 NR Description: probable chaperonin of the TCP1 ring complex
  misc_feature (1)..(494): Homolog of NCBI NO: 631730 NR Description: matricin - mouse >gi|347839|gb|AAA19749.1|
  misc_feature (1)..(486): Homolog of NCBI NO: 40018616 NR Description: chaperonin containing TCP1, subunit 3 (gamma) norvegicus] >gi|38969850|gb|AAH63178.1| Chaperonin containing
  misc_feature (1)..(498): Homolog of NCBI NO: 17066724 NR Description: CCT chaperonin gamma subunit [Physarum
  misc_feature (1)..(486): Homolog of NCBI NO: 6753320 NR Description: chaperonin subunit 3 (gamma) [Mus musculus]
  misc_feature (1)..(498): Homolog of NCBI NO: 1079280 NR Description: chaperonin containing TCP-1 complex gamma chain -
  misc_feature (1)..(498): Homolog of NCBI NO: 39850250 NR Description: Unknown (protein for MGC:76259) [Silurana
  misc_feature (250)..(250): Xaa is any aa, unknown or other
MLKMLLDASGGIVVTNDGNAILREIDIAHPAAKSMIELSRTQDEEVGDGTTSVIVLAGEMLHVAQAFIDKNYHPTVICRAYTKALDDAIAVLDKIAMAVDVNDRGAMLGLVKSSIGTKFTGQFGDLIADLAIDATTTAGVDLGQGMREVDIKKYIKVEKVPGGQLEDSRVLKGVMINKDVVAPGKMRRKIVNPRIILLDCPVEYKKGENQTNAELMKEEDWQVLLEMEEEYIKNLCGQILKFKPDLVITXKGLSDLAIHYLSKAGVSAIRRLRKTDNNRIAKACGAVIVNRPEELQESDVGTRAGLFEVKKIGDEFFSFIVDCKDPKACTVLLRGASKDVLNEVERNLQDAMSVARNILKNPKLLPGGGATELTVSATLKQKSSSVEGVEKWPYEAAALAFEAIPRTLAQNCGLNVIRIMTQLQGKHANGENAWVGIDGRTGDIVDMKERKIWDSYSVKAQTFKTAIEAACMLLRIDDIVSGIKKKQAPGASAPKATPN

SEQ ID NO: 13780 - protein, 496 aa, Zea mays subsp. mays
  peptide (1)..(496): Ceres Seq. ID no. 12550715
  misc_feature (1)..(125): Pfam Name: TCP-1/cpn60 chaperonin family Pfam Description: TCP-1/cpn60 chaperonin family
  misc_feature (1)..(494): Homolog of NCBI NO: 15240317 NR Description: chaperonin gamma chain - like protein; protein At5g26360.1 [Arabidopsis thaliana] >gi|27754225|gb|AAO22566.1|
  misc_feature (104)..(494): Homolog of NCBI NO: 7441904 NR Description: probable chaperonin-containing TCP-1 complex
  misc_feature (1)..(125): Homolog of NCBI NO: 7441904 NR Description: probable chaperonin-containing TCP-1 complex
  misc_feature (1)..(490): Homolog of NCBI NO: 28881229 NR Description: probable chaperonin of the TCP1 ring complex
  misc_feature (1)..(491): Homolog of NCBI NO: 631730 NR Description: matricin - mouse >gi|347839|gb|AAA19749.1|
  misc_feature (1)..(483): Homolog of NCBI NO: 40018616 NR Description: chaperonin containing TCP1, subunit 3 (gamma) norvegicus] >gi|38969850|gb|AAH63178.1| Chaperonin containing
  misc_feature (1)..(495): Homolog of NCBI NO: 17066724 NR Description: CCT chaperonin gamma subunit [Physarum
  misc_feature (1)..(483): Homolog of NCBI NO: 6753320 NR Description: chaperonin subunit 3 (gamma) [Mus musculus]
  misc_feature (1)..(495): Homolog of NCBI NO: 1079280 NR Description: chaperonin containing TCP-1 complex gamma chain -
  misc_feature (1)..(495): Homolog of NCBI NO: 39850250 NR Description: Unknown (protein for MGC:76259) [Silurana
  misc_feature (247)..(247): Xaa is any aa, unknown or other
MLLDASGGIVVTNDGNAILREIDIAHPAAKSMIELSRTQDEEVGDGTTSVIVLAGEMLHVAQAFIDKNYHPTVICRAYTKALDDAIAVLDKIAMAVDVNDRGAMLGLVKSSIGTKFTGQFGDLIADLAIDATTTAGVDLGQGMREVDIKKYIKVEKVPGGQLEDSRVLKGVMINKDVVAPGKMRRKIVNPRIILLDCPVEYKKGENQTNAELMKEEDWQVLLEMEEEYIKNLCGQILKFKPDLVITXKGLSDLAIHYLSKAGVSAIRRLRKTDNNRIAKACGAVIVNRPEELQESDVGTRAGLFEVKKIGDEFFSFIVDCKDPKACTVLLRGASKDVLNEVERNLQDAMSVARNILKNPKLLPGGGATELTVSATLKQKSSSVEGVEKWPYEAAALAFEAIPRTLAQNCGLNVIRIMTQLQGKHANGENAWVGIDGRTGDIVDMKERKIWDSYSVKAQTFKTAIEAACMLLRIDDIVSGIKKKQAPGASAPKATPN

SEQ ID NO: 13781 - DNA, 1079 bp, Zea mays subsp. mays; identical to SEQ ID NO: 7842
  misc_feature (1)..(1079): Ceres Seq. ID no. 12402905
  misc_feature: MA Experiment ID: 108523 Result: Down-regulated in Transcription
  misc_feature: MA Experiment 108523 PARAMETER Experiment Name: Zm_42deg_Heat_P Parameter: Age (day) Value: 8
  misc_feature: MA Experiment 108523 PARAMETER Experiment Name: Zm_42deg_Heat_P Parameter: Organism Value: Zea mays
  misc_feature: MA Experiment 108523 PARAMETER Experiment Name: Zm_42deg_Heat_P Parameter: Plant Line Value: 35A19
  misc_feature: MA Experiment 108523 PARAMETER Experiment Name: Zm_42deg_Heat_P Parameter: Temperature (deg C) Value: 42 vs. 22
  misc_feature: MA Experiment 108523 PARAMETER Experiment Name: Zm_42deg_Heat_P Parameter: Timepoint (hr) Value: 6
  misc_feature: MA Experiment 108523 PARAMETER Experiment Name: Zm_42deg_Heat_P Parameter: Tissue Value: Aerial
  misc_feature: MA Experiment ID: 108527 Result: Down-regulated in Transcription
  misc_feature: MA Experiment 108527 PARAMETER Experiment Name: Zm_5mM_NO_P Parameter: Age (day) Value: 8
  misc_feature: MA Experiment 108527 PARAMETER Experiment Name: Zm_5mM_NO_P Parameter: Organism Value: Zea mays
  misc_feature: MA Experiment 108527 PARAMETER Experiment Name: Zm_5mM_NO_P Parameter: Plant Line Value: 35A19
  misc_feature: MA Experiment 108527 PARAMETER Experiment Name: Zm_5mM_NO_P Parameter: Timepoint (hr) Value: 6
  misc_feature: MA Experiment 108527 PARAMETER Experiment Name: Zm_5mM_NO_P Parameter: Tissue Value: Aerial
  misc_feature: MA Experiment 108527 PARAMETER Experiment Name: Zm_5mM_NO_P Parameter: Treatment Value: 5mM NO vs. No Treatment
  misc_feature: MA Experiment ID: 108530 Result: Up-regulated in Transcription
  misc_feature: MA Experiment 108530 PARAMETER Experiment Name: Zm_Imbibed_Seeds_P Parameter: Age (day) Value: 6 vs. 2
  misc_feature: MA Experiment 108530 PARAMETER Experiment Name: Zm_Imbibed_Seeds_P Parameter: Organism Value: Zea mays
  misc_feature: MA Experiment 108530 PARAMETER Experiment Name: Zm_Imbibed_Seeds_P Parameter: Plant Line Value: 35A19
  misc_feature: MA Experiment 108530 PARAMETER Experiment Name: Zm_Imbibed_Seeds_P Parameter: Tissue Value: Aerial vs. Embryo
  misc_feature: MA Experiment ID: 108534 Result: Down-regulated in Transcription
  misc_feature: MA Experiment 108534 PARAMETER Experiment Name: Zm_4deg_Cold_P Parameter: Age (hr) Value: 8
  misc_feature: MA Experiment 108534 PARAMETER Experiment Name: Zm_4deg_Cold_P Parameter: Organism Value: Zea mays
  misc_feature: MA Experiment 108534 PARAMETER Experiment Name: Zm_4deg_Cold_P Parameter: Plant Line Value: 35A19
  misc_feature: MA Experiment 108534 PARAMETER Experiment Name: Zm_4deg_Cold_P Parameter: Temperature (deg C) Value: 4 vs. 22
  misc_feature: MA Experiment 108534 PARAMETER Experiment Name: Zm_4deg_Cold_P Parameter: Timepoint (hr) Value: 6
  misc_feature: MA Experiment 108534 PARAMETER Experiment Name: Zm_4deg_Cold_P Parameter: Tissue Value: Aerial
  misc_feature: MA Experiment ID: 108543 Result: Down-regulated in Transcription
  misc_feature: MA Experiment ID: 108687 Result: Up-regulated in Transcription
  misc_feature: MA Experiment 108687 PARAMETER Experiment Name: Zm_Embryos-Flowers__P Parameter: Tissue Value: Embryo vs. Aerial+
  misc_feature: MA Experiment ID: 108688 Result: Down-regulated in Transcription
  misc_feature: MA Experiment 108688 PARAMETER Experiment Name: Zm_Embryos-Flowers__P Parameter: Tissue Value: Immature Flowers vs. Aerial+
  misc_feature: MA Experiment ID: 20000535 Result: Up-regulated in Transcription
  misc_feature: MA Experiment 20000535 PARAMETER Experiment Name: Zm_Hybrid_Seed_Dev_P Parameter: DAP Value: 30 vs. 12
  misc_feature: MA Experiment 20000535 PARAMETER Experiment Name: Zm_Hybrid_Seed_Dev_P Parameter: Organism Value: Zea mays
  misc_feature: MA Experiment 20000535 PARAMETER Experiment Name: Zm_Hybrid_Seed_Dev_P Parameter: Plant Line Value: 35A19
  misc_feature: MA Experiment 20000535 PARAMETER Experiment Name: Zm_Hybrid_Seed_Dev_P Parameter: Tissue Value: Embryo vs. Unfert Floret

SEQ ID NO: 13782 - protein, 295 aa, Zea mays subsp. mays; identical to SEQ ID NO: 7843
  peptide (1)..(295): Ceres Seq. ID no. 12402906
  misc_feature (8)..(295): Pfam Name: Acetamidase/Formamidase family Pfam Description: Acetamidase/Formamidase family
  misc_feature (8)..(295): Pfam Name: Acetamidase/Formamidase family Pfam Description: Acetamidase/Formamidase family
  misc_feature (1)..(294): Homolog of NCBI NO: 32421387 NR Description: hypothetical protein [Neurospora crassa]
  misc_feature (1)..(295): Homolog of NCBI NO: 34909818 NR Description: putative formamidase [Oryza sativa (japonica group)] >gi|15289900|dbj|BAB63595.1| putative formamidase [Oryza
  misc_feature (1)..(295): Homolog of NCBI NO: 18420071 NR Description: formamidase - like protein; protein id: supported by cDNA: gi_14334653 [Arabidopsis thaliana]
  misc_feature (1)..(295): Homolog of NCBI NO: 21592429 NR Description: formamidase-like protein [Arabidopsis thaliana]
  misc_feature (210)..(295): Homolog of NCBI NO: 7488106 NR Description: probable formamidase (EC 3.5.1.49) F19F18.40 -
  misc_feature (1)..(295): Homolog of NCBI NO: 14334654 NR Description: putative formamidase [Arabidopsis thaliana]
  misc_feature (1)..(295): Homolog of NCBI NO: 18420069 NR Description: formamidase - like protein; protein id:
  misc_feature (7)..(295): Homolog of NCBI NO: 3913682 NR Description: Formamidase (Formamide amidohydrolase)
  misc_feature (1)..(294): Homolog of NCBI NO: 32421387 NR Description: hypothetical protein [Neurospora crassa]
  misc_feature (4)..(295): Homolog of NCBI NO: 19115927 NR Description: formamidase-like protein [Schizosaccharomyces
  misc_feature (210)..(295): Homolog of NCBI NO: 7488106 NR Description: probable formamidase (EC 3.5.1.49) F19F18.40 -
  misc_feature (1)..(202): Homolog of NCBI NO: 7488106 NR Description: probable formamidase (EC 3.5.1.49) F19F18.40 -
  misc_feature (1)..(295): Homolog of NCBI NO: 21592429 NR Description: formamidase-like protein [Arabidopsis thaliana]
  misc_feature (1)..(295): Homolog of NCBI NO: 18420071 NR Description: formamidase - like protein; protein id: supported by cDNA: gi_14334653 [Arabidopsis thaliana]
  misc_feature (1)..(295): Homolog of NCBI NO: 34909818 NR Description: putative formamidase [Oryza sativa (japonica group)] >gi|15289900|dbj|BAB63595.1| putative formamidase [Oryza
  misc_feature (4)..(295): Homolog of NCBI NO: 19115927 NR Description: formamidase-like protein [Schizosaccharomyces
  misc_feature (1)..(202): Homolog of NCBI NO: 7488106 NR Description: probable formamidase (EC 3.5.1.49) F19F18.40 -
  misc_feature (1)..(295): Homolog of NCBI NO: 18420069 NR Description: formamidase - like protein; protein id:
  misc_feature (1)..(295): Homolog of NCBI NO: 14334654 NR Description: putative formamidase [Arabidopsis thaliana]
  misc_feature (7)..(295): Homolog of NCBI NO: 3913682 NR Description: Formamidase (Formamide amidohydrolase)

SEQ ID NO: 13783 - protein, 247 aa, Zea mays subsp. mays; identical to SEQ ID NO: 7844
  peptide (1)..(247): Ceres Seq. ID no. 12402907
  misc_feature (1)..(247): Pfam Name: Acetamidase/Formamidase family Pfam Description: Acetamidase/Formamidase family
  misc_feature (1)..(247): Pfam Name: Acetamidase/Formamidase family Pfam Description: Acetamidase/Formamidase family
  misc_feature (1)..(247): Homolog of NCBI NO: 34909818 NR Description: putative formamidase [Oryza sativa (japonica group)] >gi|15289900|dbj|BAB63595.1| putative formamidase [Oryza
  misc_feature (1)..(247): Homolog of NCBI NO: 14334654 NR Description: putative formamidase [Arabidopsis thaliana]
  misc_feature (1)..(247): Homolog of NCBI NO: 18420071 NR Description: formamidase - like protein; protein id: supported by cDNA: gi_14334653 [Arabidopsis thaliana]
  misc_feature (1)..(247): Homolog of NCBI NO: 18420069 NR Description: formamidase - like protein; protein id:
  misc_feature (1)..(247): Homolog of NCBI NO: 21592429 NR Description: formamidase-like protein [Arabidopsis thaliana]
  misc_feature (1)..(247): Homolog of NCBI NO: 14334654 NR Description: putative formamidase [Arabidopsis thaliana]
  misc_feature (1)..(247): Homolog of NCBI NO: 18420069 NR Description: formamidase - like protein; protein id:
  misc_feature (1)..(247): Homolog of NCBI NO: 3913682 NR Description: Formamidase (Formamide amidohydrolase)
  misc_feature (1)..(246): Homolog of NCBI NO: 32421387 NR Description: hypothetical protein [Neurospora crassa]
  misc_feature (1)..(247): Homolog of NCBI NO: 19115927 NR Description: formamidase-like protein [Schizosaccharomyces
  misc_feature (162)..(247): Homolog of NCBI NO: 7488106 NR Description: probable formamidase (EC 3.5.1.49) F19F18.40 -
  misc_feature (1)..(154): Homolog of NCBI NO: 7488106 NR Description: probable formamidase (EC 3.5.1.49) F19F18.40 -
  misc_feature (1)..(247): Homolog of NCBI NO: 21592429 NR Description: formamidase-like protein [Arabidopsis thaliana]
  misc_feature (1)..(247): Homolog of NCBI NO: 18420071 NR Description: formamidase - like protein; protein id: supported by cDNA: gi_14334653 [Arabidopsis thaliana]
  misc_feature (1)..(247): Homolog of NCBI NO: 34909818 NR Description: putative formamidase [Oryza sativa (japonica group)] >gi|15289900|dbj|BAB63595.1| putative formamidase [Oryza
  misc_feature (1)..(154): Homolog of NCBI NO: 7488106 NR Description: probable formamidase (EC 3.5.1.49) F19F18.40 -
  misc_feature (162)..(247): Homolog of NCBI NO: 7488106 NR Description: probable formamidase (EC 3.5.1.49) F19F18.40 -
  misc_feature (1)..(247): Homolog of NCBI NO: 19115927 NR Description: formamidase-like protein [Schizosaccharomyces
  misc_feature (1)..(246): Homolog of NCBI NO: 32421387 NR Description: hypothetical protein [Neurospora crassa]
  misc_feature (1)..(247): Homolog of NCBI NO: 3913682 NR Description: Formamidase (Formamide amidohydrolase)

SEQ ID NO: 13784 - protein, 227 aa, Zea mays subsp. mays; identical to SEQ ID NO: 7845
  peptide (1)..(227): Ceres Seq. ID no. 12402908
  misc_feature (1)..(227): Pfam Name: Acetamidase/Formamidase family Pfam Description: Acetamidase/Formamidase family
  misc_feature (1)..(227): Pfam Name: Acetamidase/Formamidase family Pfam Description: Acetamidase/Formamidase family
  misc_feature (1)..(227): Homolog of NCBI NO: 34909818 NR Description: putative formamidase [Oryza sativa (japonica group)] >gi|15289900|dbj|BAB63595.1| putative formamidase [Oryza
  misc_feature (1)..(227): Homolog of NCBI NO: 14334654 NR Description: putative formamidase [Arabidopsis thaliana]
  misc_feature (1)..(227): Homolog of NCBI NO: 18420071 NR Description: formamidase - like protein; protein id: supported by cDNA: gi_14334653 [Arabidopsis thaliana]
  misc_feature (1)..(227): Homolog of NCBI NO: 18420069 NR Description: formamidase - like protein; protein id:
  misc_feature (1)..(227): Homolog of NCBI NO: 21592429 NR Description: formamidase-like protein [Arabidopsis thaliana]
  misc_feature (1)..(227): Homolog of NCBI NO: 14334654 NR Description: putative formamidase [Arabidopsis thaliana]
  misc_feature (1)..(227): Homolog of NCBI NO: 18420069 NR Description: formamidase - like protein; protein id:
  misc_feature (1)..(227): Homolog of NCBI NO: 3913682 NR Description: Formamidase (Formamide amidohydrolase)
  misc_feature (1)..(226): Homolog of NCBI NO: 32421387 NR Description: hypothetical protein [Neurospora crassa]
  misc_feature (1)..(227): Homolog of NCBI NO: 19115927 NR Description: formamidase-like protein [Schizosaccharomyces
  misc_feature (142)..(227): Homolog of NCBI NO: 7488106 NR Description: probable formamidase (EC 3.5.1.49) F19F18.40 -
  misc_feature (1)..(134): Homolog of NCBI NO: 7488106 NR Description: probable formamidase (EC 3.5.1.49) F19F18.40 -
  misc_feature (1)..(227): Homolog of NCBI NO: 21592429 NR Description: formamidase-like protein [Arabidopsis thaliana]
  misc_feature (1)..(227): Homolog of NCBI NO: 18420071 NR Description: formamidase - like protein; protein id: supported by cDNA: gi_14334653 [Arabidopsis thaliana]
  misc_feature (1)..(227): Homolog of NCBI NO: 34909818 NR Description: putative formamidase [Oryza sativa (japonica group)] >gi|15289900|dbj|BAB63595.1| putative formamidase [Oryza
  misc_feature (1)..(134): Homolog of NCBI NO: 7488106 NR Description: probable formamidase (EC 3.5.1.49) F19F18.40 -
  misc_feature (142)..(227): Homolog of NCBI NO: 7488106 NR Description: probable formamidase (EC 3.5.1.49) F19F18.40 -
  misc_feature (1)..(227): Homolog of NCBI NO: 19115927 NR Description: formamidase-like protein [Schizosaccharomyces
  misc_feature (1)..(226): Homolog of NCBI NO: 32421387 NR Description: hypothetical protein [Neurospora crassa]
  misc_feature (1)..(227): Homolog of NCBI NO: 3913682 NR Description: Formamidase (Formamide amidohydrolase)

SEQ ID NO: 13785 - DNA, 1325 bp, Zea mays subsp. mays
  misc_feature (1)..(1325): Ceres Seq. ID no. 13587551
  misc_feature: MA Experiment ID: 108504 Result: Up-regulated in Transcription
  misc_feature: MA Experiment 108504 PARAMETER Experiment Name: Zm_Drought_P Parameter: Age (day) Value: 8
  misc_feature: MA Experiment 108504 PARAMETER Experiment Name: Zm_Drought_P Parameter: Organism Value: Zea mays
  misc_feature: MA Experiment 108504 PARAMETER Experiment Name: Zm_Drought_P Parameter: Plant Line Value: 35A19
  misc_feature: MA Experiment 108504 PARAMETER Experiment Name: Zm_Drought_P Parameter: Timepoint (hr) Value: 12
  misc_feature: MA Experiment 108504 PARAMETER Experiment Name: Zm_Drought_P Parameter: Tissue Value: Aerial
  misc_feature: MA Experiment 108504 PARAMETER Experiment Name: Zm_Drought_P Parameter: Treatment Value: Drought vs. No Drought
  misc_feature: MA Experiment ID: 108530 Result: Up-regulated in Transcription
  misc_feature: MA Experiment 108530 PARAMETER Experiment Name: Zm_Imbibed_Seeds_P Parameter: Age (day) Value: 6 vs. 2
  misc_feature: MA Experiment 108530 PARAMETER Experiment Name: Zm_Imbibed_Seeds_P Parameter: Organism Value: Zea mays
  misc_feature: MA Experiment 108530 PARAMETER Experiment Name: Zm_Imbibed_Seeds_P Parameter: Plant Line Value: 35A19
  misc_feature: MA Experiment 108530 PARAMETER Experiment Name: Zm_Imbibed_Seeds_P Parameter: Tissue Value: Aerial vs. Embryo
  misc_feature: MA Experiment ID: 108534 Result: Up-regulated in Transcription
  misc_feature: MA Experiment 108534 PARAMETER Experiment Name: Zm_4deg_Cold_P Parameter: Age (hr) Value: 8
  misc_feature: MA Experiment 108534 PARAMETER Experiment Name: Zm_4deg_Cold_P Parameter: Organism Value: Zea mays
  misc_feature: MA Experiment 108534 PARAMETER Experiment Name: Zm_4deg_Cold_P Parameter: Plant Line Value: 35A19
  misc_feature: MA Experiment 108534 PARAMETER Experiment Name: Zm_4deg_Cold_P Parameter: Temperature (deg C) Value: 4 vs. 22
  misc_feature: MA Experiment 108534 PARAMETER Experiment Name: Zm_4deg_Cold_P Parameter: Timepoint (hr) Value: 6
  misc_feature: MA Experiment 108534 PARAMETER Experiment Name: Zm_4deg_Cold_P Parameter: Tissue Value: Aerial
  misc_feature: MA Experiment ID: 108535 Result: Down-regulated in Transcription
  misc_feature: MA Experiment 108535 PARAMETER Experiment Name: Zm_Meristem_P Parameter: Age (day) Value: 8
  misc_feature: MA Experiment 108535 PARAMETER Experiment Name: Zm_Meristem_P Parameter: Organism Value: Zea mays
  misc_feature: MA Experiment 108535 PARAMETER Experiment Name: Zm_Meristem_P Parameter: Plant Line Value: 35A19
  misc_feature: MA Experiment 108535 PARAMETER Experiment Name: Zm_Meristem_P Parameter: Tissue Value: Root Meristem vs. Above Root Meristem
  misc_feature: MA Experiment ID: 108536 Result: Up-regulated in Transcription
  misc_feature: MA Experiment 108536 PARAMETER Experiment Name: Zm_Meristem_P Parameter: Age (day) Value: 8
  misc_feature: MA Experiment 108536 PARAMETER Experiment Name: Zm_Meristem_P Parameter: Organism Value: Zea mays
  misc_feature: MA Experiment 108536 PARAMETER Experiment Name: Zm_Meristem_P Parameter: Plant Line Value: 35A19
  misc_feature: MA Experiment 108536 PARAMETER Experiment Name: Zm_Meristem_P Parameter: Tissue Value: Shoot Meristem vs. Above Shoot Meristem
  misc_feature: MA Experiment ID: 108597 Result: Up-regulated in Transcription
  misc_feature: MA Experiment 108597 PARAMETER Experiment Name: Zm_100uM_ABA_P Parameter: Age (day) Value: 9
  misc_feature: MA Experiment 108597 PARAMETER Experiment Name: Zm_100uM_ABA_P Parameter: Organism Value: Zea mays
  misc_feature: MA Experiment 108597 PARAMETER Experiment Name: Zm_100uM_ABA_P Parameter: Plant Line Value: 35A19
  misc_feature: MA Experiment 108597 PARAMETER Experiment Name: Zm_100uM_ABA_P Parameter: Timepoint (hr) Value: 24
  misc_feature: MA Experiment 108597 PARAMETER Experiment Name: Zm_100uM_ABA_P Parameter: Tissue Value: Aerial
  misc_feature: MA Experiment 108597 PARAMETER Experiment Name: Zm_100uM_ABA_P Parameter: Treatment Value: 100uM ABA vs. No Treatment
  misc_feature: MA Experiment ID: 108689 Result: Up-regulated in Transcription
  misc_feature: MA Experiment 108689 PARAMETER Experiment Name: Zm_Drought_Roots_P Parameter: Age (day) Value: 9
  misc_feature: MA Experiment 108689 PARAMETER Experiment Name: Zm_Drought_Roots_P Parameter: Organism Value: Zea mays
  misc_feature: MA Experiment 108689 PARAMETER Experiment Name: Zm_Drought_Roots_P Parameter: Plant Line Value: 35A19
  misc_feature: MA Experiment 108689 PARAMETER Experiment Name: Zm_Drought_Roots_P Parameter: Timepoint (hr) Value: 24
  misc_feature: MA Experiment 108689 PARAMETER Experiment Name: Zm_Drought_Roots_P Parameter: Tissue Value: Roots
  misc_feature: MA Experiment 108689 PARAMETER Experiment Name: Zm_Drought_Roots_P Parameter: Treatment Value: Drought vs. No Drought
  misc_feature: MA Experiment ID: 20000479 Result: Up-regulated in Transcription
  misc_feature: MA Experiment 20000479 PARAMETER Experiment Name: Zm_Drought_P Parameter: Age (day) Value: 10
  misc_feature: MA Experiment 20000479 PARAMETER Experiment Name: Zm_Drought_P Parameter: Organism Value: Zea mays
  misc_feature: MA Experiment 20000479 PARAMETER Experiment Name: Zm_Drought_P Parameter: Plant Line Value: 35A19
  misc_feature: MA Experiment 20000479 PARAMETER Experiment Name: Zm_Drought_P Parameter: Timepoint (hr) Value: 48
  misc_feature: MA Experiment 20000479 PARAMETER Experiment Name: Zm_Drought_P Parameter: Tissue Value: Aerial
  misc_feature: MA Experiment 20000479 PARAMETER Experiment Name: Zm_Drought_P Parameter: Treatment Value: Drought vs. No Drought
  misc_feature: MA Experiment ID: 20000480 Result: Up-regulated in Transcription
  misc_feature: MA Experiment 20000480 PARAMETER Experiment Name: Zm_Drought_P Parameter: Age (day) Value: 11
  misc_feature: MA Experiment 20000480 PARAMETER Experiment Name: Zm_Drought_P Parameter: Organism Value: Zea mays
  misc_feature: MA Experiment 20000480 PARAMETER Experiment Name: Zm_Drought_P Parameter: Plant Line Value: 35A19
  misc_feature: MA Experiment 20000480 PARAMETER Experiment Name: Zm_Drought_P Parameter: Timepoint (hr) Value: 72
  misc_feature: MA Experiment 20000480 PARAMETER Experiment Name: Zm_Drought_P Parameter: Tissue Value: Aerial
  misc_feature: MA Experiment 20000480 PARAMETER Experiment Name: Zm_Drought_P Parameter: Treatment Value: Drought vs. No Drought
  misc_feature: MA Experiment ID: 20000488 Result: Down-regulated in Transcription
  misc_feature: MA Experiment 20000488 PARAMETER Experiment Name: Zm_50mM_NH4NO3_L_to_H_P Parameter: Organism Value: Zea mays
  misc_feature: MA Experiment 20000488 PARAMETER Experiment Name: Zm_50mM_NH4NO3_L_to_H_P Parameter: Timepoint (hr) Value: 8
  misc_feature: MA Experiment 20000488 PARAMETER Experiment Name: Zm_50mM_NH4NO3_L_to_H_P Parameter: Tissue Value: Leaves
  misc_feature: MA Experiment 20000488 PARAMETER Experiment Name: Zm_50mM_NH4NO3_L_to_H_P Parameter: Treatment Value: 50mM NH4NO3 vs. 100mM Mannitol
  misc_feature: MA Experiment ID: 20000535 Result: Down-regulated in Transcription
  misc_feature: MA Experiment 20000535 PARAMETER Experiment Name: Zm_Hybrid_Seed_Dev_P Parameter: DAP Value: 30 vs. 12
  misc_feature: MA Experiment 20000535 PARAMETER Experiment Name: Zm_Hybrid_Seed_Dev_P Parameter: Organism Value: Zea mays
  misc_feature: MA Experiment 20000535 PARAMETER Experiment Name: Zm_Hybrid_Seed_Dev_P Parameter: Plant Line Value: 35A19
  misc_feature: MA Experiment 20000535 PARAMETER Experiment Name: Zm_Hybrid_Seed_Dev_P Parameter: Tissue Value: Embryo vs. Unfert Floret
  misc_feature: MA Experiment ID: 20000626 Result: Down-regulated in Transcription
  misc_feature: MA Experiment 20000626 PARAMETER Experiment Name: Zm_Herbicide-Treatments_P Parameter: Timepoint (hr) Value: 12
  misc_feature: MA Experiment 20000626 PARAMETER Experiment Name: Zm_Herbicide-Treatments_P Parameter: Tissue Value: Aerial
  misc_feature: MA Experiment 20000626 PARAMETER Experiment Name: Zm_Herbicide-Treatments_P Parameter: Treatment Value: Roundup vs. No Treatment
saacatcctaatcgaaaacatagttgtgttctatatagttcctctcactgctatcgctgctgttacaaccctggaaaacctggaggcgaagctgcccttcctgaagccagtggtggagcaaccagcaatcaagacggtttggaggcctaccttccccagattgcactcattgtgttcctcgcattgctacctactcttcttatgtttctctcgaaacaagaggggatcccttcgcagggccatgcagtcagggcggcatcgggaaagtatttctatttcatcgttttcaacgtcttcctttgctatacgcttggaagcacattgttcaaatctttgacgaccattatcaatcaccctgctgagattgtgaatatgcttgccaagagcctgcctggaagcgcaacgttcttcctcacgtttgtcgcgctgaagttcttggttggctatggccttgagctctctcgcctggttcctctcatcattttccacctgaaaaggaagtacctatgcaagacggaggaagaagtgagagcggcatgggctccagtggatctgggatataacaccaggataccaaatgacatgctcatcgcaacagttgttctgtgctactcagtcattgcgcctttgattattccgttcggtgttgcatactttgccctcggttggcttatagcaagaaatcagatcctgagagtttacgttcctagctacgaaagctacggacgaatgtggccacacatgcacacgaggatcatcgcggctctgatggtttaccagaccaccatgatcggcttcatctccctgaagaagttcgcctacgcgtccgttctcgtgcccctgcttccagccagcataatcttcgcctacgtctgccacatgcgcttctacccggcgttcgccaagactcccctggaggtggtggtgcggcacgacctgaaggagactccgaacatggaggccatctacaccgcgtacataccgccgtgcttgaagcctgataagctcgaagatctggacgctttcgaggacgcccagtcgcgcgccacctccagagtcccgtctatttagctgtgcacatcgttgacttccgcggaagacttgaagaaattctgttcacttgtcattacattcgtgtgggatttctgatggatttcaatgcttccacgttgaaccctctggacttgtttcaggataggaatctgatgtgaagaatgtacatatgctcgatctgtgtgtctgctgagcgtgtgtggatgtggactsctgtaggtaggtagatsctgtggatattggagggttctaagttgtcttcatttccatcc

SEQ ID NO: 13786 - protein, 356 aa, Zea mays subsp. mays
  peptide (1)..(356): Ceres Seq. ID no. 15220816
  misc_feature (47)..(338): Pfam Name: Domain of unknown function DUF221 Pfam Description: Domain of unknown function DUF221
  misc_feature (47)..(356): Homolog of NCBI NO: 34393395 NR Description: putative ERD4 protein [Oryza sativa (japonica
  misc_feature (47)..(348): Homolog of NCBI NO: 18397470 NR Description: ERD4 protein [Arabidopsis thaliana]
  misc_feature (47)..(348): Homolog of NCBI NO: 15375406 NR Description: ERD4 protein [Arabidopsis thaliana]
  misc_feature (129)..(355): Homolog of NCBI NO: 17863981 NR Description: unknown [Davidia involucrata]
  misc_feature (47)..(329): Homolog of NCBI NO: 37537172 NR Description: unknown protein [Oryza sativa (japonica
  misc_feature (47)..(352): Homolog of NCBI NO: 7487651 NR Description: hypothetical protein T4I9.22 - Arabidopsis (fragment) >gi|3924615|gb|AAC79116.1| hypothetical protein
  misc_feature (47)..(352): Homolog of NCBI NO: 15236212 NR Description: ERD4 protein-related [Arabidopsis thaliana]
  misc_feature (47)..(329): Homolog of NCBI NO: 15222569 NR Description: ERD4 protein-related [Arabidopsis thaliana]
  misc_feature (47)..(344): Homolog of NCBI NO: 15234725 NR Description: ERD4 protein-related [Arabidopsis thaliana]
  misc_feature (47)..(332): Homolog of NCBI NO: 15233100 NR Description: ERD4 protein-related [Arabidopsis thaliana] gb|AAD36947.1~gene_id:MIL23.19~strong similarity to unknown
  misc_feature (1)..(1): Xaa is any aa, unknown or other
XHPNRKHSCVLYSSSHCYRCCYNPGKPGGEAALPEASGGATSNQDGLEAYLPQIALIVFLALLPTLLMFLSKQEGIPSQGHAVRAASGKYFYFIVFNVFLCYTLGSTLFKSLTTIINHPAEIVNMLAKSLPGSATFFLTFVALKFLVGYGLELSRLVPLIIFHLKRKYLCKTEEEVRAAWAPVDLGYNTRIPNDMLIATVVLCYSVIAPLIIPFGVAYFALGWLIARNQILRVYVPSYESYGRMWPHMHTRIIAALMVYQTTMIGFISLKKFAYASVLVPLLPASIIFAYVCHMRFYPAFAKTPLEVVVRHDLKETPNMEAIYTAYIPPCLKPDKLEDLDAFEDAQSRATSRVPSI

SEQ ID NO: 13787 - protein, 289 aa, Zea mays subsp. mays
  peptide (1)..(289): Ceres Seq. ID no. 15220817
  misc_feature (1)..(271): Pfam Name: Domain of unknown function DUF221 Pfam Description: Domain of unknown function DUF221
  misc_feature (1)..(289): Homolog of NCBI NO: 34393395 NR Description: putative ERD4 protein [Oryza sativa (japonica
  misc_feature (1)..(281): Homolog of NCBI NO: 18397470 NR Description: ERD4 protein [Arabidopsis thaliana]
  misc_feature (1)..(281): Homolog of NCBI NO: 15375406 NR Description: ERD4 protein [Arabidopsis thaliana]
  misc_feature (62)..(288): Homolog of NCBI NO: 17863981 NR Description: unknown [Davidia involucrata]
  misc_feature (1)..(262): Homolog of NCBI NO: 37537172 NR Description: unknown protein [Oryza sativa (japonica
  misc_feature (1)..(285): Homolog of NCBI NO: 7487651 NR Description: hypothetical protein T4I9.22 - Arabidopsis (fragment) >gi|3924615|gb|AAC79116.1| hypothetical protein
  misc_feature (1)..(285): Homolog of NCBI NO: 15236212 NR Description: ERD4 protein-related [Arabidopsis thaliana]
  misc_feature (1)..(262): Homolog of NCBI NO: 15222569 NR Description: ERD4 protein-related [Arabidopsis thaliana]
  misc_feature (1)..(277): Homolog of NCBI NO: 15234725 NR Description: ERD4 protein-related [Arabidopsis thaliana]
  misc_feature (1)..(265): Homolog of NCBI NO: 15233100 NR Description: ERD4 protein-related [Arabidopsis thaliana] gb|AAD36947.1~gene_id:MIL23.19~strong similarity to unknown
MFLSKQEGIPSQGHAVRAASGKYFYFIVFNVFLCYTLGSTLFKSLTTIINHPAEIVNMLAKSLPGSATFFLTFVALKFLVGYGLELSRLVPLIIFHLKRKYLCKTEEEVRAAWAPVDLGYNTRIPNDMLIATVVLCYSVIAPLIIPFGVAYFALGWLIARNQILRVYVPSYESYGRMWPHMHTRIIAALMVYQTTMIGFISLKKFAYASVLVPLLPASIIFAYVCHMRFYPAFAKTPLEVVVRHDLKETPNMEAIYTAYIPPCLKPDKLEDLDAFEDAQSRATSRVPSI

SEQ ID NO: 13788 - protein, 232 aa, Zea mays subsp. mays
  peptide (1)..(232): Ceres Seq. ID no. 15220818
  misc_feature (1)..(214): Pfam Name: Domain of unknown function DUF221 Pfam Description: Domain of unknown function DUF221
  misc_feature (1)..(232): Homolog of NCBI NO: 34393395 NR Description: putative ERD4 protein [Oryza sativa (japonica
  misc_feature (1)..(224): Homolog of NCBI NO: 18397470 NR Description: ERD4 protein [Arabidopsis thaliana]
  misc_feature (1)..(224): Homolog of NCBI NO: 15375406 NR Description: ERD4 protein [Arabidopsis thaliana]
  misc_feature (5)..(231): Homolog of NCBI NO: 17863981 NR Description: unknown [Davidia involucrata]
  misc_feature (1)..(205): Homolog of NCBI NO: 37537172 NR Description: unknown protein [Oryza sativa (japonica
  misc_feature (1)..(228): Homolog of NCBI NO: 7487651 NR Description: hypothetical protein T4I9.22 - Arabidopsis (fragment) >gi|3924615|gb|AAC79116.1| hypothetical protein
  misc_feature (1)..(228): Homolog of NCBI NO: 15236212 NR Description: ERD4 protein-related [Arabidopsis thaliana]
  misc_feature (1)..(205): Homolog of NCBI NO: 15222569 NR Description: ERD4 protein-related [Arabidopsis thaliana]
  misc_feature (1)..(220): Homolog of NCBI NO: 15234725 NR Description: ERD4 protein-related [Arabidopsis thaliana]
  misc_feature (1)..(208): Homolog of NCBI NO: 15233100 NR Description: ERD4 protein-related [Arabidopsis thaliana] gb|AAD36947.1~gene_id:MIL23.19~strong similarity to unknown
MLAKSLPGSATFFLTFVALKFLVGYGLELSRLVPLIIFHLKRKYLCKTEEEVRAAWAPVDLGYNTRIPNDMLIATVVLCYSVIAPLIIPFGVAYFALGWLIARNQILRVYVPSYESYGRMWPHMHTRIIAALMVYQTTMIGFISLKKFAYASVLVPLLPASIIFAYVCHMRFYPAFAKTPLEVVVRHDLKETPNMEAIYTAYIPPCLKPDKLEDLDAFEDAQSRATSRVPSI

SEQ ID NO: 13789 - DNA, 1499 bp, Zea mays subsp. mays; identical to SEQ ID NO: 10683
  misc_feature (1)..(1499): Ceres Seq. ID no. 13580175
  misc_feature: MA Experiment ID: 108529 Result: Down-regulated in Transcription
  misc_feature: MA Experiment 108529 PARAMETER Experiment Name: Zm_Imbibed_Seeds_P Parameter: Age (day) Value: 5 vs. 2
  misc_feature: MA Experiment 108529 PARAMETER Experiment Name: Zm_Imbibed_Seeds_P Parameter: Organism Value: Zea mays
  misc_feature: MA Experiment 108529 PARAMETER Experiment Name: Zm_Imbibed_Seeds_P Parameter: Plant Line Value: 35A19
  misc_feature: MA Experiment 108529 PARAMETER Experiment Name: Zm_Imbibed_Seeds_P Parameter: Tissue Value: Roots vs. Embryo
  misc_feature: MA Experiment ID: 108530 Result: Down-regulated in Transcription
  misc_feature: MA Experiment 108530 PARAMETER Experiment Name: Zm_Imbibed_Seeds_P Parameter: Age (day) Value: 6 vs. 2
  misc_feature: MA Experiment 108530 PARAMETER Experiment Name: Zm_Imbibed_Seeds_P Parameter: Organism Value: Zea mays
  misc_feature: MA Experiment 108530 PARAMETER Experiment Name: Zm_Imbibed_Seeds_P Parameter: Plant Line Value: 35A19
  misc_feature: MA Experiment 108530 PARAMETER Experiment Name: Zm_Imbibed_Seeds_P Parameter: Tissue Value: Aerial vs. Embryo
  misc_feature: MA Experiment ID: 108535 Result: Up-regulated in Transcription
  misc_feature: MA Experiment 108535 PARAMETER Experiment Name: Zm_Meristem_P Parameter: Age (day) Value: 8
  misc_feature: MA Experiment 108535 PARAMETER Experiment Name: Zm_Meristem_P Parameter: Organism Value: Zea mays
  misc_feature: MA Experiment 108535 PARAMETER Experiment Name: Zm_Meristem_P Parameter: Plant Line Value: 35A19
  misc_feature: MA Experiment 108535 PARAMETER Experiment Name: Zm_Meristem_P Parameter: Tissue Value: Root Meristem vs. Above Root Meristem
  misc_feature: MA Experiment ID: 20000487 Result: Up-regulated in Transcription
  misc_feature: MA Experiment 20000487 PARAMETER Experiment Name: Zm_50mM_NH4NO3_L_to_H_P Parameter: Organism Value: Zea mays
  misc_feature: MA Experiment 20000487 PARAMETER Experiment Name: Zm_50mM_NH4NO3_L_to_H_P Parameter: Timepoint (hr) Value: 4
  misc_feature: MA Experiment 20000487 PARAMETER Experiment Name: Zm_50mM_NH4NO3_L_to_H_P Parameter: Tissue Value: Leaves
  misc_feature: MA Experiment 20000487 PARAMETER Experiment Name: Zm_50mM_NH4NO3_L_to_H_P Parameter: Treatment Value: 50mM NH4NO3 vs. 100mM Mannitol
  misc_feature: MA Experiment ID: 20000492 Result: Up-regulated in Transcription
  misc_feature: MA Experiment 20000492 PARAMETER Experiment Name: Zm_Hybrid_Seed_Dev_P Parameter: DAP Value: 12
  misc_feature: MA Experiment 20000492 PARAMETER Experiment Name: Zm_Hybrid_Seed_Dev_P Parameter: Organism Value: Zea mays
  misc_feature: MA Experiment 20000492 PARAMETER Experiment Name: Zm_Hybrid_Seed_Dev_P Parameter: Plant Line Value: 35A19
  misc_feature: MA Experiment 20000492 PARAMETER Experiment Name: Zm_Hybrid_Seed_Dev_P Parameter: Tissue Value: Fert Kernel vs. Unfert Floret
  misc_feature: MA Experiment ID: 20001606 Result: Up-regulated in Transcription
  misc_feature: MA Experiment 20001606 PARAMETER Experiment Name: Zm_50ppm_KNO3_L-to-H_P Parameter: Age (day) Value: 19
  misc_feature: MA Experiment 20001606 PARAMETER Experiment Name: Zm_50ppm_KNO3_L-to-H_P Parameter: Organism Value: Zea mays
  misc_feature: MA Experiment 20001606 PARAMETER Experiment Name: Zm_50ppm_KNO3_L-to-H_P Parameter: Plant Line Value: 35A19
  misc_feature: MA Experiment 20001606 PARAMETER Experiment Name: Zm_50ppm_KNO3_L-to-H_P Parameter: Timepoint (hr) Value: 8
  misc_feature: MA Experiment 20001606 PARAMETER Experiment Name: Zm_50ppm_KNO3_L-to-H_P Parameter: Tissue Value: Shoots
  misc_feature: MA Experiment 20001606 PARAMETER Experiment Name: Zm_50ppm_KNO3_L-to-H_P Parameter: Treatment Value: 50ppm KNO3 vs. 50ppm KCl

SEQ ID NO: 13790 - protein, 348 aa, Zea mays subsp. mays; identical to SEQ ID NO: 10684
  peptide (1)..(348): Ceres Seq. ID no. 13580176
  misc_feature (193)..(288): Pfam Name: Putative tRNA binding domain Pfam Description: Putative tRNA binding domain
  misc_feature (193)..(288): Pfam Name: Putative tRNA binding domain Pfam Description: Putative tRNA binding domain
  misc_feature (1)..(348): Homolog of NCBI NO: 34907808 NR Description: similar to methionyl-tRNA synthetase [Oryza
  misc_feature (1)..(348): Homolog of NCBI NO: 18405465 NR Description: methionyl-tRNA synthetase -related [Arabidopsis
  misc_feature (1)..(348): Homolog of NCBI NO: 25408718 NR Description: probable methionyl-tRNA synthetase [imported] -
  misc_feature (96)..(348): Homolog of NCBI NO: 15236350 NR Description: methionyl-tRNA synthetase - like protein
  misc_feature (16)..(347): Homolog of NCBI NO: 4140277 NR Description: aminoacyl-tRNA synthetase cofactor [Euplotes
  misc_feature (1)..(348): Homolog of NCBI NO: 18405465 NR Description: methionyl-tRNA synthetase -related [Arabidopsis
  misc_feature (96)..(348): Homolog of NCBI NO: 15236350 NR Description: methionyl-tRNA synthetase - like protein
  misc_feature (157)..(348): Homolog of NCBI NO: 26352830 NR Description: unnamed protein product [Mus musculus]
  misc_feature (19)..(327): Homolog of NCBI NO: 19115568 NR Description: putative Cofactor for methionyl-and glutamyl-tRNA and G4 quadruplex nucleic acid binding protein by similarity to G4P1 [Schizosaccharomyces pombe] >gi|7768495|emb|CAB90791.1| G4P1
  misc_feature (121)..(348): Homolog of NCBI NO: 34860578 NR Description: endothelial monocyte activating polypeptide 2
  misc_feature (117)..(338): Homolog of NCBI NO: 28302254 NR Description: Similar to small inducible cytokine subfamily E,
  misc_feature (89)..(348): Homolog of NCBI NO: 12230649 NR Description: Probable methionyl-tRNA synthetase
  misc_feature (16)..(347): Homolog of NCBI NO: 4140277 NR Description: aminoacyl-tRNA synthetase cofactor [Euplotes
  misc_feature (1)..(348): Homolog of NCBI NO: 25408718 NR Description: probable methionyl-tRNA synthetase [imported] -
  misc_feature (1)..(348): Homolog of NCBI NO: 34907808 NR Description: similar to methionyl-tRNA synthetase [Oryza
  misc_feature (89)..(348): Homolog of NCBI NO: 12230649 NR Description: Probable methionyl-tRNA synthetase
  misc_feature (117)..(338): Homolog of NCBI NO: 28302254 NR Description: Similar to small inducible cytokine subfamily E,
  misc_feature (121)..(348): Homolog of NCBI NO: 34860578 NR Description: endothelial monocyte activating polypeptide 2
  misc_feature (19)..(327): Homolog of NCBI NO: 19115568 NR Description: putative Cofactor for methionyl-and glutamyl-tRNA and G4 quadruplex nucleic acid binding protein by similarity to G4P1 [Schizosaccharomyces pombe] >gi|7768495|emb|CAB90791.1| G4P1
  misc_feature (157)..(348): Homolog of NCBI NO: 26352830 NR Description: unnamed protein product [Mus musculus]

SEQ ID NO: 13791 - protein, 275 aa, Zea mays subsp. mays; identical to SEQ ID NO: 10685
  peptide (1)..(275): Ceres Seq. ID no. 13580177
  misc_feature (120)..(215): Pfam Name: Putative tRNA binding domain Pfam Description: Putative tRNA binding domain
  misc_feature (120)..(215): Pfam Name: Putative tRNA binding domain Pfam Description: Putative tRNA binding domain
  misc_feature (1)..(275): Homolog of NCBI NO: 34907808 NR Description: similar to methionyl-tRNA synthetase [Oryza
  misc_feature (1)..(275): Homolog of NCBI NO: 18405465 NR Description: methionyl-tRNA synthetase -related [Arabidopsis
  misc_feature (1)..(275): Homolog of NCBI NO: 25408718 NR Description: probable methionyl-tRNA synthetase [imported] -
  misc_feature (23)..(275): Homolog of NCBI NO: 15236350 NR Description: methionyl-tRNA synthetase - like protein
  misc_feature (1)..(274): Homolog of NCBI NO: 4140277 NR Description: aminoacyl-tRNA synthetase cofactor [Euplotes
  misc_feature (1)..(275): Homolog of NCBI NO: 18405465 NR Description: methionyl-tRNA synthetase -related [Arabidopsis
  misc_feature (23)..(275): Homolog of NCBI NO: 15236350 NR Description: methionyl-tRNA synthetase - like protein
  misc_feature (84)..(275): Homolog of NCBI NO: 26352830 NR Description: unnamed protein product [Mus musculus]
  misc_feature (1)..(254): Homolog of NCBI NO: 19115568 NR Description: putative Cofactor for methionyl-and glutamyl-tRNA and G4 quadruplex nucleic acid binding protein by similarity to G4P1 [Schizosaccharomyces pombe] >gi|7768495|emb|CAB90791.1| G4P1
  misc_feature (48)..(275): Homolog of NCBI NO: 34860578 NR Description: endothelial monocyte activating polypeptide 2
  misc_feature (44)..(265): Homolog of NCBI NO: 28302254 NR Description: Similar to small inducible cytokine subfamily E,
  misc_feature (16)..(275): Homolog of NCBI NO: 12230649 NR Description: Probable methionyl-tRNA synthetase
  misc_feature (1)..(274): Homolog of NCBI NO: 4140277 NR Description: aminoacyl-tRNA synthetase cofactor [Euplotes
  misc_feature (1)..(275): Homolog of NCBI NO: 25408718 NR Description: probable methionyl-tRNA synthetase [imported] -
  misc_feature (1)..(275): Homolog of NCBI NO: 34907808 NR Description: similar to methionyl-tRNA synthetase [Oryza
  misc_feature (16)..(275): Homolog of NCBI NO: 12230649 NR Description: Probable methionyl-tRNA synthetase
  misc_feature (44)..(265): Homolog of NCBI NO: 28302254 NR Description: Similar to small inducible cytokine subfamily E,
  misc_feature (48)..(275): Homolog of NCBI NO: 34860578 NR Description: endothelial monocyte activating polypeptide 2
  misc_feature (1)..(254): Homolog of NCBI NO: 19115568 NR Description: putative Cofactor for methionyl-and glutamyl-tRNA and G4 quadruplex nucleic acid binding protein by similarity to G4P1 [Schizosaccharomyces pombe] >gi|7768495|emb|CAB90791.1| G4P1
  misc_feature (84)..(275): Homolog of NCBI NO: 26352830 NR Description: unnamed protein product [Mus musculus]

SEQ ID NO: 13792 - DNA, 2012 bp, Zea mays subsp. mays
  misc_feature (1)..(2012): Ceres Seq. ID no. 12391571
  misc_feature: MA Experiment ID: 108522 Result: Down-regulated in Transcription
  misc_feature: MA Experiment 108522 PARAMETER Experiment Name: Zm_42deg_Heat_P Parameter: Age (day) Value: 8
  misc_feature: MA Experiment 108522 PARAMETER Experiment Name: Zm_42deg_Heat_P Parameter: Organism Value: Zea mays
  misc_feature: MA Experiment 108522 PARAMETER Experiment Name: Zm_42deg_Heat_P Parameter: Plant Line Value: 35A19
  misc_feature: MA Experiment 108522 PARAMETER Experiment Name: Zm_42deg_Heat_P Parameter: Temperature (deg C) Value: 42 vs. 22
  misc_feature: MA Experiment 108522 PARAMETER Experiment Name: Zm_42deg_Heat_P Parameter: Timepoint (hr) Value: 1
  misc_feature: MA Experiment 108522 PARAMETER Experiment Name: Zm_42deg_Heat_P Parameter: Tissue Value: Aerial
  misc_feature: MA Experiment ID: 108527 Result: Down-regulated in Transcription
  misc_feature: MA Experiment 108527 PARAMETER Experiment Name: Zm_5mM_NO_P Parameter: Age (day) Value: 8
  misc_feature: MA Experiment 108527 PARAMETER Experiment Name: Zm_5mM_NO_P Parameter: Organism Value: Zea mays
  misc_feature: MA Experiment 108527 PARAMETER Experiment Name: Zm_5mM_NO_P Parameter: Plant Line Value: 35A19
  misc_feature: MA Experiment 108527 PARAMETER Experiment Name: Zm_5mM_NO_P Parameter: Timepoint (hr) Value: 6
  misc_feature: MA Experiment 108527 PARAMETER Experiment Name: Zm_5mM_NO_P Parameter: Tissue Value: Aerial
  misc_feature: MA Experiment 108527 PARAMETER Experiment Name: Zm_5mM_NO_P Parameter: Treatment Value: 5mM NO vs. No Treatment
  misc_feature: MA Experiment ID: 108529 Result: Up-regulated in Transcription
  misc_feature: MA Experiment 108529 PARAMETER Experiment Name: Zm_Imbibed_Seeds_P Parameter: Age (day) Value: 5 vs. 2
  misc_feature: MA Experiment 108529 PARAMETER Experiment Name: Zm_Imbibed_Seeds_P Parameter: Organism Value: Zea mays
  misc_feature: MA Experiment 108529 PARAMETER Experiment Name: Zm_Imbibed_Seeds_P Parameter: Plant Line Value: 35A19
  misc_feature: MA Experiment 108529 PARAMETER Experiment Name: Zm_Imbibed_Seeds_P Parameter: Tissue Value: Roots vs. Embryo
  misc_feature: MA Experiment ID: 108535 Result: Down-regulated in Transcription
  misc_feature: MA Experiment 108535 PARAMETER Experiment Name: Zm_Meristem_P Parameter: Age (day) Value: 8
  misc_feature: MA Experiment 108535 PARAMETER Experiment Name: Zm_Meristem_P Parameter: Organism Value: Zea mays
  misc_feature: MA Experiment 108535 PARAMETER Experiment Name: Zm_Meristem_P Parameter: Plant Line Value: 35A19
  misc_feature: MA Experiment 108535 PARAMETER Experiment Name: Zm_Meristem_P Parameter: Tissue Value: Root Meristem vs. Above Root Meristem
  misc_feature: MA Experiment ID: 108543 Result: Down-regulated in Transcription
  misc_feature: MA Experiment ID: 108599 Result: Down-regulated in Transcription
  misc_feature: MA Experiment 108599 PARAMETER Experiment Name: Zm_RT1_P Parameter: Age (day) Value: 11
  misc_feature: MA Experiment 108599 PARAMETER Experiment Name: Zm_RT1_P Parameter: Organism Value: Zea mays
  misc_feature: MA Experiment 108599 PARAMETER Experiment Name: Zm_RT1_P Parameter: Plant Line Value: rt1 mut vs. rt1 wt
  misc_feature: MA Experiment 108599 PARAMETER Experiment Name: Zm_RT1_P Parameter: Tissue Value: Roots
  misc_feature: MA Experiment ID: 108689 Result: Up-regulated in Transcription
  misc_feature: MA Experiment 108689 PARAMETER Experiment Name: Zm_Drought_Roots_P Parameter: Age (day) Value: 9
  misc_feature: MA Experiment 108689 PARAMETER Experiment Name: Zm_Drought_Roots_P Parameter: Organism Value: Zea mays
  misc_feature: MA Experiment 108689 PARAMETER Experiment Name: Zm_Drought_Roots_P Parameter: Plant Line Value: 35A19
  misc_feature: MA Experiment 108689 PARAMETER Experiment Name: Zm_Drought_Roots_P Parameter: Timepoint (hr) Value: 24
  misc_feature: MA Experiment 108689 PARAMETER Experiment Name: Zm_Drought_Roots_P Parameter: Tissue Value: Roots
  misc_feature: MA Experiment 108689 PARAMETER Experiment Name: Zm_Drought_Roots_P Parameter: Treatment Value: Drought vs. No Drought
  misc_feature: MA Experiment ID: 20000535 Result: Down-regulated in Transcription
  misc_feature: MA Experiment 20000535 PARAMETER Experiment Name: Zm_Hybrid_Seed_Dev_P Parameter: DAP Value: 30 vs. 12
  misc_feature: MA Experiment 20000535 PARAMETER Experiment Name: Zm_Hybrid_Seed_Dev_P Parameter: Organism Value: Zea mays
  misc_feature: MA Experiment 20000535 PARAMETER Experiment Name: Zm_Hybrid_Seed_Dev_P Parameter: Plant Line Value: 35A19
  misc_feature: MA Experiment 20000535 PARAMETER Experiment Name: Zm_Hybrid_Seed_Dev_P Parameter: Tissue Value: Embryo vs. Unfert Floret
aaagaacgaagaaaccaagcagctaccatcatcatcagtccagcaacaatggcggcggcggaaccggtaccagtaccagtaccagtaccggcggcagctggcgggaccaacaataagatcaagacggtggtgctggtgcaggagaaccgctccttcgaccacatgctggggtggatgaagtcgctgaacccggacatcgacggcgtgacgggggccgagaccaaccacgtggacgcctccgacccggcctcccgcgccgtccgcttcagcgacggcgccgagtacgtggacccggacccgggccactccatgcaggccatctacgagcaggtgtacgggacgcccttcgtcgacgccgccacgacgcccgccaccccgccgggcgtcgccccctccatgtccggcttcgcgcagcaggccgagaaggagaggcccggcatgtccgccaccgtcatggccggcttccgccccgacgccgtgcccgtgtaccgggacctggtgcgggagttcgccgtgtgcgaccgctggttcgcgtccaacccggcgtccacgcagcccaaccggctgttcgtgcactccgccacctcccacggcctcgtcagcaacgacagcagggcgctggtggcgggcctcccgcagcggaccatcttcgacgcgctccacgacgagggcctctccttcggcgtctactaccagtacccgccgtccacgctattctaccggagcctccgccagctcaagtacgccgccagcttccacgccttcgacctccacttcgcgcgccactgccgggagggcaggctgcccagctacgtcgtcgtggagcagcgctacttcgacctccgcctcctcccggggaacgacgaccatccgtcccacgacgtggccgagggccagcgcttcgtcaaggaggtctacgaggcgctgcgctcgggcccgcagtggccccagacgctcctcgtcgtcacctacgacgagcacggcggcttctacgaccacgtgcccacgcccgcgggggccggcgtcgtgcccagccccgacggcatcgtcagcgccaagcccttctccttcgccttcgaccgcctcggcgtccgcgtcccggcgctgctcgtgtcgccctggatcgagcccgggaccgtgctgcacgggccaccgtcgggaccctgcccgacgtccgagttcgagcactcctccatcccggcaaccgtcaagaagctcttcaacctcaggagcttcctcaccaggcgcgacgcctgggccggcaccttcgactgcgtcctcacgcgcgacacgccgcgcaccgactgcccacgtacgtcactagtacttgctcatcagtagctagcgtgtaggaaggaacggacagacatggaactgatgatgatgatgtgcatgcagtcaccctgcccgagccagtgaagctgcggcggacggcggcggcggagcatgccccgctgtccgagttccaggaggagctggtgcagctcgccgcggtgctcaacggcgaccacaccaaggagtcgtacccgcaagggctcgtcgagggcatgacggtggcggaggcggccaggtactgcgtcgacgccttcaaggccttcttggacgagtgcgagaaatgcaaggaccgcggcgaggacggctcccacatccccacggtgaagccgacgacgacggggaaggagaaggacaagagcaagagcagcttcgcttccaagtcgctgtcctgccttccctgctgtgtccgtccctcttcctcgtgacctccctctccttctacacgcgatgcgcccacgactccaggcatcacaagttcccattcagaatcggtcgggtagtgaattttacagtgtgatacctcacttgtgtagattgattcattcctagtcatatgcatttgcattccgcattatattgattaaatattctaacgcataatagaaaggtggagtagatacagagaatcggtccgttcgcttgtcttgtttaatggaagtttaatggattgtttagtg

SEQ ID NO: 13793 - protein, 446 aa, Zea mays subsp. mays
  peptide (1)..(446): Ceres Seq. ID no. 12391572
  misc_feature (40)..(426): Pfam Name: Phosphoesterase family Pfam Description: Phosphoesterase family
  misc_feature (31)..(439): Homolog of NCBI NO: 27573343 NR Description: putative phosphoesterase [Oryza sativa (japonica group)] >gi|29126358|gb|AAO66550.1| putative phosphoesterase
  misc_feature (29)..(439): Homolog of NCBI NO: 18396577 NR Description: expressed protein; protein id: At3g03530.1, by cDNA: gi_14335155 [Arabidopsis thaliana] hypothetical protein [Arabidopsis thaliana]
  misc_feature (31)..(439): Homolog of NCBI NO: 15228577 NR Description: unknown protein; protein id: At3g03520.1, by cDNA: gi_17529015 [Arabidopsis thaliana] unknown protein [Arabidopsis thaliana]
  misc_feature (31)..(439): Homolog of NCBI NO: 17529016 NR Description: unknown protein [Arabidopsis thaliana]
  misc_feature (40)..(439): Homolog of NCBI NO: 15225806 NR Description: putative phospholipase C; protein id: At2g26870.1
  misc_feature (34)..(439): Homolog of NCBI NO: 18396579 NR Description: putative phospholipase; protein id: At3g03540.1 thaliana] >gi|6017098|gb|AAF01581.1|AC009895_2 unknown protein thaliana] >gi|6091767|gb|AAF03477.1|AC009327_16 putative
  misc_feature (14)..(437): Homolog of NCBI NO: 20161866 NR Description: B1139B11.7 [Oryza sativa (japonica
  misc_feature (40)..(437): Homolog of NCBI NO: 21703147 NR Description: At1g07230/F10K1_4 [Arabidopsis thaliana] phosphatidylglycerol specific phospholipase C [Arabidopsis
  misc_feature (40)..(437): Homolog of NCBI NO: 15222342 NR Description: unknown protein; protein id: At1g07230.1
  misc_feature (37)..(439): Homolog of NCBI NO: 34894016 NR Description: P0672D08.18 [Oryza sativa (japonica >gi|15128448|dbj|BAB62632.1| hypothetical protein~similar to
KERRNQAATIIISPATMAAAEPVPVPVPVPAAAGGTNNKIKTVVLVQENRSFDHMLGWMKSLNPDIDGVTGAETNHVDASDPASRAVRFSDGAEYVDPDPGHSMQAIYEQVYGTPFVDAATTPATPPGVAPSMSGFAQQAEKERPGMSATVMAGFRPDAVPVYRDLVREFAVCDRWFASNPASTQPNRLFVHSATSHGLVSNDSRALVAGLPQRTIFDALHDEGLSFGVYYQYPPSTLFYRSLRQLKYAASFHAFDLHFARHCREGRLPSYVVVEQRYFDLRLLPGNDDHPSHDVAEGQRFVKEVYEALRSGPQWPQTLLVVTYDEHGGFYDHVPTPAGAGVVPSPDGIVSAKPFSFAFDRLGVRVPALLVSPWIEPGTVLHGPPSGPCPTSEFEHSSIPATVKKLFNLRSFLTRRDAWAGTFDCVLTRDTPRTDCPRTSLVLAHQ

SEQ ID NO: 13794 - protein, 430 aa, Zea mays subsp. mays
  peptide (1)..(430): Ceres Seq. ID no. 12391573
  misc_feature (24)..(410): Pfam Name: Phosphoesterase family Pfam Description: Phosphoesterase family
  misc_feature (15)..(423): Homolog of NCBI NO: 27573343 NR Description: putative phosphoesterase [Oryza sativa (japonica group)] >gi|29126358|gb|AAO66550.1| putative phosphoesterase
  misc_feature (13)..(423): Homolog of NCBI NO: 18396577 NR Description: expressed protein; protein id: At3g03530.1, by cDNA: gi_14335155 [Arabidopsis thaliana] hypothetical protein [Arabidopsis thaliana]
  misc_feature (15)..(423): Homolog of NCBI NO: 15228577 NR Description: unknown protein; protein id: At3g03520.1, by cDNA: gi_17529015 [Arabidopsis thaliana] unknown protein [Arabidopsis thaliana]
  misc_feature (15)..(423): Homolog of NCBI NO: 17529016 NR Description: unknown protein [Arabidopsis thaliana]
  misc_feature (24)..(423): Homolog of NCBI NO: 15225806 NR Description: putative phospholipase C; protein id: At2g26870.1
  misc_feature (18)..(423): Homolog of NCBI NO: 18396579 NR Description: putative phospholipase; protein id: At3g03540.1 thaliana] >gi|6017098|gb|AAF01581.1|AC009895_2 unknown protein thaliana] >gi|6091767|gb|AAF03477.1|AC009327_16 putative
  misc_feature (1)..(421): Homolog of NCBI NO: 20161866 NR Description: B1139B11.7 [Oryza sativa (japonica
  misc_feature (24)..(421): Homolog of NCBI NO: 21703147 NR Description: At1g07230/F10K1_4 [Arabidopsis thaliana] phosphatidylglycerol specific phospholipase C [Arabidopsis
  misc_feature (24)..(421): Homolog of NCBI NO: 15222342 NR Description: unknown protein; protein id: At1g07230.1
  misc_feature (21)..(423): Homolog of NCBI NO: 34894016 NR Description: P0672D08.18 [Oryza sativa (japonica >gi|15128448|dbj|BAB62632.1| hypothetical protein~similar to
MAAAEPVPVPVPVPAAAGGTNNKIKTVVLVQENRSFDHMLGWMKSLNPDIDGVTGAETNHVDASDPASRAVRFSDGAEYVDPDPGHSMQAIYEQVYGTPFVDAATTPATPPGVAPSMSGFAQQAEKERPGMSATVMAGFRPDAVPVYRDLVREFAVCDRWFASNPASTQPNRLFVHSATSHGLVSNDSRALVAGLPQRTIFDALHDEGLSFGVYYQYPPSTLFYRSLRQLKYAASFHAFDLHFARHCREGRLPSYVVVEQRYFDLRLLPGNDDHPSHDVAEGQRFVKEVYEALRSGPQWPQTLLVVTYDEHGGFYDHVPTPAGAGVVPSPDGIVSAKPFSFAFDRLGVRVPALLVSPWIEPGTVLHGPPSGPCPTSEFEHSSIPATVKKLFNLRSFLTRRDAWAGTFDCVLTRDTPRTDCPRTSLVLAHQ

SEQ ID NO: 13795 - protein, 392 aa, Zea mays subsp. mays
  peptide (1)..(392): Ceres Seq. ID no. 12391574
  misc_feature (1)..(372): Pfam Name: Phosphoesterase family Pfam Description: Phosphoesterase family
  misc_feature (1)..(385): Homolog of NCBI NO: 27573343 NR Description: putative phosphoesterase [Oryza sativa (japonica group)] >gi|29126358|gb|AAO66550.1| putative phosphoesterase
  misc_feature (1)..(385): Homolog of NCBI NO: 18396577 NR Description: expressed protein; protein id: At3g03530.1, by cDNA: gi_14335155 [Arabidopsis thaliana] hypothetical protein [Arabidopsis thaliana]
  misc_feature (1)..(385): Homolog of NCBI NO: 15228577 NR Description: unknown protein; protein id: At3g03520.1, by cDNA: gi_17529015 [Arabidopsis thaliana] unknown protein [Arabidopsis thaliana]
  misc_feature (1)..(385): Homolog of NCBI NO: 17529016 NR Description: unknown protein [Arabidopsis thaliana]
  misc_feature (1)..(385): Homolog of NCBI NO: 15225806 NR Description: putative phospholipase C; protein id: At2g26870.1
  misc_feature (1)..(385): Homolog of NCBI NO: 18396579 NR Description: putative phospholipase; protein id: At3g03540.1 thaliana] >gi|6017098|gb|AAF01581.1|AC009895_2 unknown protein thaliana] >gi|6091767|gb|AAF03477.1|AC009327_16 putative
  misc_feature (1)..(383): Homolog of NCBI NO: 20161866 NR Description: B1139B11.7 [Oryza sativa (japonica
  misc_feature (1)..(383): Homolog of NCBI NO: 21703147 NR Description: At1g07230/F10K1_4 [Arabidopsis thaliana] phosphatidylglycerol specific phospholipase C [Arabidopsis
  misc_feature (1)..(383): Homolog of NCBI NO: 15222342 NR Description: unknown protein; protein id: At1g07230.1
  misc_feature (1)..(385): Homolog of NCBI NO: 34894016 NR Description: P0672D08.18 [Oryza sativa (japonica >gi|15128448|dbj|BAB62632.1| hypothetical protein~similar to
MLGWMKSLNPDIDGVTGAETNHVDASDPASRAVRFSDGAEYVDPDPGHSMQAIYEQVYGTPFVDAATTPATPPGVAPSMSGFAQQAEKERPGMSATVMAGFRPDAVPVYRDLVREFAVCDRWFASNPASTQPNRLFVHSATSHGLVSNDSRALVAGLPQRTIFDALHDEGLSFGVYYQYPPSTLFYRSLRQLKYAASFHAFDLHFARHCREGRLPSYVVVEQRYFDLRLLPGNDDHPSHDVAEGQRFVKEVYEALRSGPQWPQTLLVVTYDEHGGFYDHVPTPAGAGVVPSPDGIVSAKPFSFAFDRLGVRVPALLVSPWIEPGTVLHGPPSGPCPTSEFEHSSIPATVKKLFNLRSFLTRRDAWAGTFDCVLTRDTPRTDCPRTSLVLAHQ

SEQ ID NO: 13796 - DNA, 1083 bp, Zea mays subsp. mays
  misc_feature (1)..(1083): Ceres Seq. ID no. 12455027
  misc_feature: MA Experiment ID: 108515 Result: Up-regulated in Transcription
  misc_feature: MA Experiment 108515 PARAMETER Experiment Name: Zm_2mM_SA_P Parameter: Age (day) Value: 8
  misc_feature: MA Experiment 108515 PARAMETER Experiment Name: Zm_2mM_SA_P Parameter: Organism Value: Zea mays
  misc_feature: MA Experiment 108515 PARAMETER Experiment Name: Zm_2mM_SA_P Parameter: Plant Line Value: 35A19
  misc_feature: MA Experiment 108515 PARAMETER Experiment Name: Zm_2mM_SA_P Parameter: Timepoint (hr) Value: 12
  misc_feature: MA Experiment 108515 PARAMETER Experiment Name: Zm_2mM_SA_P Parameter: Tissue Value: Aerial
  misc_feature: MA Experiment 108515 PARAMETER Experiment Name: Zm_2mM_SA_P Parameter: Treatment Value: 2mM SA vs. No Treatment
  misc_feature: MA Experiment ID: 108523 Result: Down-regulated in Transcription
  misc_feature: MA Experiment 108523 PARAMETER Experiment Name: Zm_42deg_Heat_P Parameter: Age (day) Value: 8
  misc_feature: MA Experiment 108523 PARAMETER Experiment Name: Zm_42deg_Heat_P Parameter: Organism Value: Zea mays
  misc_feature: MA Experiment 108523 PARAMETER Experiment Name: Zm_42deg_Heat_P Parameter: Plant Line Value: 35A19
  misc_feature: MA Experiment 108523 PARAMETER Experiment Name: Zm_42deg_Heat_P Parameter: Temperature (deg C) Value: 42 vs. 22
  misc_feature: MA Experiment 108523 PARAMETER Experiment Name: Zm_42deg_Heat_P Parameter: Timepoint (hr) Value: 6
  misc_feature: MA Experiment 108523 PARAMETER Experiment Name: Zm_42deg_Heat_P Parameter: Tissue Value: Aerial
  misc_feature: MA Experiment ID: 108526 Result: Up-regulated in Transcription
  misc_feature: MA Experiment 108526 PARAMETER Experiment Name: Zm_5mM_NO_P Parameter: Age (day) Value: 8
  misc_feature: MA Experiment 108526 PARAMETER Experiment Name: Zm_5mM_NO_P Parameter: Organism Value: Zea mays
  misc_feature: MA Experiment 108526 PARAMETER Experiment Name: Zm_5mM_NO_P Parameter: Plant Line Value: 35A19
  misc_feature: MA Experiment 108526 PARAMETER Experiment Name: Zm_5mM_NO_P Parameter: Timepoint (hr) Value: 1
  misc_feature: MA Experiment 108526 PARAMETER Experiment Name: Zm_5mM_NO_P Parameter: Tissue Value: Aerial
  misc_feature: MA Experiment 108526 PARAMETER Experiment Name: Zm_5mM_NO_P Parameter: Treatment Value: 5mM NO vs. No Treatment
  misc_feature: MA Experiment ID: 108527 Result: Up-regulated in Transcription
  misc_feature: MA Experiment 108527 PARAMETER Experiment Name: Zm_5mM_NO_P Parameter: Age (day) Value: 8
  misc_feature: MA Experiment 108527 PARAMETER Experiment Name: Zm_5mM_NO_P Parameter: Organism Value: Zea mays
  misc_feature: MA Experiment 108527 PARAMETER Experiment Name: Zm_5mM_NO_P Parameter: Plant Line Value: 35A19
  misc_feature: MA Experiment 108527 PARAMETER Experiment Name: Zm_5mM_NO_P Parameter: Timepoint (hr) Value: 6
  misc_feature: MA Experiment 108527 PARAMETER Experiment Name: Zm_5mM_NO_P Parameter: Tissue Value: Aerial
  misc_feature: MA Experiment 108527 PARAMETER Experiment Name: Zm_5mM_NO_P Parameter: Treatment Value: 5mM NO vs. No Treatment
  misc_feature: MA Experiment ID: 108528 Result: Down-regulated in Transcription
  misc_feature: MA Experiment 108528 PARAMETER Experiment Name: Zm_Imbibed_Seeds_P Parameter: Age (day) Value: 5 vs. 2
  misc_feature: MA Experiment 108528 PARAMETER Experiment Name: Zm_Imbibed_Seeds_P Parameter: Organism Value: Zea mays
  misc_feature: MA Experiment 108528 PARAMETER Experiment Name: Zm_Imbibed_Seeds_P Parameter: Plant Line Value: 35A19
  misc_feature: MA Experiment 108528 PARAMETER Experiment Name: Zm_Imbibed_Seeds_P Parameter: Tissue Value: Aerial vs. Embryo
  misc_feature: MA Experiment ID: 108529 Result: Down-regulated in Transcription
  misc_feature: MA Experiment 108529 PARAMETER Experiment Name: Zm_Imbibed_Seeds_P Parameter: Age (day) Value: 5 vs. 2
  misc_feature: MA Experiment 108529 PARAMETER Experiment Name: Zm_Imbibed_Seeds_P Parameter: Organism Value: Zea mays
  misc_feature: MA Experiment 108529 PARAMETER Experiment Name: Zm_Imbibed_Seeds_P Parameter: Plant Line Value: 35A19
  misc_feature: MA Experiment 108529 PARAMETER Experiment Name: Zm_Imbibed_Seeds_P Parameter: Tissue Value: Roots vs. Embryo
  misc_feature: MA Experiment ID: 108530 Result: Down-regulated in Transcription
  misc_feature: MA Experiment 108530 PARAMETER Experiment Name: Zm_Imbibed_Seeds_P Parameter: Age (day) Value: 6 vs. 2
  misc_feature: MA Experiment 108530 PARAMETER Experiment Name: Zm_Imbibed_Seeds_P Parameter: Organism Value: Zea mays
  misc_feature: MA Experiment 108530 PARAMETER Experiment Name: Zm_Imbibed_Seeds_P Parameter: Plant Line Value: 35A19
  misc_feature: MA Experiment 108530 PARAMETER Experiment Name: Zm_Imbibed_Seeds_P Parameter: Tissue Value: Aerial vs. Embryo
  misc_feature: MA Experiment ID: 108533 Result: Down-regulated in Transcription
  misc_feature: MA Experiment 108533 PARAMETER Experiment Name: Zm_4deg_Cold_P Parameter: Age (hr) Value: 8
  misc_feature: MA Experiment 108533 PARAMETER Experiment Name: Zm_4deg_Cold_P Parameter: Organism Value: Zea mays
  misc_feature: MA Experiment 108533 PARAMETER Experiment Name: Zm_4deg_Cold_P Parameter: Plant Line Value: 35A19
  misc_feature: MA Experiment 108533 PARAMETER Experiment Name: Zm_4deg_Cold_P Parameter: Temperature (deg C) Value: 4 vs. 22
  misc_feature: MA Experiment 108533 PARAMETER Experiment Name: Zm_4deg_Cold_P Parameter: Timepoint (hr) Value: 1
  misc_feature: MA Experiment 108533 PARAMETER Experiment Name: Zm_4deg_Cold_P Parameter: Tissue Value: Aerial
  misc_feature: MA Experiment ID: 108535 Result: Down-regulated in Transcription
  misc_feature: MA Experiment 108535 PARAMETER Experiment Name: Zm_Meristem_P Parameter: Age (day) Value: 8
  misc_feature: MA Experiment 108535 PARAMETER Experiment Name: Zm_Meristem_P Parameter: Organism Value: Zea mays
  misc_feature: MA Experiment 108535 PARAMETER Experiment Name: Zm_Meristem_P Parameter: Plant Line Value: 35A19
  misc_feature: MA Experiment 108535 PARAMETER Experiment Name: Zm_Meristem_P Parameter: Tissue Value: Root Meristem vs. Above Root Meristem
  misc_feature: MA Experiment ID: 108543 Result: Down-regulated in Transcription
  misc_feature: MA Experiment ID: 108546 Result: Down-regulated in Transcription
  misc_feature: MA Experiment 108546 PARAMETER Experiment Name: Zm_Imbibed_Seeds_P Parameter: Age (day) Value: 3 vs. 2
  misc_feature: MA Experiment 108546 PARAMETER Experiment Name: Zm_Imbibed_Seeds_P Parameter: Organism Value: Zea mays
  misc_feature: MA Experiment 108546 PARAMETER Experiment Name: Zm_Imbibed_Seeds_P Parameter: Plant Line Value: 35A19
  misc_feature: MA Experiment 108546 PARAMETER Experiment Name: Zm_Imbibed_Seeds_P Parameter: Tissue Value: Roots vs. Embryo
  misc_feature: MA Experiment ID: 108547 Result: Down-regulated in Transcription
  misc_feature: MA Experiment 108547 PARAMETER Experiment Name: Zm_Imbibed_Seeds_P Parameter: Age (day) Value: 4 vs. 2
  misc_feature: MA Experiment 108547 PARAMETER Experiment Name: Zm_Imbibed_Seeds_P Parameter: Organism Value: Zea mays
  misc_feature: MA Experiment 108547 PARAMETER Experiment Name: Zm_Imbibed_Seeds_P Parameter: Plant Line Value: 35A19
  misc_feature: MA Experiment 108547 PARAMETER Experiment Name: Zm_Imbibed_Seeds_P Parameter: Tissue Value: Aerial vs. Embryo
  misc_feature: MA Experiment ID: 108559 Result: Up-regulated in Transcription
  misc_feature: MA Experiment 108559 PARAMETER Experiment Name: Zm_5mM_NO_P Parameter: Age (day) Value: 8
  misc_feature: MA Experiment 108559 PARAMETER Experiment Name: Zm_5mM_NO_P Parameter: Organism Value: Zea mays
  misc_feature: MA Experiment 108559 PARAMETER Experiment Name: Zm_5mM_NO_P Parameter: Plant Line Value: 35A19
  misc_feature: MA Experiment 108559 PARAMETER Experiment Name: Zm_5mM_NO_P Parameter: Timepoint (hr) Value: 12
  misc_feature: MA Experiment 108559 PARAMETER Experiment Name: Zm_5mM_NO_P Parameter: Tissue Value: Aerial
  misc_feature: MA Experiment 108559 PARAMETER Experiment Name: Zm_5mM_NO_P Parameter: Treatment Value: 5mM NO vs. No Treatment
  misc_feature: MA Experiment ID: 108597 Result: Down-regulated in Transcription
  misc_feature: MA Experiment 108597 PARAMETER Experiment Name: Zm_100uM_ABA_P Parameter: Age (day) Value: 9
  misc_feature: MA Experiment 108597 PARAMETER Experiment Name: Zm_100uM_ABA_P Parameter: Organism Value: Zea mays
  misc_feature: MA Experiment 108597 PARAMETER Experiment Name: Zm_100uM_ABA_P Parameter: Plant Line Value: 35A19
  misc_feature: MA Experiment 108597 PARAMETER Experiment Name: Zm_100uM_ABA_P Parameter: Timepoint (hr) Value: 24
  misc_feature: MA Experiment 108597 PARAMETER Experiment Name: Zm_100uM_ABA_P Parameter: Tissue Value: Aerial
  misc_feature: MA Experiment 108597 PARAMETER Experiment Name: Zm_100uM_ABA_P Parameter: Treatment Value: 100uM ABA vs. No Treatment
  misc_feature: MA Experiment ID: 20000477 Result: Up-regulated in Transcription
  misc_feature: MA Experiment 20000477 PARAMETER Experiment Name: Zm_5mM_SA_P Parameter: Age (day) Value: 10
  misc_feature: MA Experiment 20000477 PARAMETER Experiment Name: Zm_5mM_SA_P Parameter: Organism Value: Zea mays
  misc_feature: MA Experiment 20000477 PARAMETER Experiment Name: Zm_5mM_SA_P Parameter: Plant Line Value: 35A19
  misc_feature: MA Experiment 20000477 PARAMETER Experiment Name: Zm_5mM_SA_P Parameter: Timepoint (hr) Value: 48
  misc_feature: MA Experiment 20000477 PARAMETER Experiment Name: Zm_5mM_SA_P Parameter: Tissue Value: Aerial
  misc_feature: MA Experiment 20000477 PARAMETER Experiment Name: Zm_5mM_SA_P Parameter: Treatment Value: 5mM SA vs. No Treatment
  misc_feature: MA Experiment ID: 20000478 Result: Up-regulated in Transcription
  misc_feature: MA Experiment 20000478 PARAMETER Experiment Name: Zm_5mM_SA_P Parameter: Age (day) Value: 11
  misc_feature: MA Experiment 20000478 PARAMETER Experiment Name: Zm_5mM_SA_P Parameter: Organism Value: Zea mays
  misc_feature: MA Experiment 20000478 PARAMETER Experiment Name: Zm_5mM_SA_P Parameter: Plant Line Value: 35A19
  misc_feature: MA Experiment 20000478 PARAMETER Experiment Name: Zm_5mM_SA_P Parameter: Timepoint (hr) Value: 72
  misc_feature: MA Experiment 20000478 PARAMETER Experiment Name: Zm_5mM_SA_P Parameter: Tissue Value: Aerial
  misc_feature: MA Experiment 20000478 PARAMETER Experiment Name: Zm_5mM_SA_P Parameter: Treatment Value: 5mM SA vs. No Treatment
  misc_feature: MA Experiment ID: 20000630 Result: Up-regulated in Transcription
  misc_feature: MA Experiment 20000630 PARAMETER Experiment Name: Zm_Herbicide-Treatments_P Parameter: Timepoint (hr) Value: 4
  misc_feature: MA Experiment 20000630 PARAMETER Experiment Name: Zm_Herbicide-Treatments_P Parameter: Tissue Value: Aerial
  misc_feature: MA Experiment 20000630 PARAMETER Experiment Name: Zm_Herbicide-Treatments_P Parameter: Treatment Value: Roundup vs. No Treatment
attactctagcaaaccacgtcgtcgtaagatcagaacgtacgtgatgatggtgctacgttcgcagggaacgtgagaaggaacgagagggtccagctagactccaagatgccggccatcgacgcctccaagcttccctggaccagcctcggcaagagcccagagtcacggagagccatgatccagagcacgctcacgaccaacccgacactatcgctcgccgaaaccatcgtctgcaacacgttccaggaggtcgagtccgtggcgctggcccgcctccccgtaccggcggtcgccatcggcccgctggaggcgcccaagtcggtgtcgtcggcggcggcggccggccatttctgggcgcaagacgaggcctgcctccgctggctcgacgcgcaggctcccggctcggtcgtgtacgtggcgttcgggagcctgacgttgttcgacgcggaacggctccaggagctggcagacgggctggcgctcacggggcggccgttcctgtgggtggtccggccgaacttcgccgacggcgtcggcgagcgctggctcgacgggttccggcgccgcgttggagaaggcaggggcctggtcgtcggctgggctccccagcagcgcgtgctcgcgcacccctcggtggcgtgcttcgtcacgcactgcgggtggaactccaccatggaaggggtgcggcacggcgtcccgttcctttgctggccctacttcgccgaccagttcctgaaccagagctacatctgcgacctgtggggcgtcgggttgaaggtgtgcgccgacgccgacgagaggggcgttgtcnccaaggaggagatcagggacaaggtggcgcggctgcttggggacgaggcgatcaaggcgaggacggtggccttgaagagcgcagcgtgcgccagcgtcgcggacggagggtcctcgcaccaggatttgctcaagttagtgaatctgctgagagagaaatagcctacagcatgtcagaaatgtttttcagaagttgagtggttatatattcatcagtagcacagacgtgaagaaaataaaagtagatgtgcagacatgcattgtttcaggcg

SEQ ID NO: 13797 - protein, 288 aa, Zea mays subsp. mays
  peptide (1)..(288): Ceres Seq. ID no. 12455028
  misc_feature (1)..(288): Homolog of NCBI NO: 13236650 NR Description: putative glucosyltransferase [Oryza sativa]
  misc_feature (1)..(288): Homolog of NCBI NO: 21326124 NR Description: putative glucosyl transferase [Sorghum bicolor]
  misc_feature (1)..(287): Homolog of NCBI NO: 21326123 NR Description: putative glucosyl transferase [Sorghum bicolor]
  misc_feature (1)..(287): Homolog of NCBI NO: 13236659 NR Description: putative glucosyltransferase [Oryza sativa]
  misc_feature (1)..(286): Homolog of NCBI NO: 21326125 NR Description: putative glucosyl transferase [Sorghum bicolor]
  misc_feature (1)..(287): Homolog of NCBI NO: 13236656 NR Description: putative glucosyltransferase [Oryza sativa]
  misc_feature (1)..(287): Homolog of NCBI NO: 21326126 NR Description: putative glucosyl transferase [Sorghum bicolor]
  misc_feature (1)..(288): Homolog of NCBI NO: 21326127 NR Description: putative glucosyl transferase [Sorghum bicolor]
  misc_feature (1)..(288): Homolog of NCBI NO: 13236653 NR Description: putative glucosyltransferase [Oryza sativa]
  misc_feature (1)..(287): Homolog of NCBI NO: 21326128 NR Description: putative glucosyl transferase [Sorghum bicolor]
  misc_feature (236)..(236): Xaa is any aa, unknown or other
MPAIDASKLPWTSLGKSPESRRAMIQSTLTTNPTLSLAETIVCNTFQEVESVALARLPVPAVAIGPLEAPKSVSSAAAAGHFWAQDEACLRWLDAQAPGSVVYVAFGSLTLFDAERLQELADGLALTGRPFLWVVRPNFADGVGERWLDGFRRRVGEGRGLVVGWAPQQRVLAHPSVACFVTHCGWNSTMEGVRHGVPFLCWPYFADQFLNQSYICDLWGVGLKVCADADERGVVXKEEIRDKVARLLGDEAIKARTVALKSAACASVADGGSSHQDLLKLVNLLREK

SEQ ID NO: 13798 - protein, 265 aa, Zea mays subsp. mays
  peptide (1)..(265): Ceres Seq. ID no. 12455029
  misc_feature (1)..(264): Homolog of NCBI NO: 21326126 NR Description: putative glucosyl transferase [Sorghum bicolor]
  misc_feature (1)..(265): Homolog of NCBI NO: 21326127 NR Description: putative glucosyl transferase [Sorghum bicolor]
  misc_feature (1)..(265): Homolog of NCBI NO: 13236653 NR Description: putative glucosyltransferase [Oryza sativa]
  misc_feature (1)..(264): Homolog of NCBI NO: 21326128 NR Description: putative glucosyl transferase [Sorghum bicolor]
  misc_feature (1)..(265): Homolog of NCBI NO: 13236650 NR Description: putative glucosyltransferase [Oryza sativa]
  misc_feature (1)..(265): Homolog of NCBI NO: 21326124 NR Description: putative glucosyl transferase [Sorghum bicolor]
  misc_feature (1)..(264): Homolog of NCBI NO: 21326123 NR Description: putative glucosyl transferase [Sorghum bicolor]
  misc_feature (1)..(264): Homolog of NCBI NO: 13236659 NR Description: putative glucosyltransferase [Oryza sativa]
  misc_feature (1)..(263): Homolog of NCBI NO: 21326125 NR Description: putative glucosyl transferase [Sorghum bicolor]
  misc_feature (1)..(264): Homolog of NCBI NO: 13236656 NR Description: putative glucosyltransferase [Oryza sativa]
  misc_feature (213)..(213): Xaa is any aa, unknown or other
MIQSTLTTNPTLSLAETIVCNTFQEVESVALARLPVPAVAIGPLEAPKSVSSAAAAGHFWAQDEACLRWLDAQAPGSVVYVAFGSLTLFDAERLQELADGLALTGRPFLWVVRPNFADGVGERWLDGFRRRVGEGRGLVVGWAPQQRVLAHPSVACFVTHCGWNSTMEGVRHGVPFLCWPYFADQFLNQSYICDLWGVGLKVCADADERGVVXKEEIRDKVARLLGDEAIKARTVALKSAACASVADGGSSHQDLLKLVNLLREK

SEQ ID NO: 13799 - DNA, 635 bp, Zea mays subsp. mays
  misc_feature (1)..(635): Ceres Seq. ID no. 12378559
  misc_feature: MA Experiment ID: 108687 Result: Up-regulated in Transcription
  misc_feature: MA Experiment 108687 PARAMETER Experiment Name: Zm_Embryos-Flowers__P Parameter: Tissue Value: Embryo vs. Aerial+
  misc_feature: MA Experiment ID: 20000492 Result: Up-regulated in Transcription
  misc_feature: MA Experiment 20000492 PARAMETER Experiment Name: Zm_Hybrid_Seed_Dev_P Parameter: DAP Value: 12
  misc_feature: MA Experiment 20000492 PARAMETER Experiment Name: Zm_Hybrid_Seed_Dev_P Parameter: Organism Value: Zea mays
  misc_feature: MA Experiment 20000492 PARAMETER Experiment Name: Zm_Hybrid_Seed_Dev_P Parameter: Plant Line Value: 35A19
  misc_feature: MA Experiment 20000492 PARAMETER Experiment Name: Zm_Hybrid_Seed_Dev_P Parameter: Tissue Value: Fert Kernel vs. Unfert Floret
gtgagtgctcgcggctttcccgtcttgtcccttctctctcttctctccttctccttgcttcagaaacgcaccagagagctctcggaccggattgaagtgcgccgcccgtgagctctcggccgacgctgggaacttgagcagactgggcgagcaccaggaaatttgcgccgtgggagcggtggatggacctccgggaggcgtccgtctgccacgcccacgacgagctgctggcgctgagctccgccgcggcggcagccacggcggccgaggacttcctccggtggcagttccccgagtccccgcgcgggaaagggtggtggtcggcggcgcggcagctcgtggaagacgcctggcgcagcctcggcgaggccaagaacgcggcgaggctcatggacaacgtcgtgctctgcgagttcttcaccacctggatgattctgacgcacgcttaactgaaggcgcaatgctgatggcgacgcccctgcctctttttgcaacttgttattgctccagtacttgtgcttcaatttcattcgatttctgtgtgcacatttgaataagtggttctttgctggtacaaatggaaatgacctgatccgcctgtgtcgataagattgtaataagtggttctttgctcc

SEQ ID NO: 13800 - protein, 88 aa, Zea mays subsp. mays
  peptide (1)..(88): Ceres Seq. ID no. 12378560
  misc_feature (1)..(85): Homolog of NCBI NO: 34895982 NR Description: P0011G08.33 [Oryza sativa (japonica >gi|9757664|dbj|BAB08183.1| hypothetical protein [Oryza sativa
MDLREASVCHAHDELLALSSAAAAATAAEDFLRWQFPESPRGKGWWSAARQLVEDAWRSLGEAKNAARLMDNVVLCEFFTTWMILTHA

SEQ ID NO: 13801 - DNA, 1718 bp, Zea mays subsp. mays
  misc_feature (1)..(1718): Ceres Seq. ID no. 12391622
  misc_feature: MA Experiment ID: 108523 Result: Down-regulated in Transcription
  misc_feature: MA Experiment 108523 PARAMETER Experiment Name: Zm_42deg_Heat_P Parameter: Age (day) Value: 8
  misc_feature: MA Experiment 108523 PARAMETER Experiment Name: Zm_42deg_Heat_P Parameter: Organism Value: Zea mays
  misc_feature: MA Experiment 108523 PARAMETER Experiment Name: Zm_42deg_Heat_P Parameter: Plant Line Value: 35A19
  misc_feature: MA Experiment 108523 PARAMETER Experiment Name: Zm_42deg_Heat_P Parameter: Temperature (deg C) Value: 42 vs. 22
  misc_feature: MA Experiment 108523 PARAMETER Experiment Name: Zm_42deg_Heat_P Parameter: Timepoint (hr) Value: 6
  misc_feature: MA Experiment 108523 PARAMETER Experiment Name: Zm_42deg_Heat_P Parameter: Tissue Value: Aerial
  misc_feature: MA Experiment ID: 108527 Result: Down-regulated in Transcription
  misc_feature: MA Experiment 108527 PARAMETER Experiment Name: Zm_5mM_NO_P Parameter: Age (day) Value: 8
  misc_feature: MA Experiment 108527 PARAMETER Experiment Name: Zm_5mM_NO_P Parameter: Organism Value: Zea mays
  misc_feature: MA Experiment 108527 PARAMETER Experiment Name: Zm_5mM_NO_P Parameter: Plant Line Value: 35A19
  misc_feature: MA Experiment 108527 PARAMETER Experiment Name: Zm_5mM_NO_P Parameter: Timepoint (hr) Value: 6
  misc_feature: MA Experiment 108527 PARAMETER Experiment Name: Zm_5mM_NO_P Parameter: Tissue Value: Aerial
  misc_feature: MA Experiment 108527 PARAMETER Experiment Name: Zm_5mM_NO_P Parameter: Treatment Value: 5mM NO vs. No Treatment
  misc_feature: MA Experiment ID: 108534 Result: Down-regulated in Transcription
  misc_feature: MA Experiment 108534 PARAMETER Experiment Name: Zm_4deg_Cold_P Parameter: Age (hr) Value: 8
  misc_feature: MA Experiment 108534 PARAMETER Experiment Name: Zm_4deg_Cold_P Parameter: Organism Value: Zea mays
  misc_feature: MA Experiment 108534 PARAMETER Experiment Name: Zm_4deg_Cold_P Parameter: Plant Line Value: 35A19
  misc_feature: MA Experiment 108534 PARAMETER Experiment Name: Zm_4deg_Cold_P Parameter: Temperature (deg C) Value: 4 vs. 22
  misc_feature: MA Experiment 108534 PARAMETER Experiment Name: Zm_4deg_Cold_P Parameter: Timepoint (hr) Value: 6
  misc_feature: MA Experiment 108534 PARAMETER Experiment Name: Zm_4deg_Cold_P Parameter: Tissue Value: Aerial
  misc_feature: MA Experiment ID: 108543 Result: Up-regulated in Transcription
  misc_feature: MA Experiment ID: 108559 Result: Down-regulated in Transcription
  misc_feature: MA Experiment 108559 PARAMETER Experiment Name: Zm_5mM_NO_P Parameter: Age (day) Value: 8
  misc_feature: MA Experiment 108559 PARAMETER Experiment Name: Zm_5mM_NO_P Parameter: Organism Value: Zea mays
  misc_feature: MA Experiment 108559 PARAMETER Experiment Name: Zm_5mM_NO_P Parameter: Plant Line Value: 35A19
  misc_feature: MA Experiment 108559 PARAMETER Experiment Name: Zm_5mM_NO_P Parameter: Timepoint (hr) Value: 12
  misc_feature: MA Experiment 108559 PARAMETER Experiment Name: Zm_5mM_NO_P Parameter: Tissue Value: Aerial
  misc_feature: MA Experiment 108559 PARAMETER Experiment Name: Zm_5mM_NO_P Parameter: Treatment Value: 5mM NO vs. No Treatment
  misc_feature: MA Experiment ID: 108689 Result: Up-regulated in Transcription
  misc_feature: MA Experiment 108689 PARAMETER Experiment Name: Zm_Drought_Roots_P Parameter: Age (day) Value: 9
  misc_feature: MA Experiment 108689 PARAMETER Experiment Name: Zm_Drought_Roots_P Parameter: Organism Value: Zea mays
  misc_feature: MA Experiment 108689 PARAMETER Experiment Name: Zm_Drought_Roots_P Parameter: Plant Line Value: 35A19
  misc_feature: MA Experiment 108689 PARAMETER Experiment Name: Zm_Drought_Roots_P Parameter: Timepoint (hr) Value: 24
  misc_feature: MA Experiment 108689 PARAMETER Experiment Name: Zm_Drought_Roots_P Parameter: Tissue Value: Roots
  misc_feature: MA Experiment 108689 PARAMETER Experiment Name: Zm_Drought_Roots_P Parameter: Treatment Value: Drought vs. No Drought
  misc_feature: MA Experiment ID: 20000478 Result: Down-regulated in Transcription
  misc_feature: MA Experiment 20000478 PARAMETER Experiment Name: Zm_5mM_SA_P Parameter: Age (day) Value: 11
  misc_feature: MA Experiment 20000478 PARAMETER Experiment Name: Zm_5mM_SA_P Parameter: Organism Value: Zea mays
  misc_feature: MA Experiment 20000478 PARAMETER Experiment Name: Zm_5mM_SA_P Parameter: Plant Line Value: 35A19
  misc_feature: MA Experiment 20000478 PARAMETER Experiment Name: Zm_5mM_SA_P Parameter: Timepoint (hr) Value: 72
  misc_feature: MA Experiment 20000478 PARAMETER Experiment Name: Zm_5mM_SA_P Parameter: Tissue Value: Aerial
  misc_feature: MA Experiment 20000478 PARAMETER Experiment Name: Zm_5mM_SA_P Parameter: Treatment Value: 5mM SA vs. No Treatment
  misc_feature: MA Experiment ID: 20000479 Result: Up-regulated in Transcription
  misc_feature: MA Experiment 20000479 PARAMETER Experiment Name: Zm_Drought_P Parameter: Age (day) Value: 10
  misc_feature: MA Experiment 20000479 PARAMETER Experiment Name: Zm_Drought_P Parameter: Organism Value: Zea mays
  misc_feature: MA Experiment 20000479 PARAMETER Experiment Name: Zm_Drought_P Parameter: Plant Line Value: 35A19
  misc_feature: MA Experiment 20000479 PARAMETER Experiment Name: Zm_Drought_P Parameter: Timepoint (hr) Value: 48
  misc_feature: MA Experiment 20000479 PARAMETER Experiment Name: Zm_Drought_P Parameter: Tissue Value: Aerial
  misc_feature: MA Experiment 20000479 PARAMETER Experiment Name: Zm_Drought_P Parameter: Treatment Value: Drought vs. No Drought
  misc_feature: MA Experiment ID: 20000488 Result: Down-regulated in Transcription
  misc_feature: MA Experiment 20000488 PARAMETER Experiment Name: Zm_50mM_NH4NO3_L_to_H_P Parameter: Organism Value: Zea mays
  misc_feature: MA Experiment 20000488 PARAMETER Experiment Name: Zm_50mM_NH4NO3_L_to_H_P Parameter: Timepoint (hr) Value: 8
  misc_feature: MA Experiment 20000488 PARAMETER Experiment Name: Zm_50mM_NH4NO3_L_to_H_P Parameter: Tissue Value: Leaves
  misc_feature: MA Experiment 20000488 PARAMETER Experiment Name: Zm_50mM_NH4NO3_L_to_H_P Parameter: Treatment Value: 50mM NH4NO3 vs. 100mM Mannitol
  misc_feature: MA Experiment ID: 20000535 Result: Down-regulated in Transcription
  misc_feature: MA Experiment 20000535 PARAMETER Experiment Name: Zm_Hybrid_Seed_Dev_P Parameter: DAP Value: 30 vs. 12
  misc_feature: MA Experiment 20000535 PARAMETER Experiment Name: Zm_Hybrid_Seed_Dev_P Parameter: Organism Value: Zea mays
  misc_feature: MA Experiment 20000535 PARAMETER Experiment Name: Zm_Hybrid_Seed_Dev_P Parameter: Plant Line Value: 35A19
  misc_feature: MA Experiment 20000535 PARAMETER Experiment Name: Zm_Hybrid_Seed_Dev_P Parameter: Tissue Value: Embryo vs. Unfert Floret
  misc_feature: MA Experiment ID: 20001614 Result: Down-regulated in Transcription
  misc_feature: MA Experiment 20001614 PARAMETER Experiment Name: Zm_50ppm_KNO3_L-to-H_P Parameter: Age (day) Value: 21
  misc_feature: MA Experiment 20001614 PARAMETER Experiment Name: Zm_50ppm_KNO3_L-to-H_P Parameter: Organism Value: Zea mays
  misc_feature: MA Experiment 20001614 PARAMETER Experiment Name: Zm_50ppm_KNO3_L-to-H_P Parameter: Plant Line Value: 35A19
  misc_feature: MA Experiment 20001614 PARAMETER Experiment Name: Zm_50ppm_KNO3_L-to-H_P Parameter: Timepoint (hr) Value: 48
  misc_feature: MA Experiment 20001614 PARAMETER Experiment Name: Zm_50ppm_KNO3_L-to-H_P Parameter: Tissue Value: Roots
  misc_feature: MA Experiment 20001614 PARAMETER Experiment Name: Zm_50ppm_KNO3_L-to-H_P Parameter: Treatment Value: 50ppm KNO3 vs. 50ppm KCl
atgcgaacaccttgcagtgagtgacacacctcctgctcttccatacgcctccagtagtccagtgcagcctgagctgagctgcactgaggtacgagtagctcacgacaccactcggtgataaactaatggcgtcggcctccgccgctcccgcgccggacagggaggagattgtgttcctggacgtggagacgtcaaccccgccgtgcgtgctcctcgagttcggtgccgtagtcgtgtgctcgcgcaggctcgtggacgtctcctccttcgccacgctcgtgcggcccgcgaacctcgacgcgctcccggacccgaccgcgcggagcaacggcatcacgcgcggcaccctcgctgacgcgccgccgttccgcgacgtcgccgacatggtctacgacgtcctgcacggtgggtgtaggtgtagctagtgctgcgcctgcgcgcccccgcggcctcactcgaccacatgcatgggagggtgtgggcagggcacaacatcgtgcacttcgattccatgataatcatggacgcgttcgccgagattgggcgaccccctcctcaacccaaggccatgatcgacacccttccgttgcttacccagtgtttcgggccgagagcaggggacatgaagctggcaagcttggcaaactattttggtctagggaagcaaaggcacaggagcctggatgatgtgaaaatgaatattgacgttttcaagaactgtgctacagtcctgttcctggaggaaagccttcgaggtgtgcgtgtgcctaccgttcagaacatgtcgtcggggggtgcaacaatcagaacccaaggaataacaagtgatcctgcaccgaacagggataatcccaacgagtcgttgctggtgggatcgtccactgtgcatgtggaggaaatgatgctagacaccactgtcactgtgcagacggatacaaggagctcaggtgccttttctgggttcgttgagctagacgacgtttcaacggagagtatcaagatctcagctccgctgttcctacgcccgttcggtccgagagcaatcgtccagcacaagggttccccgctccagctcatctgtccaggtctggaagtcctctgggtcaacacaaaggggttcccaaacagcccacatcgaccaaaggtgggcataaaggtcgacatacctgagaaccttagtaaggtactagggttttgcgacgatctagcgcagagctcgtcgtcgtcgccaggaccaggagcaatatgcagtaattccagatggaaatccctgattgagagagacgcggatcggcgtccaacggtctggctgaagattcctacctttggcagtggcgacaccgcagcctgccggacacatgtatacgaaaaggagtgcgacggtgtcgttccaaggcttgtttccgaaagggtcgatccatcggaactggcctcgatgcttcaagggaacaaggtggtggatgcgttcgtctcggtggaaacattcgaccactaccaaagcgctggcattcggttggttgccaataggctggatgtgcacttcaaaaggcaacagcaggcctagctagttccttatggtgctctccggtcaggccgaggctggattgaaggggattgacccatccaattctcctgtgattctcttgttaccgaatcgatccaggactatataaataagtaagtttatgtcgtctccgtatgtgcttgcaaaacttccg

SEQ ID NO: 13802 - protein, 366 aa, Zea mays subsp. mays
  peptide (1)..(366): Ceres Seq. ID no. 12391623
  misc_feature (122)..(361): Homolog of NCBI NO: 37534222 NR Description: putative exonuclease [Oryza sativa (japonica group)] >gi|15451563|gb|AAK98687.1| Putative exonuclease [Oryza >gi|31432001|gb|AAP53700.1| putative exonuclease [Oryza sativa
  misc_feature (1)..(133): Homolog of NCBI NO: 37534222 NR Description: putative exonuclease [Oryza sativa (japonica group)] >gi|15451563|gb|AAK98687.1| Putative exonuclease [Oryza >gi|31432001|gb|AAP53700.1| putative exonuclease [Oryza sativa
  misc_feature (195)..(359): Homolog of NCBI NO: 37534220 NR Description: putative exonuclease [Oryza sativa (japonica group)] >gi|15451562|gb|AAK98686.1| Putative exonuclease [Oryza >gi|31432000|gb|AAP53699.1| putative exonuclease [Oryza sativa
  misc_feature (1)..(95): Homolog of NCBI NO: 37534220 NR Description: putative exonuclease [Oryza sativa (japonica group)] >gi|15451562|gb|AAK98686.1| Putative exonuclease [Oryza >gi|31432000|gb|AAP53699.1| putative exonuclease [Oryza sativa
  misc_feature (139)..(359): Homolog of NCBI NO: 30697522 NR Description: exonuclease protein family [Arabidopsis thaliana]
  misc_feature (1)..(149): Homolog of NCBI NO: 30697522 NR Description: exonuclease protein family [Arabidopsis thaliana]
  misc_feature (113)..(356): Homolog of NCBI NO: 15240840 NR Description: exonuclease-like protein; protein id: At5g07710.1
  misc_feature (1)..(96): Homolog of NCBI NO: 15240840 NR Description: exonuclease-like protein; protein id: At5g07710.1
  misc_feature (139)..(359): Homolog of NCBI NO: 9757860 NR Description: exonuclease-like protein [Arabidopsis thaliana]
  misc_feature (1)..(96): Homolog of NCBI NO: 9757860 NR Description: exonuclease-like protein [Arabidopsis thaliana]
MHGRVWAGHNIVHFDSMIIMDAFAEIGRPPPQPKAMIDTLPLLTQCFGPRAGDMKLASLANYFGLGKQRHRSLDDVKMNIDVFKNCATVLFLEESLRGVRVPTVQNMSSGGATIRTQGITSDPAPNRDNPNESLLVGSSTVHVEEMMLDTTVTVQTDTRSSGAFSGFVELDDVSTESIKISAPLFLRPFGPRAIVQHKGSPLQLICPGLEVLWVNTKGFPNSPHRPKVGIKVDIPENLSKVLGFCDDLAQSSSSSPGPGAICSNSRWKSLIERDADRRPTVWLKIPTFGSGDTAACRTHVYEKECDGVVPRLVSERVDPSELASMLQGNKVVDAFVSVETFDHYQSAGIRLVANRLDVHFKRQQQA

SEQ ID NO: 13803 - protein, 350 aa, Zea mays subsp. mays
  peptide (1)..(350): Ceres Seq. ID no. 12391624
  misc_feature (106)..(345): Homolog of NCBI NO: 37534222 NR Description: putative exonuclease [Oryza sativa (japonica group)] >gi|15451563|gb|AAK98687.1| Putative exonuclease [Oryza >gi|31432001|gb|AAP53700.1| putative exonuclease [Oryza sativa
  misc_feature (1)..(117): Homolog of NCBI NO: 37534222 NR Description: putative exonuclease [Oryza sativa (japonica group)] >gi|15451563|gb|AAK98687.1| Putative exonuclease [Oryza >gi|31432001|gb|AAP53700.1| putative exonuclease [Oryza sativa
  misc_feature (179)..(343): Homolog of NCBI NO: 37534220 NR Description: putative exonuclease [Oryza sativa (japonica group)] >gi|15451562|gb|AAK98686.1| Putative exonuclease [Oryza >gi|31432000|gb|AAP53699.1| putative exonuclease [Oryza sativa
  misc_feature (1)..(79): Homolog of NCBI NO: 37534220 NR Description: putative exonuclease [Oryza sativa (japonica group)] >gi|15451562|gb|AAK98686.1| Putative exonuclease [Oryza >gi|31432000|gb|AAP53699.1| putative exonuclease [Oryza sativa
  misc_feature (123)..(343): Homolog of NCBI NO: 30697522 NR Description: exonuclease protein family [Arabidopsis thaliana]
  misc_feature (1)..(133): Homolog of NCBI NO: 30697522 NR Description: exonuclease protein family [Arabidopsis thaliana]
  misc_feature (97)..(340): Homolog of NCBI NO: 15240840 NR Description: exonuclease-like protein; protein id: At5g07710.1
  misc_feature (1)..(80): Homolog of NCBI NO: 15240840 NR Description: exonuclease-like protein; protein id: At5g07710.1
  misc_feature (123)..(343): Homolog of NCBI NO: 9757860 NR Description: exonuclease-like protein [Arabidopsis thaliana]
  misc_feature (1)..(80): Homolog of NCBI NO: 9757860 NR Description: exonuclease-like protein [Arabidopsis thaliana]
MIIMDAFAEIGRPPPQPKAMIDTLPLLTQCFGPRAGDMKLASLANYFGLGKQRHRSLDDVKMNIDVFKNCATVLFLEESLRGVRVPTVQNMSSGGATIRTQGITSDPAPNRDNPNESLLVGSSTVHVEEMMLDTTVTVQTDTRSSGAFSGFVELDDVSTESIKISAPLFLRPFGPRAIVQHKGSPLQLICPGLEVLWVNTKGFPNSPHRPKVGIKVDIPENLSKVLGFCDDLAQSSSSSPGPGAICSNSRWKSLIERDADRRPTVWLKIPTFGSGDTAACRTHVYEKECDGVVPRLVSERVDPSELASMLQGNKVVDAFVSVETFDHYQSAGIRLVANRLDVHFKRQQQA

SEQ ID NO: 13804 - protein, 347 aa, Zea mays subsp. mays
  peptide (1)..(347): Ceres Seq. ID no. 12391625
  misc_feature (103)..(342): Homolog of NCBI NO: 37534222 NR Description: putative exonuclease [Oryza sativa (japonica group)] >gi|15451563|gb|AAK98687.1| Putative exonuclease [Oryza >gi|31432001|gb|AAP53700.1| putative exonuclease [Oryza sativa
  misc_feature (1)..(114): Homolog of NCBI NO: 37534222 NR Description: putative exonuclease [Oryza sativa (japonica group)] >gi|15451563|gb|AAK98687.1| Putative exonuclease [Oryza >gi|31432001|gb|AAP53700.1| putative exonuclease [Oryza sativa
  misc_feature (176)..(340): Homolog of NCBI NO: 37534220 NR Description: putative exonuclease [Oryza sativa (japonica group)] >gi|15451562|gb|AAK98686.1| Putative exonuclease [Oryza >gi|31432000|gb|AAP53699.1| putative exonuclease [Oryza sativa
  misc_feature (1)..(76): Homolog of NCBI NO: 37534220 NR Description: putative exonuclease [Oryza sativa (japonica group)] >gi|15451562|gb|AAK98686.1| Putative exonuclease [Oryza >gi|31432000|gb|AAP53699.1| putative exonuclease [Oryza sativa
  misc_feature (120)..(340): Homolog of NCBI NO: 30697522 NR Description: exonuclease protein family [Arabidopsis thaliana]
  misc_feature (1)..(130): Homolog of NCBI NO: 30697522 NR Description: exonuclease protein family [Arabidopsis thaliana]
  misc_feature (94)..(337): Homolog of NCBI NO: 15240840 NR Description: exonuclease-like protein; protein id: At5g07710.1
  misc_feature (1)..(77): Homolog of NCBI NO: 15240840 NR Description: exonuclease-like protein; protein id: At5g07710.1
  misc_feature (120)..(340): Homolog of NCBI NO: 9757860 NR Description: exonuclease-like protein [Arabidopsis thaliana]
  misc_feature (1)..(77): Homolog of NCBI NO: 9757860 NR Description: exonuclease-like protein [Arabidopsis thaliana]
MDAFAEIGRPPPQPKAMIDTLPLLTQCFGPRAGDMKLASLANYFGLGKQRHRSLDDVKMNIDVFKNCATVLFLEESLRGVRVPTVQNMSSGGATIRTQGITSDPAPNRDNPNESLLVGSSTVHVEEMMLDTTVTVQTDTRSSGAFSGFVELDDVSTESIKISAPLFLRPFGPRAIVQHKGSPLQLICPGLEVLWVNTKGFPNSPHRPKVGIKVDIPENLSKVLGFCDDLAQSSSSSPGPGAICSNSRWKSLIERDADRRPTVWLKIPTFGSGDTAACRTHVYEKECDGVVPRLVSERVDPSELASMLQGNKVVDAFVSVETFDHYQSAGIRLVANRLDVHFKRQQQA

SEQ ID NO: 13805 - DNA, 863 bp, Zea mays subsp. mays
  misc_feature (1)..(863): Ceres Seq. ID no. 12419219
  misc_feature: MA Experiment ID: 108515 Result: Up-regulated in Transcription
  misc_feature: MA Experiment 108515 PARAMETER Experiment Name: Zm_2mM_SA_P Parameter: Age (day) Value: 8
  misc_feature: MA Experiment 108515 PARAMETER Experiment Name: Zm_2mM_SA_P Parameter: Organism Value: Zea mays
  misc_feature: MA Experiment 108515 PARAMETER Experiment Name: Zm_2mM_SA_P Parameter: Plant Line Value: 35A19
  misc_feature: MA Experiment 108515 PARAMETER Experiment Name: Zm_2mM_SA_P Parameter: Timepoint (hr) Value: 12
  misc_feature: MA Experiment 108515 PARAMETER Experiment Name: Zm_2mM_SA_P Parameter: Tissue Value: Aerial
  misc_feature: MA Experiment 108515 PARAMETER Experiment Name: Zm_2mM_SA_P Parameter: Treatment Value: 2mM SA vs. No Treatment
  misc_feature: MA Experiment ID: 108528 Result: Down-regulated in Transcription
  misc_feature: MA Experiment 108528 PARAMETER Experiment Name: Zm_Imbibed_Seeds_P Parameter: Age (day) Value: 5 vs. 2
  misc_feature: MA Experiment 108528 PARAMETER Experiment Name: Zm_Imbibed_Seeds_P Parameter: Organism Value: Zea mays
  misc_feature: MA Experiment 108528 PARAMETER Experiment Name: Zm_Imbibed_Seeds_P Parameter: Plant Line Value: 35A19
  misc_feature: MA Experiment 108528 PARAMETER Experiment Name: Zm_Imbibed_Seeds_P Parameter: Tissue Value: Aerial vs. Embryo
  misc_feature: MA Experiment ID: 108530 Result: Down-regulated in Transcription
  misc_feature: MA Experiment 108530 PARAMETER Experiment Name: Zm_Imbibed_Seeds_P Parameter: Age (day) Value: 6 vs. 2
  misc_feature: MA Experiment 108530 PARAMETER Experiment Name: Zm_Imbibed_Seeds_P Parameter: Organism Value: Zea mays
  misc_feature: MA Experiment 108530 PARAMETER Experiment Name: Zm_Imbibed_Seeds_P Parameter: Plant Line Value: 35A19
  misc_feature: MA Experiment 108530 PARAMETER Experiment Name: Zm_Imbibed_Seeds_P Parameter: Tissue Value: Aerial vs. Embryo
  misc_feature: MA Experiment ID: 108535 Result: Up-regulated in Transcription
  misc_feature: MA Experiment 108535 PARAMETER Experiment Name: Zm_Meristem_P Parameter: Age (day) Value: 8
  misc_feature: MA Experiment 108535 PARAMETER Experiment Name: Zm_Meristem_P Parameter: Organism Value: Zea mays
  misc_feature: MA Experiment 108535 PARAMETER Experiment Name: Zm_Meristem_P Parameter: Plant Line Value: 35A19
  misc_feature: MA Experiment 108535 PARAMETER Experiment Name: Zm_Meristem_P Parameter: Tissue Value: Root Meristem vs. Above Root Meristem
  misc_feature: MA Experiment ID: 108543 Result: Down-regulated in Transcription
  misc_feature: MA Experiment ID: 108544 Result: Down-regulated in Transcription
  misc_feature: MA Experiment ID: 108545 Result: Down-regulated in Transcription
  misc_feature: MA Experiment 108545 PARAMETER Experiment Name: Zm_Imbibed_Seeds_P Parameter: Age (day) Value: 3 vs. 2
  misc_feature: MA Experiment 108545 PARAMETER Experiment Name: Zm_Imbibed_Seeds_P Parameter: Organism Value: Zea mays
  misc_feature: MA Experiment 108545 PARAMETER Experiment Name: Zm_Imbibed_Seeds_P Parameter: Plant Line Value: 35A19
  misc_feature: MA Experiment 108545 PARAMETER Experiment Name: Zm_Imbibed_Seeds_P Parameter: Tissue Value: Aerial vs. Embryo
  misc_feature: MA Experiment ID: 108547 Result: Down-regulated in Transcription
  misc_feature: MA Experiment 108547 PARAMETER Experiment Name: Zm_Imbibed_Seeds_P Parameter: Age (day) Value: 4 vs. 2
  misc_feature: MA Experiment 108547 PARAMETER Experiment Name: Zm_Imbibed_Seeds_P Parameter: Organism Value: Zea mays
  misc_feature: MA Experiment 108547 PARAMETER Experiment Name: Zm_Imbibed_Seeds_P Parameter: Plant Line Value: 35A19
  misc_feature: MA Experiment 108547 PARAMETER Experiment Name: Zm_Imbibed_Seeds_P Parameter: Tissue Value: Aerial vs. Embryo
  misc_feature: MA Experiment ID: 20000626 Result: Up-regulated in Transcription
  misc_feature: MA Experiment 20000626 PARAMETER Experiment Name: Zm_Herbicide-Treatments_P Parameter: Timepoint (hr) Value: 12
  misc_feature: MA Experiment 20000626 PARAMETER Experiment Name: Zm_Herbicide-Treatments_P Parameter: Tissue Value: Aerial
  misc_feature: MA Experiment 20000626 PARAMETER Experiment Name: Zm_Herbicide-Treatments_P Parameter: Treatment Value: Roundup vs. No Treatment
  misc_feature: MA Experiment ID: 20000630 Result: Up-regulated in Transcription
  misc_feature: MA Experiment 20000630 PARAMETER Experiment Name: Zm_Herbicide-Treatments_P Parameter: Timepoint (hr) Value: 4
  misc_feature: MA Experiment 20000630 PARAMETER Experiment Name: Zm_Herbicide-Treatments_P Parameter: Tissue Value: Aerial
  misc_feature: MA Experiment 20000630 PARAMETER Experiment Name: Zm_Herbicide-Treatments_P Parameter: Treatment Value: Roundup vs. No Treatment
accaaaccgcttcgcttgctcctcagctccctgtcgcacacaccttacgccgggtaggcaggagcaggactcccactgtcccaccgagccagaggccctccgatccgagcgagcaggggcgccaccgtctccaatggctcggccacagcaacggtaccgcggcgtgcggcaacgccactggggctcctgggtctccgatatccgccaccctctcctgaagacgaggatctggctgggcaccttcgagacggccgaggacgcggcgcgcgcctacgacgaggcggcgcgcatcatgtgcggccctcgcgtgcgcaccaacttccccgaggacgccgccgccgacggacaggggcagccggccgcgacggcgcttctctcccccgcgctcgtcgccaagctccaccgctttcaaccttgcgtccgtgcaggcggcgcgcggcagggccgatgactccgcggcagccgccgcctcggcgcccgccgtgctngcacgcatcgcgccgatgcctgccagcaatgccagcatgcgaatcgcccccttgacgtcggcggctgtggctgcggggcactggagcggcgactttctcgaggagcagtacgtggaccagatgatcgaggagcttctagactccaacttctctgtggagatctactagtttcacccgactcctctgctccgtctcatctctctgtttggtttcgtcagctcagctcagctagggagtgtagtgagttagtagtgagttagtacagtagtatcattagccatgccaggatgaacttgaggtttctttggttagactcttgagcagtntgatgtgtatacggtagcgtcgtcagagcataaaattttttcnnctgcc

SEQ ID NO: 13806 - protein, 149 aa, Zea mays subsp. mays
  peptide (1)..(149): Ceres Seq. ID no. 12419220
  misc_feature (49)..(108): Pfam Name: AP2 domain Pfam Description: AP2 domain
  misc_feature (45)..(135): Homolog of NCBI NO: 18650662 NR Description: ethylene response factor 1 [Lycopersicon
  misc_feature (45)..(135): Homolog of NCBI NO: 15238727 NR Description: ethylene-responsive element - like protein; id: At5g25190.1, supported by cDNA: gi_15010715, supported by gi_16974344 [Arabidopsis thaliana] >gi|15010716|gb|AAK74017.1|
  misc_feature (45)..(135): Homolog of NCBI NO: 131754 NR Description: PPLZ02 PROTEIN >gi|99973|pir||S11881 hypothetical
  misc_feature (51)..(149): Homolog of NCBI NO: 38343976 NR Description: OSJNBb0022F16.15 [Oryza sativa (japonica
  misc_feature (50)..(108): Homolog of NCBI NO: 15218134 NR Description: putative ethylene responsive element; protein id:
  misc_feature (50)..(133): Homolog of NCBI NO: 15238976 NR Description: putative protein; protein id: At5g11190.1 thaliana] >gi|8953381|emb|CAB96654.1| putative protein
  misc_feature (19)..(125): Homolog of NCBI NO: 37572971 NR Description: AP2-domain DRE binding factor DBF1 [Oryza sativa
  misc_feature (50)..(108): Homolog of NCBI NO: 21553845 NR Description: putative ethylene responsive element [Arabidopsis
  misc_feature (50)..(133): Homolog of NCBI NO: 15239413 NR Description: AP2 domain containing protein; protein id:
  misc_feature (41)..(133): Homolog of NCBI NO: 21908036 NR Description: DRE binding factor 1 [Zea mays]
PNRFACSSAPCRTHLTPGRQEQDSHCPTEPEALRSERAGAPPSPMARPQQRYRGVRQRHWGSWVSDIRHPLLKTRIWLGTFETAEDAARAYDEAARIMCGPRVRTNFPEDAAADGQGQPAATALLSPALVAKLHRFQPCVRAGGARQGR

SEQ ID NO: 13807 - protein, 105 aa, Zea mays subsp. mays
  peptide (1)..(105): Ceres Seq. ID no. 12419221
  misc_feature (5)..(64): Pfam Name: AP2 domain Pfam Description: AP2 domain
  misc_feature (1)..(91): Homolog of NCBI NO: 18650662 NR Description: ethylene response factor 1 [Lycopersicon
  misc_feature (1)..(91): Homolog of NCBI NO: 15238727 NR Description: ethylene-responsive element - like protein; id: At5g25190.1, supported by cDNA: gi_15010715, supported by gi_16974344 [Arabidopsis thaliana] >gi|15010716|gb|AAK74017.1|
  misc_feature (1)..(91): Homolog of NCBI NO: 131754 NR Description: PPLZ02 PROTEIN >gi|99973|pir||S11881 hypothetical
  misc_feature (7)..(105): Homolog of NCBI NO: 38343976 NR Description: OSJNBb0022F16.15 [Oryza sativa (japonica
  misc_feature (6)..(64): Homolog of NCBI NO: 15218134 NR Description: putative ethylene responsive element; protein id:
  misc_feature (6)..(89): Homolog of NCBI NO: 15238976 NR Description: putative protein; protein id: At5g11190.1 thaliana] >gi|8953381|emb|CAB96654.1| putative protein
  misc_feature (1)..(81): Homolog of NCBI NO: 37572971 NR Description: AP2-domain DRE binding factor DBF1 [Oryza sativa
  misc_feature (6)..(64): Homolog of NCBI NO: 21553845 NR Description: putative ethylene responsive element [Arabidopsis
  misc_feature (6)..(89): Homolog of NCBI NO: 15239413 NR Description: AP2 domain containing protein; protein id:
  misc_feature (1)..(89): Homolog of NCBI NO: 21908036 NR Description: DRE binding factor 1 [Zea mays]
MARPQQRYRGVRQRHWGSWVSDIRHPLLKTRIWLGTFETAEDAARAYDEAARIMCGPRVRTNFPEDAAADGQGQPAATALLSPALVAKLHRFQPCVRAGGARQGR

SEQ ID NO: 13808 - DNA, 1161 bp, Zea mays subsp. mays
  misc_feature (1)..(1161): Ceres Seq. ID no. 13587719
  misc_feature: MA Experiment ID: 108689 Result: Down-regulated in Transcription
  misc_feature: MA Experiment 108689 PARAMETER Experiment Name: Zm_Drought_Roots_P Parameter: Age (day) Value: 9
  misc_feature: MA Experiment 108689 PARAMETER Experiment Name: Zm_Drought_Roots_P Parameter: Organism Value: Zea mays
  misc_feature: MA Experiment 108689 PARAMETER Experiment Name: Zm_Drought_Roots_P Parameter: Plant Line Value: 35A19
  misc_feature: MA Experiment 108689 PARAMETER Experiment Name: Zm_Drought_Roots_P Parameter: Timepoint (hr) Value: 24
  misc_feature: MA Experiment 108689 PARAMETER Experiment Name: Zm_Drought_Roots_P Parameter: Tissue Value: Roots
  misc_feature: MA Experiment 108689 PARAMETER Experiment Name: Zm_Drought_Roots_P Parameter: Treatment Value: Drought vs. No Drought
catcgagacacacacagaacttctcctgtcggcctactaatacagctagctagctgccctcttaggtatactgtgatggccacaaccttgtcctccacagtagtagttgcacttggtgcacctctcttcttgctccttgtaacgtgtggctcgtgcgcgaggccggtgagctttaacgcctccgacctcaccgccgatcccggctgggatgctgccagggccacctggtacggtgcgcccaccggcgccggccctgatgacgacggtggtgcctgtggattcaagaacgtgaatctgccgccgttctcggcaatgacgtcgtgcggcaacgagcccctgttcaaggacggcaagggctgcggctcctgctaccagatacgatgccaaaaccacccggcctgctccggcaacccagagacggtgatcatcactgacatgaactactaccccgtggccaagtaccacttcgacctcagcggcacggcgttcggcgccatggccaagcccggccgcaacgacgagctccgccacgccggcatcatcgacatccagttcaagagggtgccctgcaactaccccgggcagaaggtgacgttccacgtcgaggagggctccaaccccgtctacttcgcggtgctggtcgagttcgaagacggcgacggcgacgcggtgcaggtggacctcatggaggccaactctgcgtcgtggacgccgatgcgcgagtcctggggatccatctggaggctcgactccggccaccgcctcaccgcgccattctccctgcgcattacgaacgagtccggcaagacgctggtggctgaccatgtcatccccgccaactgggtgcccaacacctactaccgttctatcgtccagtattagccgctcccagctgctgcgccggccggataataatatacaattctgtgtcattgtgctttactattagtttggtattagtattgtatttctgcatgggactgatgaggcacagagctgaagtgaggtgcctcactccattgctaatttgctactaggtgttaagttggtgtgcggcttcagggagttgaagactgggaagtggaggaagcagtgctttttcccgcccattgtcgtgaatgcatgtaccagtgcgattaagattatataaattatattgac

SEQ ID NO: 13809 - protein, 293 aa, Zea mays subsp. mays
  peptide (1)..(293): Ceres Seq. ID no. 13587720
  misc_feature (197)..(278): Pfam Name: Pollen allergen Pfam Description: Pollen allergen
  misc_feature (26)..(293): Homolog of NCBI NO: 14193773 NR Description: beta-expansin 7 [Zea mays]
  misc_feature (26)..(293): Homolog of NCBI NO: 37536760 NR Description: beta-expansin EXPB3 [Oryza sativa (japonica
  misc_feature (28)..(293): Homolog of NCBI NO: 14330330 NR Description: beta expansin B3 [Festuca pratensis]
  misc_feature (26)..(293): Homolog of NCBI NO: 37536756 NR Description: beta-expansin EXPB6 [Oryza sativa (japonica
  misc_feature (57)..(293): Homolog of NCBI NO: 8118432 NR Description: beta-expansin [Oryza sativa]
  misc_feature (26)..(293): Homolog of NCBI NO: 14330328 NR Description: beta expansin B2 [Festuca pratensis]
  misc_feature (56)..(293): Homolog of NCBI NO: 37536762 NR Description: beta-expansin EXPB4 [Oryza sativa (japonica
  misc_feature (58)..(293): Homolog of NCBI NO: 8118425 NR Description: beta-expansin [Oryza sativa]
  misc_feature (57)..(293): Homolog of NCBI NO: 14193775 NR Description: beta-expansin 8 [Zea mays]
  misc_feature (26)..(293): Homolog of NCBI NO: 14193771 NR Description: beta-expansin 6 [Zea mays]
HRDTHRTSPVGLLIQLASCPLRYTVMATTLSSTVVVALGAPLFLLLVTCGSCARPVSFNASDLTADPGWDAARATWYGAPTGAGPDDDGGACGFKNVNLPPFSAMTSCGNEPLFKDGKGCGSCYQIRCQNHPACSGNPETVIITDMNYYPVAKYHFDLSGTAFGAMAKPGRNDELRHAGIIDIQFKRVPCNYPGQKVTFHVEEGSNPVYFAVLVEFEDGDGDAVQVDLMEANSASWTPMRESWGSIWRLDSGHRLTAPFSLRITNESGKTLVADHVIPANWVPNTYYRSIVQY

SEQ ID NO: 13810 - protein, 268 aa, Zea mays subsp. mays
  peptide (1)..(268): Ceres Seq. ID no. 13587721
  misc_feature (172)..(253): Pfam Name: Pollen allergen Pfam Description: Pollen allergen
  misc_feature (1)..(268): Homolog of NCBI NO: 14193773 NR Description: beta-expansin 7 [Zea mays]
  misc_feature (1)..(268): Homolog of NCBI NO: 37536760 NR Description: beta-expansin EXPB3 [Oryza sativa (japonica
  misc_feature (3)..(268): Homolog of NCBI NO: 14330330 NR Description: beta expansin B3 [Festuca pratensis]
  misc_feature (1)..(268): Homolog of NCBI NO: 37536756 NR Description: beta-expansin EXPB6 [Oryza sativa (japonica
  misc_feature (32)..(268): Homolog of NCBI NO: 8118432 NR Description: beta-expansin [Oryza sativa]
  misc_feature (1)..(268): Homolog of NCBI NO: 14330328 NR Description: beta expansin B2 [Festuca pratensis]
  misc_feature (31)..(268): Homolog of NCBI NO: 37536762 NR Description: beta-expansin EXPB4 [Oryza sativa (japonica
  misc_feature (33)..(268): Homolog of NCBI NO: 8118425 NR Description: beta-expansin [Oryza sativa]
  misc_feature (32)..(268): Homolog of NCBI NO: 14193775 NR Description: beta-expansin 8 [Zea mays]
  misc_feature (1)..(268): Homolog of NCBI NO: 14193771 NR Description: beta-expansin 6 [Zea mays]
MATTLSSTVVVALGAPLFLLLVTCGSCARPVSFNASDLTADPGWDAARATWYGAPTGAGPDDDGGACGFKNVNLPPFSAMTSCGNEPLFKDGKGCGSCYQIRCQNHPACSGNPETVIITDMNYYPVAKYHFDLSGTAFGAMAKPGRNDELRHAGIIDIQFKRVPCNYPGQKVTFHVEEGSNPVYFAVLVEFEDGDGDAVQVDLMEANSASWTPMRESWGSIWRLDSGHRLTAPFSLRITNESGKTLVADHVIPANWVPNTYYRSIVQY

SEQ ID NO: 13811 - protein, 189 aa, Zea mays subsp. mays
  peptide (1)..(189): Ceres Seq. ID no. 13587722
  misc_feature (93)..(174): Pfam Name: Pollen allergen Pfam Description: Pollen allergen
  misc_feature (1)..(189): Homolog of NCBI NO: 14193773 NR Description: beta-expansin 7 [Zea mays]
  misc_feature (1)..(189): Homolog of NCBI NO: 37536760 NR Description: beta-expansin EXPB3 [Oryza sativa (japonica
  misc_feature (1)..(189): Homolog of NCBI NO: 14330330 NR Description: beta expansin B3 [Festuca pratensis]
  misc_feature (1)..(189): Homolog of NCBI NO: 37536756 NR Description: beta-expansin EXPB6 [Oryza sativa (japonica
  misc_feature (1)..(189): Homolog of NCBI NO: 8118432 NR Description: beta-expansin [Oryza sativa]
  misc_feature (1)..(189): Homolog of NCBI NO: 14330328 NR Description: beta expansin B2 [Festuca pratensis]
  misc_feature (1)..(189): Homolog of NCBI NO: 37536762 NR Description: beta-expansin EXPB4 [Oryza sativa (japonica
  misc_feature (1)..(189): Homolog of NCBI NO: 8118425 NR Description: beta-expansin [Oryza sativa]
  misc_feature (1)..(189): Homolog of NCBI NO: 14193775 NR Description: beta-expansin 8 [Zea mays]
  misc_feature (1)..(189): Homolog of NCBI NO: 14193771 NR Description: beta-expansin 6 [Zea mays]
MTSCGNEPLFKDGKGCGSCYQIRCQNHPACSGNPETVIITDMNYYPVAKYHFDLSGTAFGAMAKPGRNDELRHAGIIDIQFKRVPCNYPGQKVTFHVEEGSNPVYFAVLVEFEDGDGDAVQVDLMEANSASWTPMRESWGSIWRLDSGHRLTAPFSLRITNESGKTLVADHVIPANWVPNTYYRSIVQY

SEQ ID NO: 13812 - DNA, 2645 bp, Zea mays subsp. mays
  misc_feature (1)..(2645): Ceres Seq. ID no. 12390337
  misc_feature: MA Experiment ID: 108523 Result: Up-regulated in Transcription
  misc_feature: MA Experiment 108523 PARAMETER Experiment Name: Zm_42deg_Heat_P Parameter: Age (day) Value: 8
  misc_feature: MA Experiment 108523 PARAMETER Experiment Name: Zm_42deg_Heat_P Parameter: Organism Value: Zea mays
  misc_feature: MA Experiment 108523 PARAMETER Experiment Name: Zm_42deg_Heat_P Parameter: Plant Line Value: 35A19
  misc_feature: MA Experiment 108523 PARAMETER Experiment Name: Zm_42deg_Heat_P Parameter: Temperature (deg C) Value: 42 vs. 22
  misc_feature: MA Experiment 108523 PARAMETER Experiment Name: Zm_42deg_Heat_P Parameter: Timepoint (hr) Value: 6
  misc_feature: MA Experiment 108523 PARAMETER Experiment Name: Zm_42deg_Heat_P Parameter: Tissue Value: Aerial
  misc_feature: MA Experiment ID: 20000487 Result: Up-regulated in Transcription
  misc_feature: MA Experiment 20000487 PARAMETER Experiment Name: Zm_50mM_NH4NO3_L_to_H_P Parameter: Organism Value: Zea mays
  misc_feature: MA Experiment 20000487 PARAMETER Experiment Name: Zm_50mM_NH4NO3_L_to_H_P Parameter: Timepoint (hr) Value: 4
  misc_feature: MA Experiment 20000487 PARAMETER Experiment Name: Zm_50mM_NH4NO3_L_to_H_P Parameter: Tissue Value: Leaves
  misc_feature: MA Experiment 20000487 PARAMETER Experiment Name: Zm_50mM_NH4NO3_L_to_H_P Parameter: Treatment Value: 50mM NH4NO3 vs. 100mM Mannitol
  misc_feature: MA Experiment ID: 20001613 Result: Up-regulated in Transcription
  misc_feature: MA Experiment 20001613 PARAMETER Experiment Name: Zm_50ppm_KNO3_L-to-H_P Parameter: Age (day) Value: 20
  misc_feature: MA Experiment 20001613 PARAMETER Experiment Name: Zm_50ppm_KNO3_L-to-H_P Parameter: Organism Value: Zea mays
  misc_feature: MA Experiment 20001613 PARAMETER Experiment Name: Zm_50ppm_KNO3_L-to-H_P Parameter: Plant Line Value: 35A19
  misc_feature: MA Experiment 20001613 PARAMETER Experiment Name: Zm_50ppm_KNO3_L-to-H_P Parameter: Timepoint (hr) Value: 24
  misc_feature: MA Experiment 20001613 PARAMETER Experiment Name: Zm_50ppm_KNO3_L-to-H_P Parameter: Tissue Value: Roots
  misc_feature: MA Experiment 20001613 PARAMETER Experiment Name: Zm_50ppm_KNO3_L-to-H_P Parameter: Treatment Value: 50ppm KNO3 vs. 50ppm KCl
agaacccaaccccaatccaacggctgcgagagctctcgtcgcgccgccgccgccacctgacagtctcctctcccctgcgcgcgcacgacgagcgccgggcaggaacagccgccaactccctccaacttccttaaaccctagcgacagcagcaggcaaccagcgccgacgaggaggaggagcgcggagtagaggggctccggcgaccgcgtcggagatggcagcgagccacggcgcggggacgctcaagtccacctccatcaacggggtcaagctctactcgctcaccggcggccgctatgtcgccccctgggtcgtcgcgaagaagaagcgcgccctccgaaaggacaaagagtatcagcggaggctggatttgatccacgacctgaggttcgagacagccaccaccaagatcaagctgacgcccgatgaccagtacctgatcgcctcaggtatttaccccccgcaagttaaagtctacgagttgaaggaattgtcgatgaagttcgagcggcacatgatctcagaaattgtagatttccagatccttggtgatgactattccaaactcgcgtttttgtgtgctgatcgttctgtaaatttgcacgctaagtatggaagccattatagcctgagaattccaagagtgggaagggacatggcctacgattgctggtcctgcgacttgctatgtgctgcttcatcaccagatctgtacaggataaacctagagcagggacgattccttgcttctctttcctccgaatcaccagcaataaatgcggttacacgaagtaagatccatgggcttgttgcttgcggtggtgaggatggtgcggttgagtgttttgatatgaggaaaaaaacttctgttggcagaattaatattccagctgttagttctgaagattattctcaggaggtcacgtctttgcaatttgatgaagatcaaggatactttatggcagtggggaccagtacaggaaagatatcaatatatgatttacgcatgtcttctcctctgagagttaaggatcacatgtatggtagcccaatattaaatatcaaatggcaccagacacttaattctactgaacctaaactgatcactgctgataagcacatagtgagaatctgggatcctaatacaggaaataacatgactagcattgaaccagatggtggtgctatcaatgatgtctgtgtcttccggaatagtggtttagtgctattagccctggacaatagccagatacctgcccacttcattcctgcgctcggccctgctccaaagtggtgttcacatcttgataacttaactgaggagatggaagagaaaccagatacaacgctgtttgatgagtacaagttcttgactaaagaagagatggagcgactgaaccttactcaatacattggcagcagtgctgtaagagcatatttacatggatttattgtacgttatgaactatacaagaagcaacgggcagcagttgctcctgttgagtacgagacaattaaggatgagataaagaaaaagaaattagaagctcagagaaaatctcgtataacgcaagtcgtcaaaataccgaaggttaacaggcagattatggacagtataagggaagatgaaatagatcttgatatggagaatgttgataaatcaagtattaagaagaagaaaagaaaactagaactgaataaggccattttggatgatgatcggttcaaagaaatgtttgagaataaggattttgaaattgacgaagaatcaaaagaatacctcgcacttcatcctcaggcagccacaaaggagcctcgcctgattgaagaacattttgatagtgttagcgaggacgaccaacaatctgatggtaacgcatctgacactctagcggaatctgacagtgatgatgtcatgcataattcaaagcgtataaggttatacgaggtcaaggatgaacaccatgcggaagcatttttgaacagcgtctctctttcaaacgaggatgccgctccccttgaggataggatagctgccctggaaaggaaacagaactccaaagcacttgatgcggtcaagtacgggcctggtggctcacgagagatttcgtttttctctaaaagccggagaaggcacaaggaagagtcgtctagcgacgacgaacccaagggtgtcaaaaagagagctgtgcagccgctgggcttgaagcagggaaaagccgagttctatatgtttggcggaaatcgtggcagaggtagaggcggtagtggcagaggtagaagcgggcaaggaagaggtggaggtggaggtggaggaggaagaggtggaggtggaagaggtggaggtaggggcaggggcaggggcagaggatgaatggggcctgtaacattgaccccgttcggccgttcctgcctttgcaggggttttggtaagcttgaaaatggatggatcctgcacatgcagtgggtagaaagtgtgttccttcacaacataggcaagagctagagtaactgaggattgctgcttcagaatttttgggaagagaaatttgttagaagacaatattacatatcttttggtctaccttgtaacggattgttgcattctggtgggtgtctatgggtacggtatagcatttttttc

SEQ ID NO: 13813 - protein, 719 aa, Zea mays subsp. mays
  peptide (1)..(719): Ceres Seq. ID no. 12390338
  misc_feature (627)..(715): Pfam Name: Bindin Pfam Description: Bindin
  misc_feature (4)..(716): Homolog of NCBI NO: 11357620 NR Description: hypothetical protein F24I3.70 - Arabidopsis >gi|6911869|emb|CAB72169.1| putative protein [Arabidopsis >gi|17979016|gb|AAL47467.1| AT3g56990/F24I3_70 [Arabidopsis
  misc_feature (4)..(716): Homolog of NCBI NO: 15230179 NR Description: putative protein; protein id: At3g56990.1,
  misc_feature (10)..(719): Homolog of NCBI NO: 28502998 NR Description: Similar to hypothetical protein FLJ14075 [Danio
  misc_feature (10)..(719): Homolog of NCBI NO: 37362218 NR Description: hypothetical protein FLJ14075-like protein [Danio
  misc_feature (10)..(566): Homolog of NCBI NO: 33416707 NR Description: Unknown (protein for MGC:69094) [Xenopus laevis]
  misc_feature (10)..(566): Homolog of NCBI NO: 13477303 NR Description: Similar to hypothetical protein FLJ14075 [Homo
  misc_feature (10)..(566): Homolog of NCBI NO: 38049298 NR Description: similar to FLJ14075 protein [Mus musculus]
  misc_feature (10)..(335): Homolog of NCBI NO: 34863207 NR Description: similar to hypothetical protein FLJ14075 [Rattus
  misc_feature (396)..(566): Homolog of NCBI NO: 34863207 NR Description: similar to hypothetical protein FLJ14075 [Rattus
  misc_feature (330)..(394): Homolog of NCBI NO: 34863207 NR Description: similar to hypothetical protein FLJ14075 [Rattus
MAASHGAGTLKSTSINGVKLYSLTGGRYVAPWVVAKKKRALRKDKEYQRRLDLIHDLRFETATTKIKLTPDDQYLIASGIYPPQVKVYELKELSMKFERHMISEIVDFQILGDDYSKLAFLCADRSVNLHAKYGSHYSLRIPRVGRDMAYDCWSCDLLCAASSPDLYRINLEQGRFLASLSSESPAINAVTRSKIHGLVACGGEDGAVECFDMRKKTSVGRINIPAVSSEDYSQEVTSLQFDEDQGYFMAVGTSTGKISIYDLRMSSPLRVKDHMYGSPILNIKWHQTLNSTEPKLITADKHIVRIWDPNTGNNMTSIEPDGGAINDVCVFRNSGLVLLALDNSQIPAHFIPALGPAPKWCSHLDNLTEEMEEKPDTTLFDEYKFLTKEEMERLNLTQYIGSSAVRAYLHGFIVRYELYKKQRAAVAPVEYETIKDEIKKKKLEAQRKSRITQVVKIPKVNRQIMDSIREDEIDLDMENVDKSSIKKKKRKLELNKAILDDDRFKEMFENKDFEIDEESKEYLALHPQAATKEPRLIEEHFDSVSEDDQQSDGNASDTLAESDSDDVMHNSKRIRLYEVKDEHHAEAFLNSVSLSNEDAAPLEDRIAALERKQNSKALDAVKYGPGGSREISFFSKSRRRHKEESSSDDEPKGVKKRAVQPLGLKQGKAEFYMFGGNRGRGRGGSGRGRSGQGRGGGGGGGGRGGGGRGGGRGRGRGRG

SEQ ID NO: 13814 - protein, 625 aa, Zea mays subsp. mays
  peptide (1)..(625): Ceres Seq. ID no. 12390339
  misc_feature (533)..(621): Pfam Name: Bindin Pfam Description: Bindin
  misc_feature (1)..(622): Homolog of NCBI NO: 11357620 NR Description: hypothetical protein F24I3.70 - Arabidopsis >gi|6911869|emb|CAB72169.1| putative protein [Arabidopsis >gi|17979016|gb|AAL47467.1| AT3g56990/F24I3_70 [Arabidopsis
  misc_feature (1)..(622): Homolog of NCBI NO: 15230179 NR Description: putative protein; protein id: At3g56990.1,
  misc_feature (1)..(625): Homolog of NCBI NO: 28502998 NR Description: Similar to hypothetical protein FLJ14075 [Danio
  misc_feature (1)..(625): Homolog of NCBI NO: 37362218 NR Description: hypothetical protein FLJ14075-like protein [Danio
  misc_feature (1)..(472): Homolog of NCBI NO: 33416707 NR Description: Unknown (protein for MGC:69094) [Xenopus laevis]
  misc_feature (1)..(472): Homolog of NCBI NO: 13477303 NR Description: Similar to hypothetical protein FLJ14075 [Homo
  misc_feature (1)..(472): Homolog of NCBI NO: 38049298 NR Description: similar to FLJ14075 protein [Mus musculus]
  misc_feature (1)..(241): Homolog of NCBI NO: 34863207 NR Description: similar to hypothetical protein FLJ14075 [Rattus
  misc_feature (302)..(472): Homolog of NCBI NO: 34863207 NR Description: similar to hypothetical protein FLJ14075 [Rattus
  misc_feature (236)..(300): Homolog of NCBI NO: 34863207 NR Description: similar to hypothetical protein FLJ14075 [Rattus
MKFERHMISEIVDFQILGDDYSKLAFLCADRSVNLHAKYGSHYSLRIPRVGRDMAYDCWSCDLLCAASSPDLYRINLEQGRFLASLSSESPAINAVTRSKIHGLVACGGEDGAVECFDMRKKTSVGRINIPAVSSEDYSQEVTSLQFDEDQGYFMAVGTSTGKISIYDLRMSSPLRVKDHMYGSPILNIKWHQTLNSTEPKLITADKHIVRIWDPNTGNNMTSIEPDGGAINDVCVFRNSGLVLLALDNSQIPAHFIPALGPAPKWCSHLDNLTEEMEEKPDTTLFDEYKFLTKEEMERLNLTQYIGSSAVRAYLHGFIVRYELYKKQRAAVAPVEYETIKDEIKKKKLEAQRKSRITQVVKIPKVNRQIMDSIREDEIDLDMENVDKSSIKKKKRKLELNKAILDDDRFKEMFENKDFEIDEESKEYLALHPQAATKEPRLIEEHFDSVSEDDQQSDGNASDTLAESDSDDVMHNSKRIRLYEVKDEHHAEAFLNSVSLSNEDAAPLEDRIAALERKQNSKALDAVKYGPGGSREISFFSKSRRRHKEESSSDDEPKGVKKRAVQPLGLKQGKAEFYMFGGNRGRGRGGSGRGRSGQGRGGGGGGGGRGGGGRGGGRGRGRGRG

SEQ ID NO: 13815 - protein, 619 aa, Zea mays subsp. mays
  peptide (1)..(619): Ceres Seq. ID no. 12390340
  misc_feature (527)..(615): Pfam Name: Bindin Pfam Description: Bindin
  misc_feature (1)..(616): Homolog of NCBI NO: 11357620 NR Description: hypothetical protein F24I3.70 - Arabidopsis >gi|6911869|emb|CAB72169.1| putative protein [Arabidopsis >gi|17979016|gb|AAL47467.1| AT3g56990/F24I3_70 [Arabidopsis
  misc_feature (1)..(616): Homolog of NCBI NO: 15230179 NR Description: putative protein; protein id: At3g56990.1,
  misc_feature (1)..(619): Homolog of NCBI NO: 28502998 NR Description: Similar to hypothetical protein FLJ14075 [Danio
  misc_feature (1)..(619): Homolog of NCBI NO: 37362218 NR Description: hypothetical protein FLJ14075-like protein [Danio
  misc_feature (1)..(466): Homolog of NCBI NO: 33416707 NR Description: Unknown (protein for MGC:69094) [Xenopus laevis]
  misc_feature (1)..(466): Homolog of NCBI NO: 13477303 NR Description: Similar to hypothetical protein FLJ14075 [Homo
  misc_feature (1)..(466): Homolog of NCBI NO: 38049298 NR Description: similar to FLJ14075 protein [Mus musculus]
  misc_feature (1)..(235): Homolog of NCBI NO: 34863207 NR Description: similar to hypothetical protein FLJ14075 [Rattus
  misc_feature (296)..(466): Homolog of NCBI NO: 34863207 NR Description: similar to hypothetical protein FLJ14075 [Rattus
  misc_feature (230)..(294): Homolog of NCBI NO: 34863207 NR Description: similar to hypothetical protein FLJ14075 [Rattus
MISEIVDFQILGDDYSKLAFLCADRSVNLHAKYGSHYSLRIPRVGRDMAYDCWSCDLLCAASSPDLYRINLEQGRFLASLSSESPAINAVTRSKIHGLVACGGEDGAVECFDMRKKTSVGRINIPAVSSEDYSQEVTSLQFDEDQGYFMAVGTSTGKISIYDLRMSSPLRVKDHMYGSPILNIKWHQTLNSTEPKLITADKHIVRIWDPNTGNNMTSIEPDGGAINDVCVFRNSGLVLLALDNSQIPAHFIPALGPAPKWCSHLDNLTEEMEEKPDTTLFDEYKFLTKEEMERLNLTQYIGSSAVRAYLHGFIVRYELYKKQRAAVAPVEYETIKDEIKKKKLEAQRKSRITQVVKIPKVNRQIMDSIREDEIDLDMENVDKSSIKKKKRKLELNKAILDDDRFKEMFENKDFEIDEESKEYLALHPQAATKEPRLIEEHFDSVSEDDQQSDGNASDTLAESDSDDVMHNSKRIRLYEVKDEHHAEAFLNSVSLSNEDAAPLEDRIAALERKQNSKALDAVKYGPGGSREISFFSKSRRRHKEESSSDDEPKGVKKRAVQPLGLKQGKAEFYMFGGNRGRGRGGSGRGRSGQGRGGGGGGGGRGGGGRGGGRGRGRGRG

SEQ ID NO: 13816 - DNA, 1384 bp, Zea mays subsp. mays
  misc_feature (1)..(1384): Ceres Seq. ID no. 12435980
  misc_feature: MA Experiment ID: 108536 Result: Up-regulated in Transcription
  misc_feature: MA Experiment 108536 PARAMETER Experiment Name: Zm_Meristem_P Parameter: Age (day) Value: 8
  misc_feature: MA Experiment 108536 PARAMETER Experiment Name: Zm_Meristem_P Parameter: Organism Value: Zea mays
  misc_feature: MA Experiment 108536 PARAMETER Experiment Name: Zm_Meristem_P Parameter: Plant Line Value: 35A19
  misc_feature: MA Experiment 108536 PARAMETER Experiment Name: Zm_Meristem_P Parameter: Tissue Value: Shoot Meristem vs. Above Shoot Meristem
  misc_feature: MA Experiment ID: 108559 Result: Up-regulated in Transcription
  misc_feature: MA Experiment 108559 PARAMETER Experiment Name: Zm_5mM_NO_P Parameter: Age (day) Value: 8
  misc_feature: MA Experiment 108559 PARAMETER Experiment Name: Zm_5mM_NO_P Parameter: Organism Value: Zea mays
  misc_feature: MA Experiment 108559 PARAMETER Experiment Name: Zm_5mM_NO_P Parameter: Plant Line Value: 35A19
  misc_feature: MA Experiment 108559 PARAMETER Experiment Name: Zm_5mM_NO_P Parameter: Timepoint (hr) Value: 12
  misc_feature: MA Experiment 108559 PARAMETER Experiment Name: Zm_5mM_NO_P Parameter: Tissue Value: Aerial
  misc_feature: MA Experiment 108559 PARAMETER Experiment Name: Zm_5mM_NO_P Parameter: Treatment Value: 5mM NO vs. No Treatment
aaggaaacgtcacgtcaccaccacacacctcttcggctcttcctcttctcctccgtatagcggcgggcctccgtcgccccccttccaccccgttttgccgccccgcaggccacagcccaaaatcctcctcgtcgctggtgccctctccgcggcctcctccgccagccatggccgccgctgggcccgggctctactccgacatcgggaagaaggcaagaggtctcctgtacaaggactaccacactgaccggaagttcacgctcaccacttacgccgccaacggagctttcaaggcgcgtgtcaccatggacatgaagcaccgcgtcgtccgcgccatgatcgcgggtagcatgggagacggtgatggcgcacccgtgcatgtccaggataagaccgagtcggccattactgctgcaagcacaaggaaagatgaagctatctttaataaaatccagggccagctgaagcacaacaatgtgactgtggatgtgaaagcaacttcagaatcaaaagtgacaactacaatcacagttcacgagctagccacaccaggcctgaaggcatttttatgcattcctttcccgtacaagaaatctgcaaaggctgaactccagtacttgcaccaccatgctggtgttgctgcaagtgttggcctaaatgcaaaccctgtcgttaagctttctggtgtattcggaactaaaactgtttctgttggtgctgatgttgcatttgatacttcatccgggaacttaaccaaatacaatgctggactgagctactccacgtctgacttcgttgctgcagctactttgaacaacaaaggagacaagatcgccgcttcctactaccattcggtaagtccaaccacagctgttggaggagagctgagccacagcttctcgaccaacgggagcaccatcaccttcgggacgcagcatgccctggaccgtctgaccactgtgaaggcacgattcaacaactgcggcatggcaagcgcactgatccaacacaagtggaggcccaagtctttggtcaccatctccatggaggtggacaccaaggccatcgagaagagctccaagattgagctctccctcgtcctgaagccctgaggtcaccgccagcttctagttttgggatatactaggtctattttttttatctgcagctgaagtctccagcaaacaagtaaacctgtcaactttggtgccgatcccacaaactcaagttcacggtctctttggtggaaaactatgcggttttgtataccactggttgatgatgtttggagaaagttcagtatggctcaccagtcaccactgtctctcagattttaactgtttgatttgtcgattctttattcatacagatcgcaatttttttc

SEQ ID NO: 13817 - protein, 369 aa, Zea mays subsp. mays
  peptide (1)..(369): Ceres Seq. ID no. 12435981
  misc_feature (133)..(361): Pfam Name: Eukaryotic porin Pfam Description: Eukaryotic porin
  misc_feature (56)..(95): Homolog of NCBI NO: 5929932 NR Description: voltage-dependent anion channel protein 2 [Zea
  misc_feature (134)..(369): Homolog of NCBI NO: 5929928 NR Description: voltage-dependent anion channel protein 1a [Zea
  misc_feature (60)..(94): Homolog of NCBI NO: 5929928 NR Description: voltage-dependent anion channel protein 1a [Zea
  misc_feature (133)..(369): Homolog of NCBI NO: 18076158 NR Description: voltage-dependent anion channel [Oryza sativa
  misc_feature (133)..(369): Homolog of NCBI NO: 2130108 NR Description: porin VDAC2 - wheat (fragment)
  misc_feature (133)..(369): Homolog of NCBI NO: 5929932 NR Description: voltage-dependent anion channel protein 2 [Zea
  misc_feature (61)..(95): Homolog of NCBI NO: 2130108 NR Description: porin VDAC2 - wheat (fragment)
  misc_feature (135)..(368): Homolog of NCBI NO: 34912192 NR Description: voltage-dependent anion channel [Oryza sativa
  misc_feature (61)..(94): Homolog of NCBI NO: 34912192 NR Description: voltage-dependent anion channel [Oryza sativa
  misc_feature (134)..(369): Homolog of NCBI NO: 1172553 NR Description: Outer mitochondrial membrane protein porin
GNVTSPPHTSSALPLLLRIAAGLRRPPSTPFCRPAGHSPKSSSSLVPSPRPPPPAMAAAGPGLYSDIGKKARGLLYKDYHTDRKFTLTTYAANGAFKARVTMDMKHRVVRAMIAGSMGDGDGAPVHVQDKTESAITAASTRKDEAIFNKIQGQLKHNNVTVDVKATSESKVTTTITVHELATPGLKAFLCIPFPYKKSAKAELQYLHHHAGVAASVGLNANPVVKLSGVFGTKTVSVGADVAFDTSSGNLTKYNAGLSYSTSDFVAAATLNNKGDKIAASYYHSVSPTTAVGGELSHSFSTNGSTITFGTQHALDRLTTVKARFNNCGMASALIQHKWRPKSLVTISMEVDTKAIEKSSKIELSLVLKP

SEQ ID NO: 13818 - protein, 314 aa, Zea mays subsp. mays
  peptide (1)..(314): Ceres Seq. ID no. 12435982
  misc_feature (78)..(306): Pfam Name: Eukaryotic porin Pfam Description: Eukaryotic porin
  misc_feature (78)..(314): Homolog of NCBI NO: 5929932 NR Description: voltage-dependent anion channel protein 2 [Zea
  misc_feature (1)..(40): Homolog of NCBI NO: 5929932 NR Description: voltage-dependent anion channel protein 2 [Zea
  misc_feature (79)..(314): Homolog of NCBI NO: 5929928 NR Description: voltage-dependent anion channel protein 1a [Zea
  misc_feature (5)..(39): Homolog of NCBI NO: 5929928 NR Description: voltage-dependent anion channel protein 1a [Zea
  misc_feature (78)..(314): Homolog of NCBI NO: 18076158 NR Description: voltage-dependent anion channel [Oryza sativa
  misc_feature (78)..(314): Homolog of NCBI NO: 2130108 NR Description: porin VDAC2 - wheat (fragment)
  misc_feature (6)..(40): Homolog of NCBI NO: 2130108 NR Description: porin VDAC2 - wheat (fragment)
  misc_feature (80)..(313): Homolog of NCBI NO: 34912192 NR Description: voltage-dependent anion channel [Oryza sativa
  misc_feature (6)..(39): Homolog of NCBI NO: 34912192 NR Description: voltage-dependent anion channel [Oryza sativa
  misc_feature (79)..(314): Homolog of NCBI NO: 1172553 NR Description: Outer mitochondrial membrane protein porin
MAAAGPGLYSDIGKKARGLLYKDYHTDRKFTLTTYAANGAFKARVTMDMKHRVVRAMIAGSMGDGDGAPVHVQDKTESAITAASTRKDEAIFNKIQGQLKHNNVTVDVKATSESKVTTTITVHELATPGLKAFLCIPFPYKKSAKAELQYLHHHAGVAASVGLNANPVVKLSGVFGTKTVSVGADVAFDTSSGNLTKYNAGLSYSTSDFVAAATLNNKGDKIAASYYHSVSPTTAVGGELSHSFSTNGSTITFGTQHALDRLTTVKARFNNCGMASALIQHKWRPKSLVTISMEVDTKAIEKSSKIELSLVLKP

SEQ ID NO: 13819 - protein, 268 aa, Zea mays subsp. mays
  peptide (1)..(268): Ceres Seq. ID no. 12435983
  misc_feature (32)..(260): Pfam Name: Eukaryotic porin Pfam Description: Eukaryotic porin
  misc_feature (32)..(268): Homolog of NCBI NO: 5929932 NR Description: voltage-dependent anion channel protein 2 [Zea
  misc_feature (33)..(268): Homolog of NCBI NO: 5929928 NR Description: voltage-dependent anion channel protein 1a [Zea
  misc_feature (32)..(268): Homolog of NCBI NO: 18076158 NR Description: voltage-dependent anion channel [Oryza sativa
  misc_feature (32)..(268): Homolog of NCBI NO: 2130108 NR Description: porin VDAC2 - wheat (fragment)
  misc_feature (34)..(267): Homolog of NCBI NO: 34912192 NR Description: voltage-dependent anion channel [Oryza sativa
  misc_feature (33)..(268): Homolog of NCBI NO: 1172553 NR Description: Outer mitochondrial membrane protein porin
  misc_feature (33)..(268): Homolog of NCBI NO: 2130109 NR Description: porin VDAC3 - wheat >gi|558652|emb|CAA57646.1|
  misc_feature (32)..(268): Homolog of NCBI NO: 2130107 NR Description: porin (clone Tavdac1) - wheat
  misc_feature (33)..(267): Homolog of NCBI NO: 1172557 NR Description: Outer plastidial membrane protein porin
  misc_feature (30)..(268): Homolog of NCBI NO: 36957170 NR Description: VDAC1.1 [Lotus corniculatus var. japonicus]
MDMKHRVVRAMIAGSMGDGDGAPVHVQDKTESAITAASTRKDEAIFNKIQGQLKHNNVTVDVKATSESKVTTTITVHELATPGLKAFLCIPFPYKKSAKAELQYLHHHAGVAASVGLNANPVVKLSGVFGTKTVSVGADVAFDTSSGNLTKYNAGLSYSTSDFVAAATLNNKGDKIAASYYHSVSPTTAVGGELSHSFSTNGSTITFGTQHALDRLTTVKARFNNCGMASALIQHKWRPKSLVTISMEVDTKAIEKSSKIELSLVLKP

SEQ ID NO: 13820 - DNA, 436 bp, Zea mays subsp. mays
  misc_feature (1)..(436): Ceres Seq. ID no. 2816405
  misc_feature: MA Experiment ID: 108534 Result: Up-regulated in Transcription
  misc_feature: MA Experiment 108534 PARAMETER Experiment Name: Zm_4deg_Cold_P Parameter: Age (hr) Value: 8
  misc_feature: MA Experiment 108534 PARAMETER Experiment Name: Zm_4deg_Cold_P Parameter: Organism Value: Zea mays
  misc_feature: MA Experiment 108534 PARAMETER Experiment Name: Zm_4deg_Cold_P Parameter: Plant Line Value: 35A19
  misc_feature: MA Experiment 108534 PARAMETER Experiment Name: Zm_4deg_Cold_P Parameter: Temperature (deg C) Value: 4 vs. 22
  misc_feature: MA Experiment 108534 PARAMETER Experiment Name: Zm_4deg_Cold_P Parameter: Timepoint (hr) Value: 6
  misc_feature: MA Experiment 108534 PARAMETER Experiment Name: Zm_4deg_Cold_P Parameter: Tissue Value: Aerial
  misc_feature: MA Experiment ID: 108535 Result: Down-regulated in Transcription
  misc_feature: MA Experiment 108535 PARAMETER Experiment Name: Zm_Meristem_P Parameter: Age (day) Value: 8
  misc_feature: MA Experiment 108535 PARAMETER Experiment Name: Zm_Meristem_P Parameter: Organism Value: Zea mays
  misc_feature: MA Experiment 108535 PARAMETER Experiment Name: Zm_Meristem_P Parameter: Plant Line Value: 35A19
  misc_feature: MA Experiment 108535 PARAMETER Experiment Name: Zm_Meristem_P Parameter: Tissue Value: Root Meristem vs. Above Root Meristem
  misc_feature: MA Experiment ID: 108544 Result: Up-regulated in Transcription
  misc_feature: MA Experiment ID: 20000477 Result: Up-regulated in Transcription
  misc_feature: MA Experiment 20000477 PARAMETER Experiment Name: Zm_5mM_SA_P Parameter: Age (day) Value: 10
  misc_feature: MA Experiment 20000477 PARAMETER Experiment Name: Zm_5mM_SA_P Parameter: Organism Value: Zea mays
  misc_feature: MA Experiment 20000477 PARAMETER Experiment Name: Zm_5mM_SA_P Parameter: Plant Line Value: 35A19
  misc_feature: MA Experiment 20000477 PARAMETER Experiment Name: Zm_5mM_SA_P Parameter: Timepoint (hr) Value: 48
  misc_feature: MA Experiment 20000477 PARAMETER Experiment Name: Zm_5mM_SA_P Parameter: Tissue Value: Aerial
  misc_feature: MA Experiment 20000477 PARAMETER Experiment Name: Zm_5mM_SA_P Parameter: Treatment Value: 5mM SA vs. No Treatment
  misc_feature: MA Experiment ID: 20000478 Result: Up-regulated in Transcription
  misc_feature: MA Experiment 20000478 PARAMETER Experiment Name: Zm_5mM_SA_P Parameter: Age (day) Value: 11
  misc_feature: MA Experiment 20000478 PARAMETER Experiment Name: Zm_5mM_SA_P Parameter: Organism Value: Zea mays
  misc_feature: MA Experiment 20000478 PARAMETER Experiment Name: Zm_5mM_SA_P Parameter: Plant Line Value: 35A19
  misc_feature: MA Experiment 20000478 PARAMETER Experiment Name: Zm_5mM_SA_P Parameter: Timepoint (hr) Value: 72
  misc_feature: MA Experiment 20000478 PARAMETER Experiment Name: Zm_5mM_SA_P Parameter: Tissue Value: Aerial
  misc_feature: MA Experiment 20000478 PARAMETER Experiment Name: Zm_5mM_SA_P Parameter: Treatment Value: 5mM SA vs. No Treatment
  misc_feature: MA Experiment ID: 20000492 Result: Down-regulated in Transcription
  misc_feature: MA Experiment 20000492 PARAMETER Experiment Name: Zm_Hybrid_Seed_Dev_P Parameter: DAP Value: 12
  misc_feature: MA Experiment 20000492 PARAMETER Experiment Name: Zm_Hybrid_Seed_Dev_P Parameter: Organism Value: Zea mays
  misc_feature: MA Experiment 20000492 PARAMETER Experiment Name: Zm_Hybrid_Seed_Dev_P Parameter: Plant Line Value: 35A19
  misc_feature: MA Experiment 20000492 PARAMETER Experiment Name: Zm_Hybrid_Seed_Dev_P Parameter: Tissue Value: Fert Kernel vs. Unfert Floret
  misc_feature: MA Experiment ID: 20000534 Result: Up-regulated in Transcription
  misc_feature: MA Experiment 20000534 PARAMETER Experiment Name: Zm_Hybrid_Pollen_P Parameter: Age (day) Value: 8
  misc_feature: MA Experiment 20000534 PARAMETER Experiment Name: Zm_Hybrid_Pollen_P Parameter: Organism Value: Zea mays
  misc_feature: MA Experiment 20000534 PARAMETER Experiment Name: Zm_Hybrid_Pollen_P Parameter: Plant Line Value: 35A19
  misc_feature: MA Experiment 20000534 PARAMETER Experiment Name: Zm_Hybrid_Pollen_P Parameter: Tissue Value: Pollen vs. Aerial
  misc_feature: MA Experiment ID: 20000535 Result: Down-regulated in Transcription
  misc_feature: MA Experiment 20000535 PARAMETER Experiment Name: Zm_Hybrid_Seed_Dev_P Parameter: DAP Value: 30 vs. 12
  misc_feature: MA Experiment 20000535 PARAMETER Experiment Name: Zm_Hybrid_Seed_Dev_P Parameter: Organism Value: Zea mays
  misc_feature: MA Experiment 20000535 PARAMETER Experiment Name: Zm_Hybrid_Seed_Dev_P Parameter: Plant Line Value: 35A19
  misc_feature: MA Experiment 20000535 PARAMETER Experiment Name: Zm_Hybrid_Seed_Dev_P Parameter: Tissue Value: Embryo vs. Unfert Floret
gcgccctcctgcttctacccccggcagcggcaggggcaggaggagacgacggtcgccaccggcgccctgcaccggcggatgtcggatcgggagctccgccccctgcgctccatcagaatcacaggggacggtcgatgcctgttcaggtccgtcgcctacggcgcctgcctgaggagaggaaagcatgcgcccagcgacagcgcccagaaggaactggccgacgagctccgagccaaagtagctgatgagttcgtcaagcgaagaggagacaccgaatggttccttgaaggcagctttgagagttatgtgagacagatgagaaagcctcatgcttggggaggggaacctgagctgttcatgtgttcccacgttctcaggatgcccatcaccgtctacatgtatacgggcagctccgacggcccaaggatcatagcgg

SEQ ID NO: 13821 - protein, 145 aa, Zea mays subsp. mays
  peptide (1)..(145): Ceres Seq. ID no. 2816406
  misc_feature (42)..(140): Pfam Name: OTU-like cysteine protease Pfam Description: OTU-like cysteine protease
  misc_feature (38)..(140): Homolog of NCBI NO: 18410816 NR Description: auxin-regulated protein; protein id: At3g57810.1, by cDNA: 101256., supported by cDNA: 29384. [Arabidopsis
  misc_feature (51)..(140): Homolog of NCBI NO: 11280708 NR Description: hypothetical protein T10K17.20 - Arabidopsis >gi|6729524|emb|CAB67609.1| putative protein [Arabidopsis
  misc_feature (40)..(80): Homolog of NCBI NO: 34907704 NR Description: P0035F12.12 [Oryza sativa (japonica
  misc_feature (39)..(140): Homolog of NCBI NO: 34902010 NR Description: unknown protein [Oryza sativa (japonica
APSCFYPRQRQGQEETTVATGALHRRMSDRELRPLRSIRITGDGRCLFRSVAYGACLRRGKHAPSDSAQKELADELRAKVADEFVKRRGDTEWFLEGSFESYVRQMRKPHAWGGEPELFMCSHVLRMPITVYMYTGSSDGPRIIA

SEQ ID NO: 13822 - protein, 119 aa, Zea mays subsp. mays
  peptide (1)..(119): Ceres Seq. ID no. 2816407
  misc_feature (16)..(114): Pfam Name: OTU-like cysteine protease Pfam Description: OTU-like cysteine protease
  misc_feature (12)..(114): Homolog of NCBI NO: 18410816 NR Description: auxin-regulated protein; protein id: At3g57810.1, by cDNA: 101256., supported by cDNA: 29384. [Arabidopsis
  misc_feature (25)..(114): Homolog of NCBI NO: 11280708 NR Description: hypothetical protein T10K17.20 - Arabidopsis >gi|6729524|emb|CAB67609.1| putative protein [Arabidopsis
  misc_feature (14)..(54): Homolog of NCBI NO: 34907704 NR Description: P0035F12.12 [Oryza sativa (japonica
  misc_feature (13)..(114): Homolog of NCBI NO: 34902010 NR Description: unknown protein [Oryza sativa (japonica
MSDRELRPLRSIRITGDGRCLFRSVAYGACLRRGKHAPSDSAQKELADELRAKVADEFVKRRGDTEWFLEGSFESYVRQMRKPHAWGGEPELFMCSHVLRMPITVYMYTGSSDGPRIIA

SEQ ID NO: 13823 - protein, 80 aa, Zea mays subsp. mays
  peptide (1)..(80): Ceres Seq. ID no. 2816408
ALLLLPPAAAGAGGDDGRHRRPAPADVGSGAPPPALHQNHRGRSMPVQVRRLRRLPEERKACAQRQRPEGTGRRAPSQSS

SEQ ID NO: 13824 - DNA, 1385 bp, Zea mays subsp. mays
  misc_feature (1)..(1385): Ceres Seq. ID no. 12391575
  misc_feature: MA Experiment ID: 108528 Result: Down-regulated in Transcription
  misc_feature: MA Experiment 108528 PARAMETER Experiment Name: Zm_Imbibed_Seeds_P Parameter: Age (day) Value: 5 vs. 2
  misc_feature: MA Experiment 108528 PARAMETER Experiment Name: Zm_Imbibed_Seeds_P Parameter: Organism Value: Zea mays
  misc_feature: MA Experiment 108528 PARAMETER Experiment Name: Zm_Imbibed_Seeds_P Parameter: Plant Line Value: 35A19
  misc_feature: MA Experiment 108528 PARAMETER Experiment Name: Zm_Imbibed_Seeds_P Parameter: Tissue Value: Aerial vs. Embryo
  misc_feature: MA Experiment ID: 108530 Result: Down-regulated in Transcription
  misc_feature: MA Experiment 108530 PARAMETER Experiment Name: Zm_Imbibed_Seeds_P Parameter: Age (day) Value: 6 vs. 2
  misc_feature: MA Experiment 108530 PARAMETER Experiment Name: Zm_Imbibed_Seeds_P Parameter: Organism Value: Zea mays
  misc_feature: MA Experiment 108530 PARAMETER Experiment Name: Zm_Imbibed_Seeds_P Parameter: Plant Line Value: 35A19
  misc_feature: MA Experiment 108530 PARAMETER Experiment Name: Zm_Imbibed_Seeds_P Parameter: Tissue Value: Aerial vs. Embryo
  misc_feature: MA Experiment ID: 108544 Result: Up-regulated in Transcription
  misc_feature: MA Experiment ID: 108547 Result: Down-regulated in Transcription
  misc_feature: MA Experiment 108547 PARAMETER Experiment Name: Zm_Imbibed_Seeds_P Parameter: Age (day) Value: 4 vs. 2
  misc_feature: MA Experiment 108547 PARAMETER Experiment Name: Zm_Imbibed_Seeds_P Parameter: Organism Value: Zea mays
  misc_feature: MA Experiment 108547 PARAMETER Experiment Name: Zm_Imbibed_Seeds_P Parameter: Plant Line Value: 35A19
  misc_feature: MA Experiment 108547 PARAMETER Experiment Name: Zm_Imbibed_Seeds_P Parameter: Tissue Value: Aerial vs. Embryo
  misc_feature: MA Experiment ID: 20000534 Result: Down-regulated in Transcription
  misc_feature: MA Experiment 20000534 PARAMETER Experiment Name: Zm_Hybrid_Pollen_P Parameter: Age (day) Value: 8
  misc_feature: MA Experiment 20000534 PARAMETER Experiment Name: Zm_Hybrid_Pollen_P Parameter: Organism Value: Zea mays
  misc_feature: MA Experiment 20000534 PARAMETER Experiment Name: Zm_Hybrid_Pollen_P Parameter: Plant Line Value: 35A19
  misc_feature: MA Experiment 20000534 PARAMETER Experiment Name: Zm_Hybrid_Pollen_P Parameter: Tissue Value: Pollen vs. Aerial
aacacttctcttttgaggaccagtccaccgtccactcccagagtccaaaaccctacgatccgcgccaccatgccgcgcctcgccgccgccgccgccgccgtctcacgccgcgccggcgaggccctgcgccgcggcgcgtttgggggactgcggcctctctcctccctgcaaccgttaaacgccgcctccagcgacgaggtgctcgttgaaggaaagacaagtgcgcgcgctgccgtgctcaaccgccctggctacctcaacgccctcaccaccaccatgggagctaggctcaataaattttatcaatcatgggaggacaacccagacattggctttgtcatgatgaagggcagcggccgagcattctgtgctggtggggatgttgttagattacatgaacttatcactgaaggcaagctggaggaatgtaaggattttttcaagactttgtacatgttcatttattttctgggcacatacttgaaaccacatgttgccattcttgatggcattactatgggtggtggtggaggtgtttccatccctggaacattccgtgttgcaactgataggacagtctttgcaactccagaagttcatattggattccatcctgatgctgcagcctccttttatttgtcgcatctaactggccatgttggggaatatgtggccttgactggtgaaaagcttaatggaacagatatgattgctcttggcctcgctacacactatttcatgagtggccatctggatctgatcgatgaacgacttgcaaagttagtaactgatgatccatcagttattgattcgtcccttgcacaatattgagacatggtttatccgtacaaaaatagcattgttcataggctggaggtgattgataaatgcttcagccatgacacagttgaagagattgttgatgccttggaaagtgaagcagccagctcaaatgaagaatggtgtatcttggcgctgaaacgattgaaagaggcctctccgttagctttgaaggtctcactgcgatcgatacgcgagggtagatatcagacacttgatgagtgccttgtccgtgagtaccgcatgtccatgaatggaatctcaaagcaattttctcatgaattctgcgagggagtcagagcacgactagtcgacaaggacttcactcctaagtgggatcctcctgcccttgagtatgttacgaatgacatggttgacgcatacttcgcacctcttggcgattcggagcctgagttgaagctgcctatagaatcgcgagaggcatttgtatgatcacaaatcattccaagaaccggatcattgcaaggaccggactgggacctgataaacgtgttataatctgtgtagccattatttttggcagc

SEQ ID NO: 13825 - protein, 276 aa, Zea mays subsp. mays
  peptide (1)..(276): Ceres Seq. ID no. 12391576
  misc_feature (79)..(247): Pfam Name: Enoyl-CoA hydratase/isomerase family Pfam Description: Enoyl-CoA hydratase/isomerase family
  misc_feature (17)..(276): Homolog of NCBI NO: 37536724 NR Description: putative enoyl-CoA-hydratase [Oryza sativa
  misc_feature (36)..(276): Homolog of NCBI NO: 22329062 NR Description: enoyl-CoA hydratase - like protein; protein id: supported by cDNA: gi_19424018, supported by cDNA: gi_21281144
  misc_feature (47)..(276): Homolog of NCBI NO: 30695218 NR Description: enoyl-CoA hydratase/isomerase family [Arabidopsis
  misc_feature (84)..(213): Homolog of NCBI NO: 11357284 NR Description: enoyl-CoA-hydratase-like protein - Arabidopsis
  misc_feature (193)..(276): Homolog of NCBI NO: 11357284 NR Description: enoyl-CoA-hydratase-like protein - Arabidopsis
  misc_feature (47)..(93): Homolog of NCBI NO: 11357284 NR Description: enoyl-CoA-hydratase-like protein - Arabidopsis
  misc_feature (36)..(276): Homolog of NCBI NO: 7484947 NR Description: enoyl-CoA hydratase homolog F11C18.10 -
  misc_feature (62)..(276): Homolog of NCBI NO: 15239206 NR Description: 3-hydroxyisobutyryl-coenzyme A hydrolase; protein
  misc_feature (62)..(276): Homolog of NCBI NO: 15224549 NR Description: 3-hydroxyisobutyryl-coenzyme A hydrolase; protein
  misc_feature (66)..(276): Homolog of NCBI NO: 15224539 NR Description: 3-hydroxyisobutyryl-coenzyme A hydrolase; protein
NTSLLRTSPPSTPRVQNPTIRATMPRLAAAAAAVSRRAGEALRRGAFGGLRPLSSLQPLNAASSDEVLVEGKTSARAAVLNRPGYLNALTTTMGARLNKFYQSWEDNPDIGFVMMKGSGRAFCAGGDVVRLHELITEGKLEECKDFFKTLYMFIYFLGTYLKPHVAILDGITMGGGGGVSIPGTFRVATDRTVFATPEVHIGFHPDAAASFYLSHLTGHVGEYVALTGEKLNGTDMIALGLATHYFMSGHLDLIDERLAKLVTDDPSVIDSSLAQY

SEQ ID NO: 13826 - protein, 253 aa, Zea mays subsp. mays
  peptide (1)..(253): Ceres Seq. ID no. 12391577
  misc_feature (56)..(224): Pfam Name: Enoyl-CoA hydratase/isomerase family Pfam Description: Enoyl-CoA hydratase/isomerase family
  misc_feature (1)..(253): Homolog of NCBI NO: 37536724 NR Description: putative enoyl-CoA-hydratase [Oryza sativa
  misc_feature (13)..(253): Homolog of NCBI NO: 22329062 NR Description: enoyl-CoA hydratase - like protein; protein id: supported by cDNA: gi_19424018, supported by cDNA: gi_21281144
  misc_feature (24)..(253): Homolog of NCBI NO: 30695218 NR Description: enoyl-CoA hydratase/isomerase family [Arabidopsis
  misc_feature (61)..(190): Homolog of NCBI NO: 11357284 NR Description: enoyl-CoA-hydratase-like protein - Arabidopsis
  misc_feature (170)..(253): Homolog of NCBI NO: 11357284 NR Description: enoyl-CoA-hydratase-like protein - Arabidopsis
  misc_feature (24)..(70): Homolog of NCBI NO: 11357284 NR Description: enoyl-CoA-hydratase-like protein - Arabidopsis
  misc_feature (13)..(253): Homolog of NCBI NO: 7484947 NR Description: enoyl-CoA hydratase homolog F11C18.10 -
  misc_feature (39)..(253): Homolog of NCBI NO: 15239206 NR Description: 3-hydroxyisobutyryl-coenzyme A hydrolase; protein
  misc_feature (39)..(253): Homolog of NCBI NO: 15224549 NR Description: 3-hydroxyisobutyryl-coenzyme A hydrolase; protein
  misc_feature (43)..(253): Homolog of NCBI NO: 15224539 NR Description: 3-hydroxyisobutyryl-coenzyme A hydrolase; protein
MPRLAAAAAAVSRRAGEALRRGAFGGLRPLSSLQPLNAASSDEVLVEGKTSARAAVLNRPGYLNALTTTMGARLNKFYQSWEDNPDIGFVMMKGSGRAFCAGGDVVRLHELITEGKLEECKDFFKTLYMFIYFLGTYLKPHVAILDGITMGGGGGVSIPGTFRVATDRTVFATPEVHIGFHPDAAASFYLSHLTGHVGEYVALTGEKLNGTDMIALGLATHYFMSGHLDLIDERLAKLVTDDPSVIDSSLAQY

SEQ ID NO: 13827 - protein, 184 aa, Zea mays subsp. mays
  peptide (1)..(184): Ceres Seq. ID no. 12391578
  misc_feature (1)..(155): Pfam Name: Enoyl-CoA hydratase/isomerase family Pfam Description: Enoyl-CoA hydratase/isomerase family
  misc_feature (1)..(184): Homolog of NCBI NO: 37536724 NR Description: putative enoyl-CoA-hydratase [Oryza sativa
  misc_feature (1)..(184): Homolog of NCBI NO: 22329062 NR Description: enoyl-CoA hydratase - like protein; protein id: supported by cDNA: gi_19424018, supported by cDNA: gi_21281144
  misc_feature (1)..(184): Homolog of NCBI NO: 30695218 NR Description: enoyl-CoA hydratase/isomerase family [Arabidopsis
  misc_feature (1)..(121): Homolog of NCBI NO: 11357284 NR Description: enoyl-CoA-hydratase-like protein - Arabidopsis
  misc_feature (101)..(184): Homolog of NCBI NO: 11357284 NR Description: enoyl-CoA-hydratase-like protein - Arabidopsis
  misc_feature (1)..(184): Homolog of NCBI NO: 7484947 NR Description: enoyl-CoA hydratase homolog F11C18.10 -
  misc_feature (1)..(184): Homolog of NCBI NO: 15239206 NR Description: 3-hydroxyisobutyryl-coenzyme A hydrolase; protein
  misc_feature (1)..(184): Homolog of NCBI NO: 15224549 NR Description: 3-hydroxyisobutyryl-coenzyme A hydrolase; protein
  misc_feature (1)..(184): Homolog of NCBI NO: 15224539 NR Description: 3-hydroxyisobutyryl-coenzyme A hydrolase; protein
  misc_feature (1)..(184): Homolog of NCBI NO: 6014701 NR Description: enoyl-CoA-hydratase [Avicennia marina]
MGARLNKFYQSWEDNPDIGFVMMKGSGRAFCAGGDVVRLHELITEGKLEECKDFFKTLYMFIYFLGTYLKPHVAILDGITMGGGGGVSIPGTFRVATDRTVFATPEVHIGFHPDAAASFYLSHLTGHVGEYVALTGEKLNGTDMIALGLATHYFMSGHLDLIDERLAKLVTDDPSVIDSSLAQY

SEQ ID NO: 13828 - DNA, 1328 bp, Zea mays subsp. mays
  misc_feature (1)..(1328): Ceres Seq. ID no. 12419342
  misc_feature: MA Experiment ID: 108527 Result: Down-regulated in Transcription
  misc_feature: MA Experiment 108527 PARAMETER Experiment Name: Zm_5mM_NO_P Parameter: Age (day) Value: 8
  misc_feature: MA Experiment 108527 PARAMETER Experiment Name: Zm_5mM_NO_P Parameter: Organism Value: Zea mays
  misc_feature: MA Experiment 108527 PARAMETER Experiment Name: Zm_5mM_NO_P Parameter: Plant Line Value: 35A19
  misc_feature: MA Experiment 108527 PARAMETER Experiment Name: Zm_5mM_NO_P Parameter: Timepoint (hr) Value: 6
  misc_feature: MA Experiment 108527 PARAMETER Experiment Name: Zm_5mM_NO_P Parameter: Tissue Value: Aerial
  misc_feature: MA Experiment 108527 PARAMETER Experiment Name: Zm_5mM_NO_P Parameter: Treatment Value: 5mM NO vs. No Treatment
  misc_feature: MA Experiment ID: 108528 Result: Up-regulated in Transcription
  misc_feature: MA Experiment 108528 PARAMETER Experiment Name: Zm_Imbibed_Seeds_P Parameter: Age (day) Value: 5 vs. 2
  misc_feature: MA Experiment 108528 PARAMETER Experiment Name: Zm_Imbibed_Seeds_P Parameter: Organism Value: Zea mays
  misc_feature: MA Experiment 108528 PARAMETER Experiment Name: Zm_Imbibed_Seeds_P Parameter: Plant Line Value: 35A19
  misc_feature: MA Experiment 108528 PARAMETER Experiment Name: Zm_Imbibed_Seeds_P Parameter: Tissue Value: Aerial vs. Embryo
  misc_feature: MA Experiment ID: 108529 Result: Down-regulated in Transcription
  misc_feature: MA Experiment 108529 PARAMETER Experiment Name: Zm_Imbibed_Seeds_P Parameter: Age (day) Value: 5 vs. 2
  misc_feature: MA Experiment 108529 PARAMETER Experiment Name: Zm_Imbibed_Seeds_P Parameter: Organism Value: Zea mays
  misc_feature: MA Experiment 108529 PARAMETER Experiment Name: Zm_Imbibed_Seeds_P Parameter: Plant Line Value: 35A19
  misc_feature: MA Experiment 108529 PARAMETER Experiment Name: Zm_Imbibed_Seeds_P Parameter: Tissue Value: Roots vs. Embryo
  misc_feature: MA Experiment ID: 108530 Result: Up-regulated in Transcription
  misc_feature: MA Experiment 108530 PARAMETER Experiment Name: Zm_Imbibed_Seeds_P Parameter: Age (day) Value: 6 vs. 2
  misc_feature: MA Experiment 108530 PARAMETER Experiment Name: Zm_Imbibed_Seeds_P Parameter: Organism Value: Zea mays
  misc_feature: MA Experiment 108530 PARAMETER Experiment Name: Zm_Imbibed_Seeds_P Parameter: Plant Line Value: 35A19
  misc_feature: MA Experiment 108530 PARAMETER Experiment Name: Zm_Imbibed_Seeds_P Parameter: Tissue Value: Aerial vs. Embryo
  misc_feature: MA Experiment ID: 108536 Result: Down-regulated in Transcription
  misc_feature: MA Experiment 108536 PARAMETER Experiment Name: Zm_Meristem_P Parameter: Age (day) Value: 8
  misc_feature: MA Experiment 108536 PARAMETER Experiment Name: Zm_Meristem_P Parameter: Organism Value: Zea mays
  misc_feature: MA Experiment 108536 PARAMETER Experiment Name: Zm_Meristem_P Parameter: Plant Line Value: 35A19
  misc_feature: MA Experiment 108536 PARAMETER Experiment Name: Zm_Meristem_P Parameter: Tissue Value: Shoot Meristem vs. Above Shoot Meristem
  misc_feature: MA Experiment ID: 108545 Result: Up-regulated in Transcription
  misc_feature: MA Experiment 108545 PARAMETER Experiment Name: Zm_Imbibed_Seeds_P Parameter: Age (day) Value: 3 vs. 2
  misc_feature: MA Experiment 108545 PARAMETER Experiment Name: Zm_Imbibed_Seeds_P Parameter: Organism Value: Zea mays
  misc_feature: MA Experiment 108545 PARAMETER Experiment Name: Zm_Imbibed_Seeds_P Parameter: Plant Line Value: 35A19
  misc_feature: MA Experiment 108545 PARAMETER Experiment Name: Zm_Imbibed_Seeds_P Parameter: Tissue Value: Aerial vs. Embryo
  misc_feature: MA Experiment ID: 108546 Result: Down-regulated in Transcription
  misc_feature: MA Experiment 108546 PARAMETER Experiment Name: Zm_Imbibed_Seeds_P Parameter: Age (day) Value: 3 vs. 2
  misc_feature: MA Experiment 108546 PARAMETER Experiment Name: Zm_Imbibed_Seeds_P Parameter: Organism Value: Zea mays
  misc_feature: MA Experiment 108546 PARAMETER Experiment Name: Zm_Imbibed_Seeds_P Parameter: Plant Line Value: 35A19
  misc_feature: MA Experiment 108546 PARAMETER Experiment Name: Zm_Imbibed_Seeds_P Parameter: Tissue Value: Roots vs. Embryo
  misc_feature: MA Experiment ID: 108547 Result: Up-regulated in Transcription
  misc_feature: MA Experiment 108547 PARAMETER Experiment Name: Zm_Imbibed_Seeds_P Parameter: Age (day) Value: 4 vs. 2
  misc_feature: MA Experiment 108547 PARAMETER Experiment Name: Zm_Imbibed_Seeds_P Parameter: Organism Value: Zea mays
  misc_feature: MA Experiment 108547 PARAMETER Experiment Name: Zm_Imbibed_Seeds_P Parameter: Plant Line Value: 35A19
  misc_feature: MA Experiment 108547 PARAMETER Experiment Name: Zm_Imbibed_Seeds_P Parameter: Tissue Value: Aerial vs. Embryo
  misc_feature: MA Experiment ID: 20000487 Result: Up-regulated in Transcription
  misc_feature: MA Experiment 20000487 PARAMETER Experiment Name: Zm_50mM_NH4NO3_L_to_H_P Parameter: Organism Value: Zea mays
  misc_feature: MA Experiment 20000487 PARAMETER Experiment Name: Zm_50mM_NH4NO3_L_to_H_P Parameter: Timepoint (hr) Value: 4
  misc_feature: MA Experiment 20000487 PARAMETER Experiment Name: Zm_50mM_NH4NO3_L_to_H_P Parameter: Tissue Value: Leaves
  misc_feature: MA Experiment 20000487 PARAMETER Experiment Name: Zm_50mM_NH4NO3_L_to_H_P Parameter: Treatment Value: 50mM NH4NO3 vs. 100mM Mannitol
  misc_feature: MA Experiment ID: 20000626 Result: Down-regulated in Transcription
  misc_feature: MA Experiment 20000626 PARAMETER Experiment Name: Zm_Herbicide-Treatments_P Parameter: Timepoint (hr) Value: 12
  misc_feature: MA Experiment 20000626 PARAMETER Experiment Name: Zm_Herbicide-Treatments_P Parameter: Tissue Value: Aerial
  misc_feature: MA Experiment 20000626 PARAMETER Experiment Name: Zm_Herbicide-Treatments_P Parameter: Treatment Value: Roundup vs. No Treatment
atgtttttattttgctttggtttgtcactcttttttctcttactattttgatttaaagttttgagctactagcagttgaggatgaactaatttttatattttttgataaagtgctgatatcgatttaccattaatttttctatggatgaggtatgccagttattttgttaagctaatgctgcttctcgtgcaggtcaaagtaaagagaaggggagatgacaaaaaatatattgccaaggttttagctaggggtgttgaatgcgatcttgcgttgctatctgttgagaatgaagagttctggagaggaacagaggcacttcattttggtcgtttgccatgccttcaggattcagtaactgttgtgggatatcctcttggtggagacactatatctgtaacaaaaggcgttgtgtcgcgcattgaggtcactccatatgcacatggaacatcagatcttcttggcattcaaattacgcagccataaatcctggaaacagtgggggaccagcctttaatgatcaaggggagtgcattggtgtggcatttcaggtgtacaggtcagatgaagctgaaaatattggatatgttattccaactacagttgtatcccatttcttaaatgactatcagaaaaatggaaagtacacaggatttccatgtttgggtgtcttacttcagaaattggaaaatccggcattgcgtgaaagcttaaaagtaccttcaagcgagggtgttcttgttcgtcgggtggaacctactgctccagcaagcagtgttttgcgaaagggagatgtaattgttagctttgatggtatcgcagtaggatgtgaagcaacagtaccatttcggtccacagaacggattgctttccgctatctcacaagccaaaagtatgcaggcgatattgcccagctaggaatcattcgtgatggcaattccatgaaagtccagactattttgcagccaagaaaacatttagtgccgtttcatgttgaggggggacaaccttcttatctgattgttgctggccttgtcttcacacctttaacagaaccatttatagaggaggaatgcgaagatacactagggctgaaattgttagcaaaagcacgttactctctagcaacctttgagggggaggaaattgttattgtgtcgcaggttttggcgcacgaggtcaacattgggtatgagcacatgggcaatcaacaagtcatgaaactaaacggaaccacaataaagaatatccatcaccttgctcatcttgtggacacctgtaaagacaagttcctgacgttcgaattcgaagacgacttccttgttgtttt

SEQ ID NO: 13829 - protein, 129 aa, Zea mays subsp. mays
  peptide (1)..(129): Ceres Seq. ID no. 12419343
  misc_feature (1)..(128): Homolog of NCBI NO: 18407488 NR Description: DegP2 protease; protein id: At2g47940.1, by cDNA: gi_11908035, supported by cDNA: gi_13172274, supported cDNA: gi_13194801, supported by cDNA: gi_18700189, supported by
  misc_feature (1)..(128): Homolog of NCBI NO: 25409077 NR Description: probable serine proteinase [imported] -
  misc_feature (1)..(128): Homolog of NCBI NO: 18421957 NR Description: DegP protease; protein id: At5g40200.1, supported
  misc_feature (1)..(128): Homolog of NCBI NO: 18421592 NR Description: DegP protease; protein id: At5g36950.1, supported
  misc_feature (1)..(128): Homolog of NCBI NO: 18408329 NR Description: DegP protease; protein id: At1g65640.1
  misc_feature (1)..(128): Homolog of NCBI NO: 18408327 NR Description: DegP protease; protein id: At1g65630.1 thaliana] >gi|6686413|gb|AAF23847.1|AC007234_19 F1E22.1
  misc_feature (1)..(42): Homolog of NCBI NO: 2190549 NR Description: F5I14.17 gene product [Arabidopsis thaliana]
  misc_feature (1)..(36): Homolog of NCBI NO: 18421999 NR Description: DegP protease; protein id: At5g40560.1
  misc_feature (66)..(128): Homolog of NCBI NO: 18421999 NR Description: DegP protease; protein id: At5g40560.1
  misc_feature (1)..(36): Homolog of NCBI NO: 9758082 NR Description: contains similarity to serine
MKVQTILQPRKHLVPFHVEGGQPSYLIVAGLVFTPLTEPFIEEECEDTLGLKLLAKARYSLATFEGEEIVIVSQVLAHEVNIGYEHMGNQQVMKLNGTTIKNIHHLAHLVDTCKDKFLTFEFEDDFLVV

SEQ ID NO: 13830 - protein, 112 aa, Zea mays subsp. mays
  peptide (1)..(112): Ceres Seq. ID no. 12419344
  misc_feature (16)..(109): Pfam Name: Trypsin Pfam Description: Trypsin
  misc_feature (16)..(109): Homolog of NCBI NO: 18407488 NR Description: DegP2 protease; protein id: At2g47940.1, by cDNA: gi_11908035, supported by cDNA: gi_13172274, supported cDNA: gi_13194801, supported by cDNA: gi_18700189, supported by
  misc_feature (16)..(109): Homolog of NCBI NO: 25409077 NR Description: probable serine proteinase [imported] -
  misc_feature (16)..(109): Homolog of NCBI NO: 18421957 NR Description: DegP protease; protein id: At5g40200.1, supported
  misc_feature (17)..(109): Homolog of NCBI NO: 18421592 NR Description: DegP protease; protein id: At5g36950.1, supported
  misc_feature (17)..(108): Homolog of NCBI NO: 18408329 NR Description: DegP protease; protein id: At1g65640.1
  misc_feature (17)..(109): Homolog of NCBI NO: 18408327 NR Description: DegP protease; protein id: At1g65630.1 thaliana] >gi|6686413|gb|AAF23847.1|AC007234_19 F1E22.1
  misc_feature (17)..(108): Homolog of NCBI NO: 2190549 NR Description: F5I14.17 gene product [Arabidopsis thaliana]
  misc_feature (15)..(108): Homolog of NCBI NO: 18421999 NR Description: DegP protease; protein id: At5g40560.1
  misc_feature (15)..(108): Homolog of NCBI NO: 9758082 NR Description: contains similarity to serine
  misc_feature (17)..(109): Homolog of NCBI NO: 18401167 NR Description: DegP protease; protein id: At3g16540.1
MRYASYFVKLMLLLVQVKVKRRGDDKKYIAKVLARGVECDLALLSVENEEFWRGTEALHFGRLPCLQDSVTVVGYPLGGDTISVTKGVVSRIEVTPYAHGTSDLLGIQITQP

SEQ ID NO: 13831 - protein, 102 aa, Zea mays subsp. mays
  peptide (1)..(102): Ceres Seq. ID no. 12419345
  misc_feature (6)..(99): Pfam Name: Trypsin Pfam Description: Trypsin
  misc_feature (6)..(99): Homolog of NCBI NO: 18407488 NR Description: DegP2 protease; protein id: At2g47940.1, by cDNA: gi_11908035, supported by cDNA: gi_13172274, supported cDNA: gi_13194801, supported by cDNA: gi_18700189, supported by
  misc_feature (6)..(99): Homolog of NCBI NO: 25409077 NR Description: probable serine proteinase [imported] -
  misc_feature (6)..(99): Homolog of NCBI NO: 18421957 NR Description: DegP protease; protein id: At5g40200.1, supported
  misc_feature (7)..(99): Homolog of NCBI NO: 18421592 NR Description: DegP protease; protein id: At5g36950.1, supported
  misc_feature (7)..(98): Homolog of NCBI NO: 18408329 NR Description: DegP protease; protein id: At1g65640.1
  misc_feature (7)..(99): Homolog of NCBI NO: 18408327 NR Description: DegP protease; protein id: At1g65630.1 thaliana] >gi|6686413|gb|AAF23847.1|AC007234_19 F1E22.1
  misc_feature (7)..(98): Homolog of NCBI NO: 2190549 NR Description: F5I14.17 gene product [Arabidopsis thaliana]
  misc_feature (5)..(98): Homolog of NCBI NO: 18421999 NR Description: DegP protease; protein id: At5g40560.1
  misc_feature (5)..(98): Homolog of NCBI NO: 9758082 NR Description: contains similarity to serine
  misc_feature (7)..(99): Homolog of NCBI NO: 18401167 NR Description: DegP protease; protein id: At3g16540.1
MLLLVQVKVKRRGDDKKYIAKVLARGVECDLALLSVENEEFWRGTEALHFGRLPCLQDSVTVVGYPLGGDTISVTKGVVSRIEVTPYAHGTSDLLGIQITQP

SEQ ID NO: 13832 - DNA, 1234 bp, Zea mays subsp. mays
  misc_feature (1)..(1234): Ceres Seq. ID no. 13494778
  misc_feature: MA Experiment ID: 108504 Result: Up-regulated in Transcription
  misc_feature: MA Experiment 108504 PARAMETER Experiment Name: Zm_Drought_P Parameter: Age (day) Value: 8
  misc_feature: MA Experiment 108504 PARAMETER Experiment Name: Zm_Drought_P Parameter: Organism Value: Zea mays
  misc_feature: MA Experiment 108504 PARAMETER Experiment Name: Zm_Drought_P Parameter: Plant Line Value: 35A19
  misc_feature: MA Experiment 108504 PARAMETER Experiment Name: Zm_Drought_P Parameter: Timepoint (hr) Value: 12
  misc_feature: MA Experiment 108504 PARAMETER Experiment Name: Zm_Drought_P Parameter: Tissue Value: Aerial
  misc_feature: MA Experiment 108504 PARAMETER Experiment Name: Zm_Drought_P Parameter: Treatment Value: Drought vs. No Drought
  misc_feature: MA Experiment ID: 108528 Result: Down-regulated in Transcription
  misc_feature: MA Experiment 108528 PARAMETER Experiment Name: Zm_Imbibed_Seeds_P Parameter: Age (day) Value: 5 vs. 2
  misc_feature: MA Experiment 108528 PARAMETER Experiment Name: Zm_Imbibed_Seeds_P Parameter: Organism Value: Zea mays
  misc_feature: MA Experiment 108528 PARAMETER Experiment Name: Zm_Imbibed_Seeds_P Parameter: Plant Line Value: 35A19
  misc_feature: MA Experiment 108528 PARAMETER Experiment Name: Zm_Imbibed_Seeds_P Parameter: Tissue Value: Aerial vs. Embryo
  misc_feature: MA Experiment ID: 108530 Result: Down-regulated in Transcription
  misc_feature: MA Experiment 108530 PARAMETER Experiment Name: Zm_Imbibed_Seeds_P Parameter: Age (day) Value: 6 vs. 2
  misc_feature: MA Experiment 108530 PARAMETER Experiment Name: Zm_Imbibed_Seeds_P Parameter: Organism Value: Zea mays
  misc_feature: MA Experiment 108530 PARAMETER Experiment Name: Zm_Imbibed_Seeds_P Parameter: Plant Line Value: 35A19
  misc_feature: MA Experiment 108530 PARAMETER Experiment Name: Zm_Imbibed_Seeds_P Parameter: Tissue Value: Aerial vs. Embryo
  misc_feature: MA Experiment ID: 108540 Result: Up-regulated in Transcription
  misc_feature: MA Experiment 108540 PARAMETER Experiment Name: Zm_20percent_PEG_P Parameter: Age (day) Value: 8
  misc_feature: MA Experiment 108540 PARAMETER Experiment Name: Zm_20percent_PEG_P Parameter: Organism Value: Zea mays
  misc_feature: MA Experiment 108540 PARAMETER Experiment Name: Zm_20percent_PEG_P Parameter: Plant Line Value: 35A19
  misc_feature: MA Experiment 108540 PARAMETER Experiment Name: Zm_20percent_PEG_P Parameter: Timepoint (hr) Value: 6
  misc_feature: MA Experiment 108540 PARAMETER Experiment Name: Zm_20percent_PEG_P Parameter: Tissue Value: Aerial
  misc_feature: MA Experiment 108540 PARAMETER Experiment Name: Zm_20percent_PEG_P Parameter: Treatment Value: 20percent PEG vs. No Treatment
  misc_feature: MA Experiment ID: 108543 Result: Up-regulated in Transcription
  misc_feature: MA Experiment ID: 108556 Result: Up-regulated in Transcription
  misc_feature: MA Experiment 108556 PARAMETER Experiment Name: Zm_Drought_P Parameter: Age (day) Value: 9
  misc_feature: MA Experiment 108556 PARAMETER Experiment Name: Zm_Drought_P Parameter: Organism Value: Zea mays
  misc_feature: MA Experiment 108556 PARAMETER Experiment Name: Zm_Drought_P Parameter: Plant Line Value: 35A19
  misc_feature: MA Experiment 108556 PARAMETER Experiment Name: Zm_Drought_P Parameter: Timepoint (hr) Value: 24
  misc_feature: MA Experiment 108556 PARAMETER Experiment Name: Zm_Drought_P Parameter: Tissue Value: Aerial
  misc_feature: MA Experiment 108556 PARAMETER Experiment Name: Zm_Drought_P Parameter: Treatment Value: Drought vs. No Drought
  misc_feature: MA Experiment ID: 108597 Result: Up-regulated in Transcription
  misc_feature: MA Experiment 108597 PARAMETER Experiment Name: Zm_100uM_ABA_P Parameter: Age (day) Value: 9
  misc_feature: MA Experiment 108597 PARAMETER Experiment Name: Zm_100uM_ABA_P Parameter: Organism Value: Zea mays
  misc_feature: MA Experiment 108597 PARAMETER Experiment Name: Zm_100uM_ABA_P Parameter: Plant Line Value: 35A19
  misc_feature: MA Experiment 108597 PARAMETER Experiment Name: Zm_100uM_ABA_P Parameter: Timepoint (hr) Value: 24
  misc_feature: MA Experiment 108597 PARAMETER Experiment Name: Zm_100uM_ABA_P Parameter: Tissue Value: Aerial
  misc_feature: MA Experiment 108597 PARAMETER Experiment Name: Zm_100uM_ABA_P Parameter: Treatment Value: 100uM ABA vs. No Treatment
  misc_feature: MA Experiment ID: 108687 Result: Down-regulated in Transcription
  misc_feature: MA Experiment 108687 PARAMETER Experiment Name: Zm_Embryos-Flowers__P Parameter: Tissue Value: Embryo vs. Aerial+
  misc_feature: MA Experiment ID: 20000477 Result: Up-regulated in Transcription
  misc_feature: MA Experiment 20000477 PARAMETER Experiment Name: Zm_5mM_SA_P Parameter: Age (day) Value: 10
  misc_feature: MA Experiment 20000477 PARAMETER Experiment Name: Zm_5mM_SA_P Parameter: Organism Value: Zea mays
  misc_feature: MA Experiment 20000477 PARAMETER Experiment Name: Zm_5mM_SA_P Parameter: Plant Line Value: 35A19
  misc_feature: MA Experiment 20000477 PARAMETER Experiment Name: Zm_5mM_SA_P Parameter: Timepoint (hr) Value: 48
  misc_feature: MA Experiment 20000477 PARAMETER Experiment Name: Zm_5mM_SA_P Parameter: Tissue Value: Aerial
  misc_feature: MA Experiment 20000477 PARAMETER Experiment Name: Zm_5mM_SA_P Parameter: Treatment Value: 5mM SA vs. No Treatment
  misc_feature: MA Experiment ID: 20000478 Result: Up-regulated in Transcription
  misc_feature: MA Experiment 20000478 PARAMETER Experiment Name: Zm_5mM_SA_P Parameter: Age (day) Value: 11
  misc_feature: MA Experiment 20000478 PARAMETER Experiment Name: Zm_5mM_SA_P Parameter: Organism Value: Zea mays
  misc_feature: MA Experiment 20000478 PARAMETER Experiment Name: Zm_5mM_SA_P Parameter: Plant Line Value: 35A19
  misc_feature: MA Experiment 20000478 PARAMETER Experiment Name: Zm_5mM_SA_P Parameter: Timepoint (hr) Value: 72
  misc_feature: MA Experiment 20000478 PARAMETER Experiment Name: Zm_5mM_SA_P Parameter: Tissue Value: Aerial
  misc_feature: MA Experiment 20000478 PARAMETER Experiment Name: Zm_5mM_SA_P Parameter: Treatment Value: 5mM SA vs. No Treatment
  misc_feature: MA Experiment ID: 20000479 Result: Up-regulated in Transcription
  misc_feature: MA Experiment 20000479 PARAMETER Experiment Name: Zm_Drought_P Parameter: Age (day) Value: 10
  misc_feature: MA Experiment 20000479 PARAMETER Experiment Name: Zm_Drought_P Parameter: Organism Value: Zea mays
  misc_feature: MA Experiment 20000479 PARAMETER Experiment Name: Zm_Drought_P Parameter: Plant Line Value: 35A19
  misc_feature: MA Experiment 20000479 PARAMETER Experiment Name: Zm_Drought_P Parameter: Timepoint (hr) Value: 48
  misc_feature: MA Experiment 20000479 PARAMETER Experiment Name: Zm_Drought_P Parameter: Tissue Value: Aerial
  misc_feature: MA Experiment 20000479 PARAMETER Experiment Name: Zm_Drought_P Parameter: Treatment Value: Drought vs. No Drought
  misc_feature: MA Experiment ID: 20000480 Result: Up-regulated in Transcription
  misc_feature: MA Experiment 20000480 PARAMETER Experiment Name: Zm_Drought_P Parameter: Age (day) Value: 11
  misc_feature: MA Experiment 20000480 PARAMETER Experiment Name: Zm_Drought_P Parameter: Organism Value: Zea mays
  misc_feature: MA Experiment 20000480 PARAMETER Experiment Name: Zm_Drought_P Parameter: Plant Line Value: 35A19
  misc_feature: MA Experiment 20000480 PARAMETER Experiment Name: Zm_Drought_P Parameter: Timepoint (hr) Value: 72
  misc_feature: MA Experiment 20000480 PARAMETER Experiment Name: Zm_Drought_P Parameter: Tissue Value: Aerial
  misc_feature: MA Experiment 20000480 PARAMETER Experiment Name: Zm_Drought_P Parameter: Treatment Value: Drought vs. No Drought
  misc_feature: MA Experiment ID: 20000535 Result: Down-regulated in Transcription
  misc_feature: MA Experiment 20000535 PARAMETER Experiment Name: Zm_Hybrid_Seed_Dev_P Parameter: DAP Value: 30 vs. 12
  misc_feature: MA Experiment 20000535 PARAMETER Experiment Name: Zm_Hybrid_Seed_Dev_P Parameter: Organism Value: Zea mays
  misc_feature: MA Experiment 20000535 PARAMETER Experiment Name: Zm_Hybrid_Seed_Dev_P Parameter: Plant Line Value: 35A19
  misc_feature: MA Experiment 20000535 PARAMETER Experiment Name: Zm_Hybrid_Seed_Dev_P Parameter: Tissue Value: Embryo vs. Unfert Floret
  misc_feature: MA Experiment ID: 20001608 Result: Up-regulated in Transcription
  misc_feature: MA Experiment 20001608 PARAMETER Experiment Name: Zm_50ppm_KNO3_L-to-H_P Parameter: Age (day) Value: 21
  misc_feature: MA Experiment 20001608 PARAMETER Experiment Name: Zm_50ppm_KNO3_L-to-H_P Parameter: Organism Value: Zea mays
  misc_feature: MA Experiment 20001608 PARAMETER Experiment Name: Zm_50ppm_KNO3_L-to-H_P Parameter: Plant Line Value: 35A19
  misc_feature: MA Experiment 20001608 PARAMETER Experiment Name: Zm_50ppm_KNO3_L-to-H_P Parameter: Timepoint (hr) Value: 48
  misc_feature: MA Experiment 20001608 PARAMETER Experiment Name: Zm_50ppm_KNO3_L-to-H_P Parameter: Tissue Value: Shoots
  misc_feature: MA Experiment 20001608 PARAMETER Experiment Name: Zm_50ppm_KNO3_L-to-H_P Parameter: Treatment Value: 50ppm KNO3 vs. 50ppm KCl
gtctcccggcgcctgttccccgcggcaccgcggctacacataccctctccccatcccatttcccagatcccaccaacgcagcgcagggatcgagtagcccaccaccccaccccgcgacgctaaccgacgcaatggcgacgctcaccgttccttcctccgtcccggccgtcgccgaggactgcgagcagctccacaaggccttcgaaggttggggcaccaacgagaaactgatcatctccatcctggcccaccgcaacgccgcgcaggcccgcgcgatccgccgcggctatgccgaggcctacgggaaggagctgctccgcgctctcggcgacgagatccacggcaagttcgagagggcggtgatcctgtggacgctggaccccgcggagagggacgcggtgctggcgaacgaggaggcgaagaagagccaccccggcggccgcgcgctggtggagatcgcgtgcgcgcgcacgcccgcgcagctctttgcggtcaagcaggcgtaccatgaccggtttaagcgatcgctcgaggaggacgttgccgcgcatgtcaccggcgacttccgaaagcttttagtgcctcttgttagtgcgtaccgctatgatggcccagaggtgaacacatctttggctcattctgaagccaaaatacttcatgagaagatccataagaaggcttacagtgatgaggagatcattagaattctcaccacacggagcaaagctcagctacttgcaacattcaatagctacaaggatcagttcactcatgcaatcaacaaggatctgaaagctgaccccaaggatgagtttctttcaacactgcgggcgatcatccggtgcttcacctgccctgacagatacttcgagaaagtcattcgactggctcttggaggcatgggcactgatgaggatgacctcaccagggtcgtaactactcgcgccgaggtcgacctgaagctgataaaggaggcttatcagaagagaaacagtgtgccgctggagcgtgctgtggccaaagatacaactagagattatgaggatattatgcttgccctccttggggcggagtgaggaggcgtgcctcaactcgatctcatctgctcctacttgtttgatggggccaaaaaactgcatcgacgtggtatccacatggccgtggttttgaataataataaatttgtaacacgtagcctgcattagcagcgcgttttaaataaaggaacttcctg

SEQ ID NO: 13833 - protein, 357 aa, Zea mays subsp. mays
  peptide (1)..(357): Ceres Seq. ID no. 13494779
  misc_feature (56)..(123): Pfam Name: Annexin Pfam Description: Annexin
  misc_feature (44)..(357): Homolog of NCBI NO: 7441507 NR Description: annexin P35 - maize >gi|1370603|emb|CAA66901.1|
  misc_feature (44)..(357): Homolog of NCBI NO: 6272285 NR Description: annexin p33 [Zea mays]
  misc_feature (44)..(357): Homolog of NCBI NO: 7441506 NR Description: annexin P33 - maize
  misc_feature (44)..(355): Homolog of NCBI NO: 7484723 NR Description: fiber annexin - upland cotton
  misc_feature (45)..(355): Homolog of NCBI NO: 15214410 NR Description: annexin [Gossypium hirsutum]
  misc_feature (45)..(355): Homolog of NCBI NO: 33357398 NR Description: Chain A, Annexin Gh1 From Cotton
  misc_feature (46)..(356): Homolog of NCBI NO: 7441511 NR Description: annexin 2 - upland cotton (fragment)
  misc_feature (44)..(355): Homolog of NCBI NO: 2459926 NR Description: annexin [Lavatera thuringiaca]
  misc_feature (44)..(355): Homolog of NCBI NO: 3928134 NR Description: annexin P38 [Capsicum annuum]
  misc_feature (44)..(355): Homolog of NCBI NO: 4580920 NR Description: vacuole-associated annexin VCaB42 [Nicotiana
LPAPVPRGTAATHTLSPSHFPDPTNAAQGSSSPPPHPATLTDAMATLTVPSSVPAVAEDCEQLHKAFEGWGTNEKLIISILAHRNAAQARAIRRGYAEAYGKELLRALGDEIHGKFERAVILWTLDPAERDAVLANEEAKKSHPGGRALVEIACARTPAQLFAVKQAYHDRFKRSLEEDVAAHVTGDFRKLLVPLVSAYRYDGPEVNTSLAHSEAKILHEKIHKKAYSDEEIIRILTTRSKAQLLATFNSYKDQFTHAINKDLKADPKDEFLSTLRAIIRCFTCPDRYFEKVIRLALGGMGTDEDDLTRVVTTRAEVDLKLIKEAYQKRNSVPLERAVAKDTTRDYEDIMLALLGAE

SEQ ID NO: 13834 - protein, 314 aa, Zea mays subsp. mays
  peptide (1)..(314): Ceres Seq. ID no. 13494780
  misc_feature (13)..(80): Pfam Name: Annexin Pfam Description: Annexin
  misc_feature (1)..(314): Homolog of NCBI NO: 7441507 NR Description: annexin P35 - maize >gi|1370603|emb|CAA66901.1|
  misc_feature (1)..(314): Homolog of NCBI NO: 6272285 NR Description: annexin p33 [Zea mays]
  misc_feature (1)..(314): Homolog of NCBI NO: 7441506 NR Description: annexin P33 - maize
  misc_feature (1)..(312): Homolog of NCBI NO: 7484723 NR Description: fiber annexin - upland cotton
  misc_feature (2)..(312): Homolog of NCBI NO: 15214410 NR Description: annexin [Gossypium hirsutum]
  misc_feature (2)..(312): Homolog of NCBI NO: 33357398 NR Description: Chain A, Annexin Gh1 From Cotton
  misc_feature (3)..(313): Homolog of NCBI NO: 7441511 NR Description: annexin 2 - upland cotton (fragment)
  misc_feature (1)..(312): Homolog of NCBI NO: 2459926 NR Description: annexin [Lavatera thuringiaca]
  misc_feature (1)..(312): Homolog of NCBI NO: 3928134 NR Description: annexin P38 [Capsicum annuum]
  misc_feature (1)..(312): Homolog of NCBI NO: 4580920 NR Description: vacuole-associated annexin VCaB42 [Nicotiana
MATLTVPSSVPAVAEDCEQLHKAFEGWGTNEKLIISILAHRNAAQARAIRRGYAEAYGKELLRALGDEIHGKFERAVILWTLDPAERDAVLANEEAKKSHPGGRALVEIACARTPAQLFAVKQAYHDRFKRSLEEDVAAHVTGDFRKLLVPLVSAYRYDGPEVNTSLAHSEAKILHEKIHKKAYSDEEIIRILTTRSKAQLLATFNSYKDQFTHAINKDLKADPKDEFLSTLRAIIRCFTCPDRYFEKVIRLALGGMGTDEDDLTRVVTTRAEVDLKLIKEAYQKRNSVPLERAVAKDTTRDYEDIMLALLGAE

SEQ ID NO: 13835 - DNA, 2267 bp, Zea mays subsp. mays
  misc_feature (1)..(2267): Ceres Seq. ID no. 12435965
  misc_feature: MA Experiment ID: 108522 Result: Down-regulated in Transcription
  misc_feature: MA Experiment 108522 PARAMETER Experiment Name: Zm_42deg_Heat_P Parameter: Age (day) Value: 8
  misc_feature: MA Experiment 108522 PARAMETER Experiment Name: Zm_42deg_Heat_P Parameter: Organism Value: Zea mays
  misc_feature: MA Experiment 108522 PARAMETER Experiment Name: Zm_42deg_Heat_P Parameter: Plant Line Value: 35A19
  misc_feature: MA Experiment 108522 PARAMETER Experiment Name: Zm_42deg_Heat_P Parameter: Temperature (deg C) Value: 42 vs. 22
  misc_feature: MA Experiment 108522 PARAMETER Experiment Name: Zm_42deg_Heat_P Parameter: Timepoint (hr) Value: 1
  misc_feature: MA Experiment 108522 PARAMETER Experiment Name: Zm_42deg_Heat_P Parameter: Tissue Value: Aerial
  misc_feature: MA Experiment ID: 108543 Result: Down-regulated in Transcription
tagaaagcaatcgcccgcggtattatccatccaccacgctgcatctgcttctcacgccgcctcgccttcctcttccacccctcgccgtccgtcgtcctcagcgcttgtacgcttgcctcaaaacccctggcgccgtgctaaaaccctagccctcgaattccttcccctgcccgcgcggagcagacgagcctgagcccgtcctcctcgtccatggcgtcctcaggggccgccgctaacctctgggtactgcttggtctcggcatcgcgggcgttctcctggcggcgcggcgactgaggcgccctgcgcgccccgatcacggcgccttcgtcgcccgcctcgagctcctcccgccgccccagcctccgccgccgcaggcgccccacccgctcaccggactctgcttcgccatcgctgacgcattgcatgtcagtggttatattacaagtttcggcagtcttgaatgggcaaagacacacaatgcagaagtgctaacatcttcagtggtttcagctcttgttgatggtggtgctatttgtgttgggaaaactgttattgatgagatggcatacagtatccatggtgagaatagatattttgatacaccaacaaatcctgccgctccagatcgagtaccaggaggatgttcaagtggatcagctgttgcagttgctggtggaatggtagattttgccctgggtattgactcgattggaggtgtaaggatacctggtgcttattgtggtgtcttagcattcaggccttcgcatgctgtggtttccaatagtggtgtcattcctgttgcacctagcctggacactataggttggtttgcaaaggatccaagtgttttgcatcgtgttgggcatcttcttcttagacttccttatgctggtattcgccaaccgagaattttttacatagcagatgattgctttgaactttcaaagatacctgctaggagacttactcaggtggtgacaaaatctgtggagaagctctttggaagacaagtccggcatgtgaatctcgaaaattatttgagttcaagaatatccagcctgggtaactattcaaatgggcataagaatggggattcaaagttccctctgttgctagcactttgtaactccatgatatcacttcacaagcaggaattcaaagataagcatatggagtggataaattcagttaagcctgctgtggatgcacgcatagtcagtgatttgtctgaggatggtgattcagatattgatggctgccaaaatgtgaggaaagaagcgcgctctgctctaagtggacttcttaaggatgatgggattctggtgattccaactgctttggggtgccccccgaagcttaacgctaaggaactctcgtctgaaagctacaattctcagacactacgccttttgtctttagctagcatgtcagggtgttgccaggtttccattcctttgggtacacatgataagtgccccatttcagtttcgttgattgctaggcatggtggtgatcggtttttgttggacaccacacaaaccatgtatacaaccatccaagagcaagtggagatactagcgaaatctagtgtttcaagtaaacaggcgatgaatgaagaagcagctgaagctgctaaagagaaaggtaatgctgcatttaaggaaaaacaatggcaaaaggcagtaaatttctacactgaagcaataaagttaaatggaaaagtggctacatactacagcaacagagctgctgcctttctagaactaactagctaccgtcaggctgaggcagattgcacaagtgccatcgaacttgattccaagagcgtgaaagcttatttacggagaggcactgcaagggagatgctaggttattataaggaggccgttgatgatttcaaccacgcccttgttctagaaccaatgaacaagacggctggtgttgccatcaacaggttaaagaagctgtttccttgaatatgaagctgcatgaagatatgataacctcatattttgtgcacacacaaggggtgggattgaagtacctgagttcaaccgacggatgctgatcacagtttgagctagtgggaacggatttcaacactgagatcaggttaagggtcaatttagcggtttctctccccacccaaagttttggaaaagcaaaataaagaaggttttttgggaaccggaaagcagtttacgggtgtccgccatccccaccatgtataatatagtttcgccaattatttgttcagacgctttgc

SEQ ID NO: 13836 - protein, 588 aa, Zea mays subsp. mays
  peptide (1)..(588): Ceres Seq. ID no. 12435966
  misc_feature (12)..(439): Pfam Name: Amidase Pfam Description: Amidase
  misc_feature (35)..(254): Homolog of NCBI NO: 25402505 NR Description: hypothetical protein [imported] - Arabidopsis >gi|2342685|gb|AAB70409.1| Contains similarity to Rhodococcus (gb|D16207). ESTs gb|T20504,gb|H36650,gb|N97423,gb|H36595 come
  misc_feature (1)..(588): Homolog of NCBI NO: 13937285 NR Description: chloroplast protein-translocon-like protein
  misc_feature (1)..(587): Homolog of NCBI NO: 7453538 NR Description: Toc64 [Pisum sativum]
  misc_feature (1)..(559): Homolog of NCBI NO: 9955529 NR Description: putative subunit of TOC complex [Arabidopsis
  misc_feature (35)..(366): Homolog of NCBI NO: 38344119 NR Description: OSJNBb0050O03.16 [Oryza sativa (japonica
  misc_feature (329)..(585): Homolog of NCBI NO: 9955529 NR Description: putative subunit of TOC complex [Arabidopsis
  misc_feature (35)..(445): Homolog of NCBI NO: 18390964 NR Description: expressed protein; protein id: At1g08980.1, by cDNA: gi_11493701, supported by cDNA: gi_14335037 [Arabidopsis >gi|11493702|gb|AAG35612.1|AF202077_1 amidase [Arabidopsis
  misc_feature (1)..(585): Homolog of NCBI NO: 30682691 NR Description: subunit of TOC complex -related [Arabidopsis
  misc_feature (1)..(585): Homolog of NCBI NO: 30684733 NR Description: chloroplast outer membrane translocon subunit, [Arabidopsis thaliana] >gi|9294499|dbj|BAB02718.1|
  misc_feature (46)..(266): Homolog of NCBI NO: 22978544 NR Description: hypothetical protein [Ralstonia metallidurans]
MASSGAAANLWVLLGLGIAGVLLAARRLRRPARPDHGAFVARLELLPPPQPPPPQAPHPLTGLCFAIADALHVSGYITSFGSLEWAKTHNAEVLTSSVVSALVDGGAICVGKTVIDEMAYSIHGENRYFDTPTNPAAPDRVPGGCSSGSAVAVAGGMVDFALGIDSIGGVRIPGAYCGVLAFRPSHAVVSNSGVIPVAPSLDTIGWFAKDPSVLHRVGHLLLRLPYAGIRQPRIFYIADDCFELSKIPARRLTQVVTKSVEKLFGRQVRHVNLENYLSSRISSLGNYSNGHKNGDSKFPLLLALCNSMISLHKQEFKDKHMEWINSVKPAVDARIVSDLSEDGDSDIDGCQNVRKEARSALSGLLKDDGILVIPTALGCPPKLNAKELSSESYNSQTLRLLSLASMSGCCQVSIPLGTHDKCPISVSLIARHGGDRFLLDTTQTMYTTIQEQVEILAKSSVSSKQAMNEEAAEAAKEKGNAAFKEKQWQKAVNFYTEAIKLNGKVATYYSNRAAAFLELTSYRQAEADCTSAIELDSKSVKAYLRRGTAREMLGYYKEAVDDFNHALVLEPMNKTAGVAINRLKKLFP

SEQ ID NO: 13837 - protein, 471 aa, Zea mays subsp. mays
  peptide (1)..(471): Ceres Seq. ID no. 12435967
  misc_feature (1)..(322): Pfam Name: Amidase Pfam Description: Amidase
  misc_feature (1)..(471): Homolog of NCBI NO: 13937285 NR Description: chloroplast protein-translocon-like protein
  misc_feature (1)..(468): Homolog of NCBI NO: 30684733 NR Description: chloroplast outer membrane translocon subunit, [Arabidopsis thaliana] >gi|9294499|dbj|BAB02718.1|
  misc_feature (1)..(470): Homolog of NCBI NO: 7453538 NR Description: Toc64 [Pisum sativum]
  misc_feature (1)..(468): Homolog of NCBI NO: 30682691 NR Description: subunit of TOC complex -related [Arabidopsis
  misc_feature (1)..(442): Homolog of NCBI NO: 9955529 NR Description: putative subunit of TOC complex [Arabidopsis
  misc_feature (1)..(328): Homolog of NCBI NO: 18390964 NR Description: expressed protein; protein id: At1g08980.1, by cDNA: gi_11493701, supported by cDNA: gi_14335037 [Arabidopsis >gi|11493702|gb|AAG35612.1|AF202077_1 amidase [Arabidopsis
  misc_feature (1)..(249): Homolog of NCBI NO: 38344119 NR Description: OSJNBb0050O03.16 [Oryza sativa (japonica
  misc_feature (212)..(468): Homolog of NCBI NO: 9955529 NR Description: putative subunit of TOC complex [Arabidopsis
  misc_feature (1)..(137): Homolog of NCBI NO: 25402505 NR Description: hypothetical protein [imported] - Arabidopsis >gi|2342685|gb|AAB70409.1| Contains similarity to Rhodococcus (gb|D16207). ESTs gb|T20504,gb|H36650,gb|N97423,gb|H36595 come
  misc_feature (1)..(149): Homolog of NCBI NO: 22978544 NR Description: hypothetical protein [Ralstonia metallidurans]
MAYSIHGENRYFDTPTNPAAPDRVPGGCSSGSAVAVAGGMVDFALGIDSIGGVRIPGAYCGVLAFRPSHAVVSNSGVIPVAPSLDTIGWFAKDPSVLHRVGHLLLRLPYAGIRQPRIFYIADDCFELSKIPARRLTQVVTKSVEKLFGRQVRHVNLENYLSSRISSLGNYSNGHKNGDSKFPLLLALCNSMISLHKQEFKDKHMEWINSVKPAVDARIVSDLSEDGDSDIDGCQNVRKEARSALSGLLKDDGILVIPTALGCPPKLNAKELSSESYNSQTLRLLSLASMSGCCQVSIPLGTHDKCPISVSLIARHGGDRFLLDTTQTMYTTIQEQVEILAKSSVSSKQAMNEEAAEAAKEKGNAAFKEKQWQKAVNFYTEAIKLNGKVATYYSNRAAAFLELTSYRQAEADCTSAIELDSKSVKAYLRRGTAREMLGYYKEAVDDFNHALVLEPMNKTAGVAINRLKKLFP

SEQ ID NO: 13838 - protein, 432 aa, Zea mays subsp. mays
  peptide (1)..(432): Ceres Seq. ID no. 12435968
  misc_feature (1)..(283): Pfam Name: Amidase Pfam Description: Amidase
  misc_feature (1)..(432): Homolog of NCBI NO: 13937285 NR Description: chloroplast protein-translocon-like protein
  misc_feature (1)..(429): Homolog of NCBI NO: 30684733 NR Description: chloroplast outer membrane translocon subunit, [Arabidopsis thaliana] >gi|9294499|dbj|BAB02718.1|
  misc_feature (1)..(431): Homolog of NCBI NO: 7453538 NR Description: Toc64 [Pisum sativum]
  misc_feature (1)..(429): Homolog of NCBI NO: 30682691 NR Description: subunit of TOC complex -related [Arabidopsis
  misc_feature (1)..(403): Homolog of NCBI NO: 9955529 NR Description: putative subunit of TOC complex [Arabidopsis
  misc_feature (1)..(289): Homolog of NCBI NO: 18390964 NR Description: expressed protein; protein id: At1g08980.1, by cDNA: gi_11493701, supported by cDNA: gi_14335037 [Arabidopsis >gi|11493702|gb|AAG35612.1|AF202077_1 amidase [Arabidopsis
  misc_feature (1)..(210): Homolog of NCBI NO: 38344119 NR Description: OSJNBb0050O03.16 [Oryza sativa (japonica
  misc_feature (173)..(429): Homolog of NCBI NO: 9955529 NR Description: putative subunit of TOC complex [Arabidopsis
  misc_feature (1)..(98): Homolog of NCBI NO: 25402505 NR Description: hypothetical protein [imported] - Arabidopsis >gi|2342685|gb|AAB70409.1| Contains similarity to Rhodococcus (gb|D16207). ESTs gb|T20504,gb|H36650,gb|N97423,gb|H36595 come
  misc_feature (1)..(110): Homolog of NCBI NO: 22978544 NR Description: hypothetical protein [Ralstonia metallidurans]
MVDFALGIDSIGGVRIPGAYCGVLAFRPSHAVVSNSGVIPVAPSLDTIGWFAKDPSVLHRVGHLLLRLPYAGIRQPRIFYIADDCFELSKIPARRLTQVVTKSVEKLFGRQVRHVNLENYLSSRISSLGNYSNGHKNGDSKFPLLLALCNSMISLHKQEFKDKHMEWINSVKPAVDARIVSDLSEDGDSDIDGCQNVRKEARSALSGLLKDDGILVIPTALGCPPKLNAKELSSESYNSQTLRLLSLASMSGCCQVSIPLGTHDKCPISVSLIARHGGDRFLLDTTQTMYTTIQEQVEILAKSSVSSKQAMNEEAAEAAKEKGNAAFKEKQWQKAVNFYTEAIKLNGKVATYYSNRAAAFLELTSYRQAEADCTSAIELDSKSVKAYLRRGTAREMLGYYKEAVDDFNHALVLEPMNKTAGVAINRLKKLFP

SEQ ID NO: 13839 - DNA, 700 bp, Zea mays subsp. mays; identical to SEQ ID NO: 1971
  misc_feature (1)..(700): Ceres Seq. ID no. 13494781
  misc_feature: MA Experiment ID: 20000478 Result: Up-regulated in Transcription
  misc_feature: MA Experiment 20000478 PARAMETER Experiment Name: Zm_5mM_SA_P Parameter: Age (day) Value: 11
  misc_feature: MA Experiment 20000478 PARAMETER Experiment Name: Zm_5mM_SA_P Parameter: Organism Value: Zea mays
  misc_feature: MA Experiment 20000478 PARAMETER Experiment Name: Zm_5mM_SA_P Parameter: Plant Line Value: 35A19
  misc_feature: MA Experiment 20000478 PARAMETER Experiment Name: Zm_5mM_SA_P Parameter: Timepoint (hr) Value: 72
  misc_feature: MA Experiment 20000478 PARAMETER Experiment Name: Zm_5mM_SA_P Parameter: Tissue Value: Aerial
  misc_feature: MA Experiment 20000478 PARAMETER Experiment Name: Zm_5mM_SA_P Parameter: Treatment Value: 5mM SA vs. No Treatment
  misc_feature: MA Experiment ID: 20000480 Result: Up-regulated in Transcription
  misc_feature: MA Experiment 20000480 PARAMETER Experiment Name: Zm_Drought_P Parameter: Age (day) Value: 11
  misc_feature: MA Experiment 20000480 PARAMETER Experiment Name: Zm_Drought_P Parameter: Organism Value: Zea mays
  misc_feature: MA Experiment 20000480 PARAMETER Experiment Name: Zm_Drought_P Parameter: Plant Line Value: 35A19
  misc_feature: MA Experiment 20000480 PARAMETER Experiment Name: Zm_Drought_P Parameter: Timepoint (hr) Value: 72
  misc_feature: MA Experiment 20000480 PARAMETER Experiment Name: Zm_Drought_P Parameter: Tissue Value: Aerial
  misc_feature: MA Experiment 20000480 PARAMETER Experiment Name: Zm_Drought_P Parameter: Treatment Value: Drought vs. No Drought

SEQ ID NO: 13840 - protein, 233 aa, Zea mays subsp. mays; identical to SEQ ID NO: 1972
  peptide (1)..(233): Ceres Seq. ID no. 13494782
  misc_feature (59)..(126): Pfam Name: CRAL/TRIO, N-terminus Pfam Description: CRAL/TRIO, N-terminus

SEQ ID NO: 13841 - protein, 176 aa, Zea mays subsp. mays; identical to SEQ ID NO: 1973
  peptide (1)..(176): Ceres Seq. ID no. 13494783
  misc_feature (2)..(69): Pfam Name: CRAL/TRIO, N-terminus Pfam Description: CRAL/TRIO, N-terminus

SEQ ID NO: 13842 - protein, 161 aa, Zea mays subsp. mays; identical to SEQ ID NO: 1974
  peptide (1)..(161): Ceres Seq. ID no. 13494784
  misc_feature (1)..(54): Pfam Name: CRAL/TRIO, N-terminus Pfam Description: CRAL/TRIO, N-terminus

SEQ ID NO: 13843 - DNA, 1410 bp, Zea mays subsp. mays
  misc_feature (1)..(1410): Ceres Seq. ID no. 12419029
  misc_feature: MA Experiment ID: 108522 Result: Up-regulated in Transcription
  misc_feature: MA Experiment 108522 PARAMETER Experiment Name: Zm_42deg_Heat_P Parameter: Age (day) Value: 8
  misc_feature: MA Experiment 108522 PARAMETER Experiment Name: Zm_42deg_Heat_P Parameter: Organism Value: Zea mays
  misc_feature: MA Experiment 108522 PARAMETER Experiment Name: Zm_42deg_Heat_P Parameter: Plant Line Value: 35A19
  misc_feature: MA Experiment 108522 PARAMETER Experiment Name: Zm_42deg_Heat_P Parameter: Temperature (deg C) Value: 42 vs. 22
  misc_feature: MA Experiment 108522 PARAMETER Experiment Name: Zm_42deg_Heat_P Parameter: Timepoint (hr) Value: 1
  misc_feature: MA Experiment 108522 PARAMETER Experiment Name: Zm_42deg_Heat_P Parameter: Tissue Value: Aerial
  misc_feature: MA Experiment ID: 108523 Result: Up-regulated in Transcription
  misc_feature: MA Experiment 108523 PARAMETER Experiment Name: Zm_42deg_Heat_P Parameter: Age (day) Value: 8
  misc_feature: MA Experiment 108523 PARAMETER Experiment Name: Zm_42deg_Heat_P Parameter: Organism Value: Zea mays
  misc_feature: MA Experiment 108523 PARAMETER Experiment Name: Zm_42deg_Heat_P Parameter: Plant Line Value: 35A19
  misc_feature: MA Experiment 108523 PARAMETER Experiment Name: Zm_42deg_Heat_P Parameter: Temperature (deg C) Value: 42 vs. 22
  misc_feature: MA Experiment 108523 PARAMETER Experiment Name: Zm_42deg_Heat_P Parameter: Timepoint (hr) Value: 6
  misc_feature: MA Experiment 108523 PARAMETER Experiment Name: Zm_42deg_Heat_P Parameter: Tissue Value: Aerial
accgctacccaaccgccgccgcggttctcgctgccagcgacggacgggccacaccgcgcaggggctcagccccgccacccaccttaaccccgccgtcgggaggcgtcgtccccggcccggcccggcccggccctcgccctctactgcaactggactggcgcgtagacctgtccccgccacgagatcgttccgccctatgtcggtgaagatgctctttgcatagctcaagctgcaatctgatggactctgatgacaagaagtttggaaatggaccaagggagctcactggtgctgttgatttgatcagccactacaaactgctgccacaccatgatttcttttgcaagaaacctttgccgctggcaatatcagatacacattatcttcacaatgttgtgggagacactgaaattcgcaaaggagaaggaatggagttagatcaacttgttcataatgcatatctgagggataaacctgcttatattcagccctttgatatggaaactctggggcaagcgttccaacttcgagaaacagctcttgtggatttgccttctactgaaaaaggtataccgactatttcgggtaaaccaaaaagtgagtccaaggacaaagagaagaagcataaaaggcacaaagacaaagacaaggaacataagaagcacaaacatcggcataaggatcggagtaaggacaaagataaagacaaagacaaggataagaaaaaagataaaagtggccatcatgaaaagaagaggaagcatgagggaacagaagattcagtagatgtgcataagcacaagaagagtaagcacaagagctccaaaaccgatgagatggggaatggagttagttaacacttcctagctctacctccaatccttgtaatttgctgttaaaacttaaaaggagacagacggtctctgctatcaaaaccctgtgcagaatagtgggtatcatgaatgggagctcttatttttgcagagtccattgtgaagagaattgaatttgttaatataggtctaatccttccaactgtgcaaatcaactgtgttcctccctgaagcattggttgtagggtgcgcttgaaaggatgtgcaatgagattgtttcgatgtaacgtgcatgagtacactgagtagctgtggatggttatacagtttgtggtctagggatgtgcagtgagggcagggaattgggaataatttcgtgcccccatcgaccttgatttgtagggtaggatgatttactgtttaaccactagcaaatgttagtagccagttccatgttcatttactccacggcaactgtgctttcgtgtgccaataaccggagttgatccacatgtaatgaattggtgtcaaattgacgatcctgtgtttcaaagtatggttattggatcgtgttgcc

SEQ ID NO: 13844 - protein, 205 aa, Zea mays subsp. mays
  peptide (1)..(205): Ceres Seq. ID no. 12419030
  misc_feature (107)..(204): Pfam Name: SART-1 family Pfam Description: SART-1 family
  misc_feature (1)..(201): Homolog of NCBI NO: 15239764 NR Description: putative protein; protein id: At5g19480.1
  misc_feature (1)..(201): Homolog of NCBI NO: 38454176 NR Description: At5g12230 [Arabidopsis thaliana]
  misc_feature (1)..(201): Homolog of NCBI NO: 15239910 NR Description: unknown protein; protein id: At5g12230.1 thaliana] >gi|9759390|dbj|BAB10041.1| gene_id:MXC9.19~unknown
  misc_feature (72)..(197): Homolog of NCBI NO: 29246869 NR Description: GLP_191_32543_34384 [Giardia lamblia ATCC 50803]
  misc_feature (117)..(205): Homolog of NCBI NO: 24644016 NR Description: CG1078-PA [Drosophila melanogaster]
  misc_feature (117)..(198): Homolog of NCBI NO: 39592010 NR Description: Hypothetical protein CBG23181 [Caenorhabditis
  misc_feature (117)..(196): Homolog of NCBI NO: 23508991 NR Description: hypothetical protein [Plasmodium falciparum 3D7]
  misc_feature (117)..(194): Homolog of NCBI NO: 17558380 NR Description: Putative nuclear protein, with a coiled coil-4 nematode specific [Caenorhabditis elegans]
  misc_feature (117)..(199): Homolog of NCBI NO: 23612468 NR Description: heat shock protein 86 family protein [Plasmodium
  misc_feature (114)..(199): Homolog of NCBI NO: 21040255 NR Description: splicing factor, arginine/serine-rich 12;
MDSDDKKFGNGPRELTGAVDLISHYKLLPHHDFFCKKPLPLAISDTHYLHNVVGDTEIRKGEGMELDQLVHNAYLRDKPAYIQPFDMETLGQAFQLRETALVDLPSTEKGIPTISGKPKSESKDKEKKHKRHKDKDKEHKKHKHRHKDRSKDKDKDKDKDKKKDKSGHHEKKRKHEGTEDSVDVHKHKKSKHKSSKTDEMGNGVS

SEQ ID NO: 13845 - protein, 142 aa, Zea mays subsp. mays
  peptide (1)..(142): Ceres Seq. ID no. 12419031
  misc_feature (44)..(141): Pfam Name: SART-1 family Pfam Description: SART-1 family
  misc_feature (1)..(138): Homolog of NCBI NO: 15239764 NR Description: putative protein; protein id: At5g19480.1
  misc_feature (1)..(138): Homolog of NCBI NO: 38454176 NR Description: At5g12230 [Arabidopsis thaliana]
  misc_feature (1)..(138): Homolog of NCBI NO: 15239910 NR Description: unknown protein; protein id: At5g12230.1 thaliana] >gi|9759390|dbj|BAB10041.1| gene_id:MXC9.19~unknown
  misc_feature (9)..(134): Homolog of NCBI NO: 29246869 NR Description: GLP_191_32543_34384 [Giardia lamblia ATCC 50803]
  misc_feature (54)..(142): Homolog of NCBI NO: 24644016 NR Description: CG1078-PA [Drosophila melanogaster]
  misc_feature (54)..(135): Homolog of NCBI NO: 39592010 NR Description: Hypothetical protein CBG23181 [Caenorhabditis
  misc_feature (54)..(133): Homolog of NCBI NO: 23508991 NR Description: hypothetical protein [Plasmodium falciparum 3D7]
  misc_feature (54)..(131): Homolog of NCBI NO: 17558380 NR Description: Putative nuclear protein, with a coiled coil-4 nematode specific [Caenorhabditis elegans]
  misc_feature (54)..(136): Homolog of NCBI NO: 23612468 NR Description: heat shock protein 86 family protein [Plasmodium
  misc_feature (51)..(136): Homolog of NCBI NO: 21040255 NR Description: splicing factor, arginine/serine-rich 12;
MELDQLVHNAYLRDKPAYIQPFDMETLGQAFQLRETALVDLPSTEKGIPTISGKPKSESKDKEKKHKRHKDKDKEHKKHKHRHKDRSKDKDKDKDKDKKKDKSGHHEKKRKHEGTEDSVDVHKHKKSKHKSSKTDEMGNGVS

SEQ ID NO: 13846 - protein, 119 aa, Zea mays subsp. mays
  peptide (1)..(119): Ceres Seq. ID no. 12419032
  misc_feature (21)..(118): Pfam Name: SART-1 family Pfam Description: SART-1 family
  misc_feature (1)..(115): Homolog of NCBI NO: 15239764 NR Description: putative protein; protein id: At5g19480.1
  misc_feature (1)..(115): Homolog of NCBI NO: 38454176 NR Description: At5g12230 [Arabidopsis thaliana]
  misc_feature (1)..(115): Homolog of NCBI NO: 15239910 NR Description: unknown protein; protein id: At5g12230.1 thaliana] >gi|9759390|dbj|BAB10041.1| gene_id:MXC9.19~unknown
  misc_feature (1)..(111): Homolog of NCBI NO: 29246869 NR Description: GLP_191_32543_34384 [Giardia lamblia ATCC 50803]
  misc_feature (31)..(119): Homolog of NCBI NO: 24644016 NR Description: CG1078-PA [Drosophila melanogaster]
  misc_feature (31)..(112): Homolog of NCBI NO: 39592010 NR Description: Hypothetical protein CBG23181 [Caenorhabditis
  misc_feature (31)..(110): Homolog of NCBI NO: 23508991 NR Description: hypothetical protein [Plasmodium falciparum 3D7]
  misc_feature (31)..(108): Homolog of NCBI NO: 17558380 NR Description: Putative nuclear protein, with a coiled coil-4 nematode specific [Caenorhabditis elegans]
  misc_feature (31)..(113): Homolog of NCBI NO: 23612468 NR Description: heat shock protein 86 family protein [Plasmodium
  misc_feature (28)..(113): Homolog of NCBI NO: 21040255 NR Description: splicing factor, arginine/serine-rich 12;
METLGQAFQLRETALVDLPSTEKGIPTISGKPKSESKDKEKKHKRHKDKDKEHKKHKHRHKDRSKDKDKDKDKDKKKDKSGHHEKKRKHEGTEDSVDVHKHKKSKHKSSKTDEMGNGVS
